United States Patent Application Publication US 2026/0258383 A1, published September 3, 2026 (application 19/165,501).

The application's sequence listing, which the Patent Office published only in electronic form, follows.

SEQUENCE LISTING (8378 sequences)

SEQ ID NO: 1 - protein, 2133 aa, synthetic construct
MPAAKRVKLDGGDKKYSIGLDIGTNSVGWAVITDEYKVPSKKFKVLGNTDRHSIKKNLIGALLFDSGETAEATRLKRTARRRYTRRKNRICYLQEIFSNEMAKVDDSFFHRLEESFLVEEDKKHERHPIFGNIVDEVAYHEKYPTIYHLRKKLVDSTDKADLRLIYLALAHMIKFRGHFLIEGDLNPDNSDVDKLFIQLVQTYNQLFEENPINASGVDAKAILSARLSKSRRLENLIAQLPGEKKNGLFGNLIALSLGLTPNFKSNFDLAEDAKLQLSKDTYDDDLDNLLAQIGDQYADLFLAAKNLSDAILLSDILRVNTEITKAPLSASMIKRYDEHHQDLTLLKALVRQQLPEKYKEIFFDQSKNGYAGYIDGGASQEEFYKFIKPILEKMDGTEELLVKLNREDLLRKQRTFDNGSIPHQIHLGELHAILRRQEDFYPFLKDNREKIEKILTFRIPYYVGPLARGNSRFAWMTRKSEETITPWNFEEVVDKGASAQSFIERMTNFDKNLPNEKVLPKHSLLYEYFTVYNELTKVKYVTEGMRKPAFLSGEQKKAIVDLLFKTNRKVTVKQLKEDYFKKIECFDSVEISGVEDRFNASLGTYHDLLKIIKDKDFLDNEENEDILEDIVLTLTLFEDREMIEERLKTYAHLFDDKVMKQLKRRRYTGWGRLSRKLINGIRDKQSGKTILDFLKSDGFANRNFMQLIHDDSLTFKEDIQKAQVSGQGDSLHEHIANLAGSPAIKKGILQTVKVVDELVKVMGRHKPENIVIEMARENQTTQKGQKNSRERMKRIEEGIKELGSQILKEHPVENTQLQNEKLYLYYLQNGRDMYVDQELDINRLSDYDVDHIVPQSFLKDDSIDNKVLTRSDKARGKSDNVPSEEVVKKMKNYWRQLLNAKLITQRKFDNLTKAERGGLSELDKAGFIKRQLVETRQITKHVAQILDSRMNTKYDENDKLIREVKVITLKSKLVSDFRKDFQFYKVREINNYHHAHDAYLNAVVGTALIKKYPKLESEFVYGDYKVYDVRKMIAKSEQEIGKATAKYFFYSNIMNFFKTEITLANGEIRKRPLIETNGETGEIVWDKGRDFATVRKVLSMPQVNIVKKTEVQTGGFSKESILPKRNSDKLIARKKDWDPKKYGGFDSPTVAYSVLVVAKVEKGKSKKLKSVKELLGITIMERSSFEKNPIDFLEAKGYKEVKKDLIIKLPKYSLFELENGRKRMLASAGELQKGNELALPSKYVNFLYLASHYEKLKGSPEDNEQKQLFVEQHKHYLDEIIEQISEFSKRVILADANLDKVLSAYNKHRDKPIREQAENIIHLFTLTNLGAPAAFKYFDTTIDRKRYTSTKEVLDATLIHQSITGLYETRIDLSQLGGDGGAEAAAKEAAAKEAAAKEAAAKALEAEAAAKEAAAKEAAAKEAAAKAGGTAPLEEEYRLFLEAPIQNVTLLEQWKREIPKVWAEINPPGLASTQAPIHVQLLSTALPVRVRQYPITLEAKRSLRETIRKFRAAGILRPVHSPWNTPLLPVRKSGTSEYRMVQDLREVNKRVETIHPTVPNPYTLLSLLPPDRIWYSVLDLKDAFFCIPLAPESQLIFAFEWADAEEGESGQLTWTRLPQGFKNSPTLFDEALNRDLQGFRLDHPSVSLLQYVDDLLIAADTQAACLSATRDLLMTLAELGYRVSGKKAQLCQEEVTYLGFKIHKGSRSLSNSRTQAILQIPVPKTKRQVREFLGTIGYCRLWIPGFAELAQPLYAATRGGNDPLVWGEKEEEAFQSLKLALTQPPALALPSLDKPFQLFVEETSGAAKGVLTQALGPWKRPVAYLSKRLDPVAAGWPRCLRAIAAAALLTREASKLTFGQDIEITSSHNLESLLRSPPDKWLTNARITQYQVLLLDPPRVRFKQTAALNPATLLPETDDTLPIHHCLDTLDSLTSTRPDLTDQPLAQAEATLFTDGSSYIRDGKRYAGAAVVTLDSVIWAEPLPIGTSAQKAELIALTKALEWSKDKSVNIYTDSRYAFATLHVHGMIYRERGLLTAGGKAIKNAPEILALLTAVWLPKRVAVMHCKGHQKDDAPTSTGNRRADEVAREVAIRPLSTQATISAGKRTADGSEFEKRTADGSEFESPKKKAKVE

SEQ ID NO: 2 - protein, 2112 aa, synthetic construct
MPAAKRVKLDGGDKKYSIGLDIGTNSVGWAVITDEYKVPSKKFKVLGNTDRHSIKKNLIGALLFDSGETAEATRLKRTARRRYTRRKNRICYLQEIFSNEMAKVDDSFFHRLEESFLVEEDKKHERHPIFGNIVDEVAYHEKYPTIYHLRKKLVDSTDKADLRLIYLALAHMIKFRGHFLIEGDLNPDNSDVDKLFIQLVQTYNQLFEENPINASGVDAKAILSARLSKSRRLENLIAQLPGEKKNGLFGNLIALSLGLTPNFKSNFDLAEDAKLQLSKDTYDDDLDNLLAQIGDQYADLFLAAKNLSDAILLSDILRVNTEITKAPLSASMIKRYDEHHQDLTLLKALVRQQLPEKYKEIFFDQSKNGYAGYIDGGASQEEFYKFIKPILEKMDGTEELLVKLNREDLLRKQRTFDNGSIPHQIHLGELHAILRRQEDFYPFLKDNREKIEKILTFRIPYYVGPLARGNSRFAWMTRKSEETITPWNFEEVVDKGASAQSFIERMTNFDKNLPNEKVLPKHSLLYEYFTVYNELTKVKYVTEGMRKPAFLSGEQKKAIVDLLFKTNRKVTVKQLKEDYFKKIECFDSVEISGVEDRFNASLGTYHDLLKIIKDKDFLDNEENEDILEDIVLTLTLFEDREMIEERLKTYAHLFDDKVMKQLKRRRYTGWGRLSRKLINGIRDKQSGKTILDFLKSDGFANRNFMQLIHDDSLTFKEDIQKAQVSGQGDSLHEHIANLAGSPAIKKGILQTVKVVDELVKVMGRHKPENIVIEMARENQTTQKGQKNSRERMKRIEEGIKELGSQILKEHPVENTQLQNEKLYLYYLQNGRDMYVDQELDINRLSDYDVDHIVPQSFLKDDSIDNKVLTRSDKARGKSDNVPSEEVVKKMKNYWRQLLNAKLITQRKFDNLTKAERGGLSELDKAGFIKRQLVETRQITKHVAQILDSRMNTKYDENDKLIREVKVITLKSKLVSDFRKDFQFYKVREINNYHHAHDAYLNAVVGTALIKKYPKLESEFVYGDYKVYDVRKMIAKSEQEIGKATAKYFFYSNIMNFFKTEITLANGEIRKRPLIETNGETGEIVWDKGRDFATVRKVLSMPQVNIVKKTEVQTGGFSKESILPKRNSDKLIARKKDWDPKKYGGFDSPTVAYSVLVVAKVEKGKSKKLKSVKELLGITIMERSSFEKNPIDFLEAKGYKEVKKDLIIKLPKYSLFELENGRKRMLASAGELQKGNELALPSKYVNFLYLASHYEKLKGSPEDNEQKQLFVEQHKHYLDEIIEQISEFSKRVILADANLDKVLSAYNKHRDKPIREQAENIIHLFTLTNLGAPAAFKYFDTTIDRKRYTSTKEVLDATLIHQSITGLYETRIDLSQLGGDGGGGGGSGGGGSGGGGSGGGGSGGGGSGGTAPLEEEYRLFLEAPIQNVTLLEQWKREIPKVWAEINPPGLASTQAPIHVQLLSTALPVRVRQYPITLEAKRSLRETIRKFRAAGILRPVHSPWNTPLLPVRKSGTSEYRMVQDLREVNKRVETIHPTVPNPYTLLSLLPPDRIWYSVLDLKDAFFCIPLAPESQLIFAFEWADAEEGESGQLTWTRLPQGFKNSPTLFDEALNRDLQGFRLDHPSVSLLQYVDDLLIAADTQAACLSATRDLLMTLAELGYRVSGKKAQLCQEEVTYLGFKIHKGSRSLSNSRTQAILQIPVPKTKRQVREFLGTIGYCRLWIPGFAELAQPLYAATRGGNDPLVWGEKEEEAFQSLKLALTQPPALALPSLDKPFQLFVEETSGAAKGVLTQALGPWKRPVAYLSKRLDPVAAGWPRCLRAIAAAALLTREASKLTFGQDIEITSSHNLESLLRSPPDKWLTNARITQYQVLLLDPPRVRFKQTAALNPATLLPETDDTLPIHHCLDTLDSLTSTRPDLTDQPLAQAEATLFTDGSSYIRDGKRYAGAAVVTLDSVIWAEPLPIGTSAQKAELIALTKALEWSKDKSVNIYTDSRYAFATLHVHGMIYRERGLLTAGGKAIKNAPEILALLTAVWLPKRVAVMHCKGHQKDDAPTSTGNRRADEVAREVAIRPLSTQATISAGKRTADGSEFEKRTADGSEFESPKKKAKVE

SEQ ID NO: 3 - protein, 2098 aa, synthetic construct
MPAAKRVKLDGGDKKYSIGLDIGTNSVGWAVITDEYKVPSKKFKVLGNTDRHSIKKNLIGALLFDSGETAEATRLKRTARRRYTRRKNRICYLQEIFSNEMAKVDDSFFHRLEESFLVEEDKKHERHPIFGNIVDEVAYHEKYPTIYHLRKKLVDSTDKADLRLIYLALAHMIKFRGHFLIEGDLNPDNSDVDKLFIQLVQTYNQLFEENPINASGVDAKAILSARLSKSRRLENLIAQLPGEKKNGLFGNLIALSLGLTPNFKSNFDLAEDAKLQLSKDTYDDDLDNLLAQIGDQYADLFLAAKNLSDAILLSDILRVNTEITKAPLSASMIKRYDEHHQDLTLLKALVRQQLPEKYKEIFFDQSKNGYAGYIDGGASQEEFYKFIKPILEKMDGTEELLVKLNREDLLRKQRTFDNGSIPHQIHLGELHAILRRQEDFYPFLKDNREKIEKILTFRIPYYVGPLARGNSRFAWMTRKSEETITPWNFEEVVDKGASAQSFIERMTNFDKNLPNEKVLPKHSLLYEYFTVYNELTKVKYVTEGMRKPAFLSGEQKKAIVDLLFKTNRKVTVKQLKEDYFKKIECFDSVEISGVEDRFNASLGTYHDLLKIIKDKDFLDNEENEDILEDIVLTLTLFEDREMIEERLKTYAHLFDDKVMKQLKRRRYTGWGRLSRKLINGIRDKQSGKTILDFLKSDGFANRNFMQLIHDDSLTFKEDIQKAQVSGQGDSLHEHIANLAGSPAIKKGILQTVKVVDELVKVMGRHKPENIVIEMARENQTTQKGQKNSRERMKRIEEGIKELGSQILKEHPVENTQLQNEKLYLYYLQNGRDMYVDQELDINRLSDYDVDHIVPQSFLKDDSIDNKVLTRSDKARGKSDNVPSEEVVKKMKNYWRQLLNAKLITQRKFDNLTKAERGGLSELDKAGFIKRQLVETRQITKHVAQILDSRMNTKYDENDKLIREVKVITLKSKLVSDFRKDFQFYKVREINNYHHAHDAYLNAVVGTALIKKYPKLESEFVYGDYKVYDVRKMIAKSEQEIGKATAKYFFYSNIMNFFKTEITLANGEIRKRPLIETNGETGEIVWDKGRDFATVRKVLSMPQVNIVKKTEVQTGGFSKESILPKRNSDKLIARKKDWDPKKYGGFDSPTVAYSVLVVAKVEKGKSKKLKSVKELLGITIMERSSFEKNPIDFLEAKGYKEVKKDLIIKLPKYSLFELENGRKRMLASAGELQKGNELALPSKYVNFLYLASHYEKLKGSPEDNEQKQLFVEQHKHYLDEIIEQISEFSKRVILADANLDKVLSAYNKHRDKPIREQAENIIHLFTLTNLGAPAAFKYFDTTIDRKRYTSTKEVLDATLIHQSITGLYETRIDLSQLGGDGGPAPEAAAKGGGGGTAPLEEEYRLFLEAPIQNVTLLEQWKREIPKVWAEINPPGLASTQAPIHVQLLSTALPVRVRQYPITLEAKRSLRETIRKFRAAGILRPVHSPWNTPLLPVRKSGTSEYRMVQDLREVNKRVETIHPTVPNPYTLLSLLPPDRIWYSVLDLKDAFFCIPLAPESQLIFAFEWADAEEGESGQLTWTRLPQGFKNSPTLFDEALNRDLQGFRLDHPSVSLLQYVDDLLIAADTQAACLSATRDLLMTLAELGYRVSGKKAQLCQEEVTYLGFKIHKGSRSLSNSRTQAILQIPVPKTKRQVREFLGTIGYCRLWIPGFAELAQPLYAATRGGNDPLVWGEKEEEAFQSLKLALTQPPALALPSLDKPFQLFVEETSGAAKGVLTQALGPWKRPVAYLSKRLDPVAAGWPRCLRAIAAAALLTREASKLTFGQDIEITSSHNLESLLRSPPDKWLTNARITQYQVLLLDPPRVRFKQTAALNPATLLPETDDTLPIHHCLDTLDSLTSTRPDLTDQPLAQAEATLFTDGSSYIRDGKRYAGAAVVTLDSVIWAEPLPIGTSAQKAELIALTKALEWSKDKSVNIYTDSRYAFATLHVHGMIYRERGLLTAGGKAIKNAPEILALLTAVWLPKRVAVMHCKGHQKDDAPTSTGNRRADEVAREVAIRPLSTQATISAGKRTADGSEFEKRTADGSEFESPKKKAKVE

SEQ ID NO: 4 - protein, 2090 aa, synthetic construct
MPAAKRVKLDGGDKKYSIGLDIGTNSVGWAVITDEYKVPSKKFKVLGNTDRHSIKKNLIGALLFDSGETAEATRLKRTARRRYTRRKNRICYLQEIFSNEMAKVDDSFFHRLEESFLVEEDKKHERHPIFGNIVDEVAYHEKYPTIYHLRKKLVDSTDKADLRLIYLALAHMIKFRGHFLIEGDLNPDNSDVDKLFIQLVQTYNQLFEENPINASGVDAKAILSARLSKSRRLENLIAQLPGEKKNGLFGNLIALSLGLTPNFKSNFDLAEDAKLQLSKDTYDDDLDNLLAQIGDQYADLFLAAKNLSDAILLSDILRVNTEITKAPLSASMIKRYDEHHQDLTLLKALVRQQLPEKYKEIFFDQSKNGYAGYIDGGASQEEFYKFIKPILEKMDGTEELLVKLNREDLLRKQRTFDNGSIPHQIHLGELHAILRRQEDFYPFLKDNREKIEKILTFRIPYYVGPLARGNSRFAWMTRKSEETITPWNFEEVVDKGASAQSFIERMTNFDKNLPNEKVLPKHSLLYEYFTVYNELTKVKYVTEGMRKPAFLSGEQKKAIVDLLFKTNRKVTVKQLKEDYFKKIECFDSVEISGVEDRFNASLGTYHDLLKIIKDKDFLDNEENEDILEDIVLTLTLFEDREMIEERLKTYAHLFDDKVMKQLKRRRYTGWGRLSRKLINGIRDKQSGKTILDFLKSDGFANRNFMQLIHDDSLTFKEDIQKAQVSGQGDSLHEHIANLAGSPAIKKGILQTVKVVDELVKVMGRHKPENIVIEMARENQTTQKGQKNSRERMKRIEEGIKELGSQILKEHPVENTQLQNEKLYLYYLQNGRDMYVDQELDINRLSDYDVDHIVPQSFLKDDSIDNKVLTRSDKARGKSDNVPSEEVVKKMKNYWRQLLNAKLITQRKFDNLTKAERGGLSELDKAGFIKRQLVETRQITKHVAQILDSRMNTKYDENDKLIREVKVITLKSKLVSDFRKDFQFYKVREINNYHHAHDAYLNAVVGTALIKKYPKLESEFVYGDYKVYDVRKMIAKSEQEIGKATAKYFFYSNIMNFFKTEITLANGEIRKRPLIETNGETGEIVWDKGRDFATVRKVLSMPQVNIVKKTEVQTGGFSKESILPKRNSDKLIARKKDWDPKKYGGFDSPTVAYSVLVVAKVEKGKSKKLKSVKELLGITIMERSSFEKNPIDFLEAKGYKEVKKDLIIKLPKYSLFELENGRKRMLASAGELQKGNELALPSKYVNFLYLASHYEKLKGSPEDNEQKQLFVEQHKHYLDEIIEQISEFSKRVILADANLDKVLSAYNKHRDKPIREQAENIIHLFTLTNLGAPAAFKYFDTTIDRKRYTSTKEVLDATLIHQSITGLYETRIDLSQLGGDGGGGGGGTAPLEEEYRLFLEAPIQNVTLLEQWKREIPKVWAEINPPGLASTQAPIHVQLLSTALPVRVRQYPITLEAKRSLRETIRKFRAAGILRPVHSPWNTPLLPVRKSGTSEYRMVQDLREVNKRVETIHPTVPNPYTLLSLLPPDRIWYSVLDLKDAFFCIPLAPESQLIFAFEWADAEEGESGQLTWTRLPQGFKNSPTLFDEALNRDLQGFRLDHPSVSLLQYVDDLLIAADTQAACLSATRDLLMTLAELGYRVSGKKAQLCQEEVTYLGFKIHKGSRSLSNSRTQAILQIPVPKTKRQVREFLGTIGYCRLWIPGFAELAQPLYAATRGGNDPLVWGEKEEEAFQSLKLALTQPPALALPSLDKPFQLFVEETSGAAKGVLTQALGPWKRPVAYLSKRLDPVAAGWPRCLRAIAAAALLTREASKLTFGQDIEITSSHNLESLLRSPPDKWLTNARITQYQVLLLDPPRVRFKQTAALNPATLLPETDDTLPIHHCLDTLDSLTSTRPDLTDQPLAQAEATLFTDGSSYIRDGKRYAGAAVVTLDSVIWAEPLPIGTSAQKAELIALTKALEWSKDKSVNIYTDSRYAFATLHVHGMIYRERGLLTAGGKAIKNAPEILALLTAVWLPKRVAVMHCKGHQKDDAPTSTGNRRADEVAREVAIRPLSTQATISAGKRTADGSEFEKRTADGSEFESPKKKAKVE

SEQ ID NO: 5 - protein, 2098 aa, synthetic construct
MPAAKRVKLDGGDKKYSIGLDIGTNSVGWAVITDEYKVPSKKFKVLGNTDRHSIKKNLIGALLFDSGETAEATRLKRTARRRYTRRKNRICYLQEIFSNEMAKVDDSFFHRLEESFLVEEDKKHERHPIFGNIVDEVAYHEKYPTIYHLRKKLVDSTDKADLRLIYLALAHMIKFRGHFLIEGDLNPDNSDVDKLFIQLVQTYNQLFEENPINASGVDAKAILSARLSKSRRLENLIAQLPGEKKNGLFGNLIALSLGLTPNFKSNFDLAEDAKLQLSKDTYDDDLDNLLAQIGDQYADLFLAAKNLSDAILLSDILRVNTEITKAPLSASMIKRYDEHHQDLTLLKALVRQQLPEKYKEIFFDQSKNGYAGYIDGGASQEEFYKFIKPILEKMDGTEELLVKLNREDLLRKQRTFDNGSIPHQIHLGELHAILRRQEDFYPFLKDNREKIEKILTFRIPYYVGPLARGNSRFAWMTRKSEETITPWNFEEVVDKGASAQSFIERMTNFDKNLPNEKVLPKHSLLYEYFTVYNELTKVKYVTEGMRKPAFLSGEQKKAIVDLLFKTNRKVTVKQLKEDYFKKIECFDSVEISGVEDRFNASLGTYHDLLKIIKDKDFLDNEENEDILEDIVLTLTLFEDREMIEERLKTYAHLFDDKVMKQLKRRRYTGWGRLSRKLINGIRDKQSGKTILDFLKSDGFANRNFMQLIHDDSLTFKEDIQKAQVSGQGDSLHEHIANLAGSPAIKKGILQTVKVVDELVKVMGRHKPENIVIEMARENQTTQKGQKNSRERMKRIEEGIKELGSQILKEHPVENTQLQNEKLYLYYLQNGRDMYVDQELDINRLSDYDVDHIVPQSFLKDDSIDNKVLTRSDKARGKSDNVPSEEVVKKMKNYWRQLLNAKLITQRKFDNLTKAERGGLSELDKAGFIKRQLVETRQITKHVAQILDSRMNTKYDENDKLIREVKVITLKSKLVSDFRKDFQFYKVREINNYHHAHDAYLNAVVGTALIKKYPKLESEFVYGDYKVYDVRKMIAKSEQEIGKATAKYFFYSNIMNFFKTEITLANGEIRKRPLIETNGETGEIVWDKGRDFATVRKVLSMPQVNIVKKTEVQTGGFSKESILPKRNSDKLIARKKDWDPKKYGGFDSPTVAYSVLVVAKVEKGKSKKLKSVKELLGITIMERSSFEKNPIDFLEAKGYKEVKKDLIIKLPKYSLFELENGRKRMLASAGELQKGNELALPSKYVNFLYLASHYEKLKGSPEDNEQKQLFVEQHKHYLDEIIEQISEFSKRVILADANLDKVLSAYNKHRDKPIREQAENIIHLFTLTNLGAPAAFKYFDTTIDRKRYTSTKEVLDATLIHQSITGLYETRIDLSQLGGDGGGGGGSSEAAAKGGTAPLEEEYRLFLEAPIQNVTLLEQWKREIPKVWAEINPPGLASTQAPIHVQLLSTALPVRVRQYPITLEAKRSLRETIRKFRAAGILRPVHSPWNTPLLPVRKSGTSEYRMVQDLREVNKRVETIHPTVPNPYTLLSLLPPDRIWYSVLDLKDAFFCIPLAPESQLIFAFEWADAEEGESGQLTWTRLPQGFKNSPTLFDEALNRDLQGFRLDHPSVSLLQYVDDLLIAADTQAACLSATRDLLMTLAELGYRVSGKKAQLCQEEVTYLGFKIHKGSRSLSNSRTQAILQIPVPKTKRQVREFLGTIGYCRLWIPGFAELAQPLYAATRGGNDPLVWGEKEEEAFQSLKLALTQPPALALPSLDKPFQLFVEETSGAAKGVLTQALGPWKRPVAYLSKRLDPVAAGWPRCLRAIAAAALLTREASKLTFGQDIEITSSHNLESLLRSPPDKWLTNARITQYQVLLLDPPRVRFKQTAALNPATLLPETDDTLPIHHCLDTLDSLTSTRPDLTDQPLAQAEATLFTDGSSYIRDGKRYAGAAVVTLDSVIWAEPLPIGTSAQKAELIALTKALEWSKDKSVNIYTDSRYAFATLHVHGMIYRERGLLTAGGKAIKNAPEILALLTAVWLPKRVAVMHCKGHQKDDAPTSTGNRRADEVAREVAIRPLSTQATISAGKRTADGSEFEKRTADGSEFESPKKKAKVE

SEQ ID NO: 6 - protein, 2098 aa, synthetic construct
MPAAKRVKLDGGDKKYSIGLDIGTNSVGWAVITDEYKVPSKKFKVLGNTDRHSIKKNLIGALLFDSGETAEATRLKRTARRRYTRRKNRICYLQEIFSNEMAKVDDSFFHRLEESFLVEEDKKHERHPIFGNIVDEVAYHEKYPTIYHLRKKLVDSTDKADLRLIYLALAHMIKFRGHFLIEGDLNPDNSDVDKLFIQLVQTYNQLFEENPINASGVDAKAILSARLSKSRRLENLIAQLPGEKKNGLFGNLIALSLGLTPNFKSNFDLAEDAKLQLSKDTYDDDLDNLLAQIGDQYADLFLAAKNLSDAILLSDILRVNTEITKAPLSASMIKRYDEHHQDLTLLKALVRQQLPEKYKEIFFDQSKNGYAGYIDGGASQEEFYKFIKPILEKMDGTEELLVKLNREDLLRKQRTFDNGSIPHQIHLGELHAILRRQEDFYPFLKDNREKIEKILTFRIPYYVGPLARGNSRFAWMTRKSEETITPWNFEEVVDKGASAQSFIERMTNFDKNLPNEKVLPKHSLLYEYFTVYNELTKVKYVTEGMRKPAFLSGEQKKAIVDLLFKTNRKVTVKQLKEDYFKKIECFDSVEISGVEDRFNASLGTYHDLLKIIKDKDFLDNEENEDILEDIVLTLTLFEDREMIEERLKTYAHLFDDKVMKQLKRRRYTGWGRLSRKLINGIRDKQSGKTILDFLKSDGFANRNFMQLIHDDSLTFKEDIQKAQVSGQGDSLHEHIANLAGSPAIKKGILQTVKVVDELVKVMGRHKPENIVIEMARENQTTQKGQKNSRERMKRIEEGIKELGSQILKEHPVENTQLQNEKLYLYYLQNGRDMYVDQELDINRLSDYDVDHIVPQSFLKDDSIDNKVLTRSDKARGKSDNVPSEEVVKKMKNYWRQLLNAKLITQRKFDNLTKAERGGLSELDKAGFIKRQLVETRQITKHVAQILDSRMNTKYDENDKLIREVKVITLKSKLVSDFRKDFQFYKVREINNYHHAHDAYLNAVVGTALIKKYPKLESEFVYGDYKVYDVRKMIAKSEQEIGKATAKYFFYSNIMNFFKTEITLANGEIRKRPLIETNGETGEIVWDKGRDFATVRKVLSMPQVNIVKKTEVQTGGFSKESILPKRNSDKLIARKKDWDPKKYGGFDSPTVAYSVLVVAKVEKGKSKKLKSVKELLGITIMERSSFEKNPIDFLEAKGYKEVKKDLIIKLPKYSLFELENGRKRMLASAGELQKGNELALPSKYVNFLYLASHYEKLKGSPEDNEQKQLFVEQHKHYLDEIIEQISEFSKRVILADANLDKVLSAYNKHRDKPIREQAENIIHLFTLTNLGAPAAFKYFDTTIDRKRYTSTKEVLDATLIHQSITGLYETRIDLSQLGGDGGGGSEAAAKGGGGGTAPLEEEYRLFLEAPIQNVTLLEQWKREIPKVWAEINPPGLASTQAPIHVQLLSTALPVRVRQYPITLEAKRSLRETIRKFRAAGILRPVHSPWNTPLLPVRKSGTSEYRMVQDLREVNKRVETIHPTVPNPYTLLSLLPPDRIWYSVLDLKDAFFCIPLAPESQLIFAFEWADAEEGESGQLTWTRLPQGFKNSPTLFDEALNRDLQGFRLDHPSVSLLQYVDDLLIAADTQAACLSATRDLLMTLAELGYRVSGKKAQLCQEEVTYLGFKIHKGSRSLSNSRTQAILQIPVPKTKRQVREFLGTIGYCRLWIPGFAELAQPLYAATRGGNDPLVWGEKEEEAFQSLKLALTQPPALALPSLDKPFQLFVEETSGAAKGVLTQALGPWKRPVAYLSKRLDPVAAGWPRCLRAIAAAALLTREASKLTFGQDIEITSSHNLESLLRSPPDKWLTNARITQYQVLLLDPPRVRFKQTAALNPATLLPETDDTLPIHHCLDTLDSLTSTRPDLTDQPLAQAEATLFTDGSSYIRDGKRYAGAAVVTLDSVIWAEPLPIGTSAQKAELIALTKALEWSKDKSVNIYTDSRYAFATLHVHGMIYRERGLLTAGGKAIKNAPEILALLTAVWLPKRVAVMHCKGHQKDDAPTSTGNRRADEVAREVAIRPLSTQATISAGKRTADGSEFEKRTADGSEFESPKKKAKVE

SEQ ID NO: 7 - protein, 2093 aa, synthetic construct
MPAAKRVKLDGGDKKYSIGLDIGTNSVGWAVITDEYKVPSKKFKVLGNTDRHSIKKNLIGALLFDSGETAEATRLKRTARRRYTRRKNRICYLQEIFSNEMAKVDDSFFHRLEESFLVEEDKKHERHPIFGNIVDEVAYHEKYPTIYHLRKKLVDSTDKADLRLIYLALAHMIKFRGHFLIEGDLNPDNSDVDKLFIQLVQTYNQLFEENPINASGVDAKAILSARLSKSRRLENLIAQLPGEKKNGLFGNLIALSLGLTPNFKSNFDLAEDAKLQLSKDTYDDDLDNLLAQIGDQYADLFLAAKNLSDAILLSDILRVNTEITKAPLSASMIKRYDEHHQDLTLLKALVRQQLPEKYKEIFFDQSKNGYAGYIDGGASQEEFYKFIKPILEKMDGTEELLVKLNREDLLRKQRTFDNGSIPHQIHLGELHAILRRQEDFYPFLKDNREKIEKILTFRIPYYVGPLARGNSRFAWMTRKSEETITPWNFEEVVDKGASAQSFIERMTNFDKNLPNEKVLPKHSLLYEYFTVYNELTKVKYVTEGMRKPAFLSGEQKKAIVDLLFKTNRKVTVKQLKEDYFKKIECFDSVEISGVEDRFNASLGTYHDLLKIIKDKDFLDNEENEDILEDIVLTLTLFEDREMIEERLKTYAHLFDDKVMKQLKRRRYTGWGRLSRKLINGIRDKQSGKTILDFLKSDGFANRNFMQLIHDDSLTFKEDIQKAQVSGQGDSLHEHIANLAGSPAIKKGILQTVKVVDELVKVMGRHKPENIVIEMARENQTTQKGQKNSRERMKRIEEGIKELGSQILKEHPVENTQLQNEKLYLYYLQNGRDMYVDQELDINRLSDYDVDHIVPQSFLKDDSIDNKVLTRSDKARGKSDNVPSEEVVKKMKNYWRQLLNAKLITQRKFDNLTKAERGGLSELDKAGFIKRQLVETRQITKHVAQILDSRMNTKYDENDKLIREVKVITLKSKLVSDFRKDFQFYKVREINNYHHAHDAYLNAVVGTALIKKYPKLESEFVYGDYKVYDVRKMIAKSEQEIGKATAKYFFYSNIMNFFKTEITLANGEIRKRPLIETNGETGEIVWDKGRDFATVRKVLSMPQVNIVKKTEVQTGGFSKESILPKRNSDKLIARKKDWDPKKYGGFDSPTVAYSVLVVAKVEKGKSKKLKSVKELLGITIMERSSFEKNPIDFLEAKGYKEVKKDLIIKLPKYSLFELENGRKRMLASAGELQKGNELALPSKYVNFLYLASHYEKLKGSPEDNEQKQLFVEQHKHYLDEIIEQISEFSKRVILADANLDKVLSAYNKHRDKPIREQAENIIHLFTLTNLGAPAAFKYFDTTIDRKRYTSTKEVLDATLIHQSITGLYETRIDLSQLGGDGGGGSGSSGGTAPLEEEYRLFLEAPIQNVTLLEQWKREIPKVWAEINPPGLASTQAPIHVQLLSTALPVRVRQYPITLEAKRSLRETIRKFRAAGILRPVHSPWNTPLLPVRKSGTSEYRMVQDLREVNKRVETIHPTVPNPYTLLSLLPPDRIWYSVLDLKDAFFCIPLAPESQLIFAFEWADAEEGESGQLTWTRLPQGFKNSPTLFDEALNRDLQGFRLDHPSVSLLQYVDDLLIAADTQAACLSATRDLLMTLAELGYRVSGKKAQLCQEEVTYLGFKIHKGSRSLSNSRTQAILQIPVPKTKRQVREFLGTIGYCRLWIPGFAELAQPLYAATRGGNDPLVWGEKEEEAFQSLKLALTQPPALALPSLDKPFQLFVEETSGAAKGVLTQALGPWKRPVAYLSKRLDPVAAGWPRCLRAIAAAALLTREASKLTFGQDIEITSSHNLESLLRSPPDKWLTNARITQYQVLLLDPPRVRFKQTAALNPATLLPETDDTLPIHHCLDTLDSLTSTRPDLTDQPLAQAEATLFTDGSSYIRDGKRYAGAAVVTLDSVIWAEPLPIGTSAQKAELIALTKALEWSKDKSVNIYTDSRYAFATLHVHGMIYRERGLLTAGGKAIKNAPEILALLTAVWLPKRVAVMHCKGHQKDDAPTSTGNRRADEVAREVAIRPLSTQATISAGKRTADGSEFEKRTADGSEFESPKKKAKVE

SEQ ID NO: 8 - protein, 2093 aa, synthetic construct
MPAAKRVKLDGGDKKYSIGLDIGTNSVGWAVITDEYKVPSKKFKVLGNTDRHSIKKNLIGALLFDSGETAEATRLKRTARRRYTRRKNRICYLQEIFSNEMAKVDDSFFHRLEESFLVEEDKKHERHPIFGNIVDEVAYHEKYPTIYHLRKKLVDSTDKADLRLIYLALAHMIKFRGHFLIEGDLNPDNSDVDKLFIQLVQTYNQLFEENPINASGVDAKAILSARLSKSRRLENLIAQLPGEKKNGLFGNLIALSLGLTPNFKSNFDLAEDAKLQLSKDTYDDDLDNLLAQIGDQYADLFLAAKNLSDAILLSDILRVNTEITKAPLSASMIKRYDEHHQDLTLLKALVRQQLPEKYKEIFFDQSKNGYAGYIDGGASQEEFYKFIKPILEKMDGTEELLVKLNREDLLRKQRTFDNGSIPHQIHLGELHAILRRQEDFYPFLKDNREKIEKILTFRIPYYVGPLARGNSRFAWMTRKSEETITPWNFEEVVDKGASAQSFIERMTNFDKNLPNEKVLPKHSLLYEYFTVYNELTKVKYVTEGMRKPAFLSGEQKKAIVDLLFKTNRKVTVKQLKEDYFKKIECFDSVEISGVEDRFNASLGTYHDLLKIIKDKDFLDNEENEDILEDIVLTLTLFEDREMIEERLKTYAHLFDDKVMKQLKRRRYTGWGRLSRKLINGIRDKQSGKTILDFLKSDGFANRNFMQLIHDDSLTFKEDIQKAQVSGQGDSLHEHIANLAGSPAIKKGILQTVKVVDELVKVMGRHKPENIVIEMARENQTTQKGQKNSRERMKRIEEGIKELGSQILKEHPVENTQLQNEKLYLYYLQNGRDMYVDQELDINRLSDYDVDHIVPQSFLKDDSIDNKVLTRSDKARGKSDNVPSEEVVKKMKNYWRQLLNAKLITQRKFDNLTKAERGGLSELDKAGFIKRQLVETRQITKHVAQILDSRMNTKYDENDKLIREVKVITLKSKLVSDFRKDFQFYKVREINNYHHAHDAYLNAVVGTALIKKYPKLESEFVYGDYKVYDVRKMIAKSEQEIGKATAKYFFYSNIMNFFKTEITLANGEIRKRPLIETNGETGEIVWDKGRDFATVRKVLSMPQVNIVKKTEVQTGGFSKESILPKRNSDKLIARKKDWDPKKYGGFDSPTVAYSVLVVAKVEKGKSKKLKSVKELLGITIMERSSFEKNPIDFLEAKGYKEVKKDLIIKLPKYSLFELENGRKRMLASAGELQKGNELALPSKYVNFLYLASHYEKLKGSPEDNEQKQLFVEQHKHYLDEIIEQISEFSKRVILADANLDKVLSAYNKHRDKPIREQAENIIHLFTLTNLGAPAAFKYFDTTIDRKRYTSTKEVLDATLIHQSITGLYETRIDLSQLGGDGGGGSPAPGGTAPLEEEYRLFLEAPIQNVTLLEQWKREIPKVWAEINPPGLASTQAPIHVQLLSTALPVRVRQYPITLEAKRSLRETIRKFRAAGILRPVHSPWNTPLLPVRKSGTSEYRMVQDLREVNKRVETIHPTVPNPYTLLSLLPPDRIWYSVLDLKDAFFCIPLAPESQLIFAFEWADAEEGESGQLTWTRLPQGFKNSPTLFDEALNRDLQGFRLDHPSVSLLQYVDDLLIAADTQAACLSATRDLLMTLAELGYRVSGKKAQLCQEEVTYLGFKIHKGSRSLSNSRTQAILQIPVPKTKRQVREFLGTIGYCRLWIPGFAELAQPLYAATRGGNDPLVWGEKEEEAFQSLKLALTQPPALALPSLDKPFQLFVEETSGAAKGVLTQALGPWKRPVAYLSKRLDPVAAGWPRCLRAIAAAALLTREASKLTFGQDIEITSSHNLESLLRSPPDKWLTNARITQYQVLLLDPPRVRFKQTAALNPATLLPETDDTLPIHHCLDTLDSLTSTRPDLTDQPLAQAEATLFTDGSSYIRDGKRYAGAAVVTLDSVIWAEPLPIGTSAQKAELIALTKALEWSKDKSVNIYTDSRYAFATLHVHGMIYRERGLLTAGGKAIKNAPEILALLTAVWLPKRVAVMHCKGHQKDDAPTSTGNRRADEVAREVAIRPLSTQATISAGKRTADGSEFEKRTADGSEFESPKKKAKVE

SEQ ID NO: 9 - protein, 2097 aa, synthetic construct
MPAAKRVKLDGGDKKYSIGLDIGTNSVGWAVITDEYKVPSKKFKVLGNTDRHSIKKNLIGALLFDSGETAEATRLKRTARRRYTRRKNRICYLQEIFSNEMAKVDDSFFHRLEESFLVEEDKKHERHPIFGNIVDEVAYHEKYPTIYHLRKKLVDSTDKADLRLIYLALAHMIKFRGHFLIEGDLNPDNSDVDKLFIQLVQTYNQLFEENPINASGVDAKAILSARLSKSRRLENLIAQLPGEKKNGLFGNLIALSLGLTPNFKSNFDLAEDAKLQLSKDTYDDDLDNLLAQIGDQYADLFLAAKNLSDAILLSDILRVNTEITKAPLSASMIKRYDEHHQDLTLLKALVRQQLPEKYKEIFFDQSKNGYAGYIDGGASQEEFYKFIKPILEKMDGTEELLVKLNREDLLRKQRTFDNGSIPHQIHLGELHAILRRQEDFYPFLKDNREKIEKILTFRIPYYVGPLARGNSRFAWMTRKSEETITPWNFEEVVDKGASAQSFIERMTNFDKNLPNEKVLPKHSLLYEYFTVYNELTKVKYVTEGMRKPAFLSGEQKKAIVDLLFKTNRKVTVKQLKEDYFKKIECFDSVEISGVEDRFNASLGTYHDLLKIIKDKDFLDNEENEDILEDIVLTLTLFEDREMIEERLKTYAHLFDDKVMKQLKRRRYTGWGRLSRKLINGIRDKQSGKTILDFLKSDGFANRNFMQLIHDDSLTFKEDIQKAQVSGQGDSLHEHIANLAGSPAIKKGILQTVKVVDELVKVMGRHKPENIVIEMARENQTTQKGQKNSRERMKRIEEGIKELGSQILKEHPVENTQLQNEKLYLYYLQNGRDMYVDQELDINRLSDYDVDHIVPQSFLKDDSIDNKVLTRSDKARGKSDNVPSEEVVKKMKNYWRQLLNAKLITQRKFDNLTKAERGGLSELDKAGFIKRQLVETRQITKHVAQILDSRMNTKYDENDKLIREVKVITLKSKLVSDFRKDFQFYKVREINNYHHAHDAYLNAVVGTALIKKYPKLESEFVYGDYKVYDVRKMIAKSEQEIGKATAKYFFYSNIMNFFKTEITLANGEIRKRPLIETNGETGEIVWDKGRDFATVRKVLSMPQVNIVKKTEVQTGGFSKESILPKRNSDKLIARKKDWDPKKYGGFDSPTVAYSVLVVAKVEKGKSKKLKSVKELLGITIMERSSFEKNPIDFLEAKGYKEVKKDLIIKLPKYSLFELENGRKRMLASAGELQKGNELALPSKYVNFLYLASHYEKLKGSPEDNEQKQLFVEQHKHYLDEIIEQISEFSKRVILADANLDKVLSAYNKHRDKPIREQAENIIHLFTLTNLGAPAAFKYFDTTIDRKRYTSTKEVLDATLIHQSITGLYETRIDLSQLGGDGGGGGGSGGGGSGGTAPLEEEYRLFLEAPIQNVTLLEQWKREIPKVWAEINPPGLASTQAPIHVQLLSTALPVRVRQYPITLEAKRSLRETIRKFRAAGILRPVHSPWNTPLLPVRKSGTSEYRMVQDLREVNKRVETIHPTVPNPYTLLSLLPPDRIWYSVLDLKDAFFCIPLAPESQLIFAFEWADAEEGESGQLTWTRLPQGFKNSPTLFDEALNRDLQGFRLDHPSVSLLQYVDDLLIAADTQAACLSATRDLLMTLAELGYRVSGKKAQLCQEEVTYLGFKIHKGSRSLSNSRTQAILQIPVPKTKRQVREFLGTIGYCRLWIPGFAELAQPLYAATRGGNDPLVWGEKEEEAFQSLKLALTQPPALALPSLDKPFQLFVEETSGAAKGVLTQALGPWKRPVAYLSKRLDPVAAGWPRCLRAIAAAALLTREASKLTFGQDIEITSSHNLESLLRSPPDKWLTNARITQYQVLLLDPPRVRFKQTAALNPATLLPETDDTLPIHHCLDTLDSLTSTRPDLTDQPLAQAEATLFTDGSSYIRDGKRYAGAAVVTLDSVIWAEPLPIGTSAQKAELIALTKALEWSKDKSVNIYTDSRYAFATLHVHGMIYRERGLLTAGGKAIKNAPEILALLTAVWLPKRVAVMHCKGHQKDDAPTSTGNRRADEVAREVAIRPLSTQATISAGKRTADGSEFEKRTADGSEFESPKKKAKVE

SEQ ID NO: 10 - protein, 2097 aa, synthetic construct
MPAAKRVKLDGGDKKYSIGLDIGTNSVGWAVITDEYKVPSKKFKVLGNTDRHSIKKNLIGALLFDSGETAEATRLKRTARRRYTRRKNRICYLQEIFSNEMAKVDDSFFHRLEESFLVEEDKKHERHPIFGNIVDEVAYHEKYPTIYHLRKKLVDSTDKADLRLIYLALAHMIKFRGHFLIEGDLNPDNSDVDKLFIQLVQTYNQLFEENPINASGVDAKAILSARLSKSRRLENLIAQLPGEKKNGLFGNLIALSLGLTPNFKSNFDLAEDAKLQLSKDTYDDDLDNLLAQIGDQYADLFLAAKNLSDAILLSDILRVNTEITKAPLSASMIKRYDEHHQDLTLLKALVRQQLPEKYKEIFFDQSKNGYAGYIDGGASQEEFYKFIKPILEKMDGTEELLVKLNREDLLRKQRTFDNGSIPHQIHLGELHAILRRQEDFYPFLKDNREKIEKILTFRIPYYVGPLARGNSRFAWMTRKSEETITPWNFEEVVDKGASAQSFIERMTNFDKNLPNEKVLPKHSLLYEYFTVYNELTKVKYVTEGMRKPAFLSGEQKKAIVDLLFKTNRKVTVKQLKEDYFKKIECFDSVEISGVEDRFNASLGTYHDLLKIIKDKDFLDNEENEDILEDIVLTLTLFEDREMIEERLKTYAHLFDDKVMKQLKRRRYTGWGRLSRKLINGIRDKQSGKTILDFLKSDGFANRNFMQLIHDDSLTFKEDIQKAQVSGQGDSLHEHIANLAGSPAIKKGILQTVKVVDELVKVMGRHKPENIVIEMARENQTTQKGQKNSRERMKRIEEGIKELGSQILKEHPVENTQLQNEKLYLYYLQNGRDMYVDQELDINRLSDYDVDHIVPQSFLKDDSIDNKVLTRSDKARGKSDNVPSEEVVKKMKNYWRQLLNAKLITQRKFDNLTKAERGGLSELDKAGFIKRQLVETRQITKHVAQILDSRMNTKYDENDKLIREVKVITLKSKLVSDFRKDFQFYKVREINNYHHAHDAYLNAVVGTALIKKYPKLESEFVYGDYKVYDVRKMIAKSEQEIGKATAKYFFYSNIMNFFKTEITLANGEIRKRPLIETNGETGEIVWDKGRDFATVRKVLSMPQVNIVKKTEVQTGGFSKESILPKRNSDKLIARKKDWDPKKYGGFDSPTVAYSVLVVAKVEKGKSKKLKSVKELLGITIMERSSFEKNPIDFLEAKGYKEVKKDLIIKLPKYSLFELENGRKRMLASAGELQKGNELALPSKYVNFLYLASHYEKLKGSPEDNEQKQLFVEQHKHYLDEIIEQISEFSKRVILADANLDKVLSAYNKHRDKPIREQAENIIHLFTLTNLGAPAAFKYFDTTIDRKRYTSTKEVLDATLIHQSITGLYETRIDLSQLGGDGGEAAAKEAAAKGGTAPLEEEYRLFLEAPIQNVTLLEQWKREIPKVWAEINPPGLASTQAPIHVQLLSTALPVRVRQYPITLEAKRSLRETIRKFRAAGILRPVHSPWNTPLLPVRKSGTSEYRMVQDLREVNKRVETIHPTVPNPYTLLSLLPPDRIWYSVLDLKDAFFCIPLAPESQLIFAFEWADAEEGESGQLTWTRLPQGFKNSPTLFDEALNRDLQGFRLDHPSVSLLQYVDDLLIAADTQAACLSATRDLLMTLAELGYRVSGKKAQLCQEEVTYLGFKIHKGSRSLSNSRTQAILQIPVPKTKRQVREFLGTIGYCRLWIPGFAELAQPLYAATRGGNDPLVWGEKEEEAFQSLKLALTQPPALALPSLDKPFQLFVEETSGAAKGVLTQALGPWKRPVAYLSKRLDPVAAGWPRCLRAIAAAALLTREASKLTFGQDIEITSSHNLESLLRSPPDKWLTNARITQYQVLLLDPPRVRFKQTAALNPATLLPETDDTLPIHHCLDTLDSLTSTRPDLTDQPLAQAEATLFTDGSSYIRDGKRYAGAAVVTLDSVIWAEPLPIGTSAQKAELIALTKALEWSKDKSVNIYTDSRYAFATLHVHGMIYRERGLLTAGGKAIKNAPEILALLTAVWLPKRVAVMHCKGHQKDDAPTSTGNRRADEVAREVAIRPLSTQATISAGKRTADGSEFEKRTADGSEFESPKKKAKVE

SEQ ID NO: 11 - protein, 2098 aa, synthetic construct
MPAAKRVKLDGGDKKYSIGLDIGTNSVGWAVITDEYKVPSKKFKVLGNTDRHSIKKNLIGALLFDSGETAEATRLKRTARRRYTRRKNRICYLQEIFSNEMAKVDDSFFHRLEESFLVEEDKKHERHPIFGNIVDEVAYHEKYPTIYHLRKKLVDSTDKADLRLIYLALAHMIKFRGHFLIEGDLNPDNSDVDKLFIQLVQTYNQLFEENPINASGVDAKAILSARLSKSRRLENLIAQLPGEKKNGLFGNLIALSLGLTPNFKSNFDLAEDAKLQLSKDTYDDDLDNLLAQIGDQYADLFLAAKNLSDAILLSDILRVNTEITKAPLSASMIKRYDEHHQDLTLLKALVRQQLPEKYKEIFFDQSKNGYAGYIDGGASQEEFYKFIKPILEKMDGTEELLVKLNREDLLRKQRTFDNGSIPHQIHLGELHAILRRQEDFYPFLKDNREKIEKILTFRIPYYVGPLARGNSRFAWMTRKSEETITPWNFEEVVDKGASAQSFIERMTNFDKNLPNEKVLPKHSLLYEYFTVYNELTKVKYVTEGMRKPAFLSGEQKKAIVDLLFKTNRKVTVKQLKEDYFKKIECFDSVEISGVEDRFNASLGTYHDLLKIIKDKDFLDNEENEDILEDIVLTLTLFEDREMIEERLKTYAHLFDDKVMKQLKRRRYTGWGRLSRKLINGIRDKQSGKTILDFLKSDGFANRNFMQLIHDDSLTFKEDIQKAQVSGQGDSLHEHIANLAGSPAIKKGILQTVKVVDELVKVMGRHKPENIVIEMARENQTTQKGQKNSRERMKRIEEGIKELGSQILKEHPVENTQLQNEKLYLYYLQNGRDMYVDQELDINRLSDYDVDHIVPQSFLKDDSIDNKVLTRSDKARGKSDNVPSEEVVKKMKNYWRQLLNAKLITQRKFDNLTKAERGGLSELDKAGFIKRQLVETRQITKHVAQILDSRMNTKYDENDKLIREVKVITLKSKLVSDFRKDFQFYKVREINNYHHAHDAYLNAVVGTALIKKYPKLESEFVYGDYKVYDVRKMIAKSEQEIGKATAKYFFYSNIMNFFKTEITLANGEIRKRPLIETNGETGEIVWDKGRDFATVRKVLSMPQVNIVKKTEVQTGGFSKESILPKRNSDKLIARKKDWDPKKYGGFDSPTVAYSVLVVAKVEKGKSKKLKSVKELLGITIMERSSFEKNPIDFLEAKGYKEVKKDLIIKLPKYSLFELENGRKRMLASAGELQKGNELALPSKYVNFLYLASHYEKLKGSPEDNEQKQLFVEQHKHYLDEIIEQISEFSKRVILADANLDKVLSAYNKHRDKPIREQAENIIHLFTLTNLGAPAAFKYFDTTIDRKRYTSTKEVLDATLIHQSITGLYETRIDLSQLGGDGGGGSEAAAKPAPGGTAPLEEEYRLFLEAPIQNVTLLEQWKREIPKVWAEINPPGLASTQAPIHVQLLSTALPVRVRQYPITLEAKRSLRETIRKFRAAGILRPVHSPWNTPLLPVRKSGTSEYRMVQDLREVNKRVETIHPTVPNPYTLLSLLPPDRIWYSVLDLKDAFFCIPLAPESQLIFAFEWADAEEGESGQLTWTRLPQGFKNSPTLFDEALNRDLQGFRLDHPSVSLLQYVDDLLIAADTQAACLSATRDLLMTLAELGYRVSGKKAQLCQEEVTYLGFKIHKGSRSLSNSRTQAILQIPVPKTKRQVREFLGTIGYCRLWIPGFAELAQPLYAATRGGNDPLVWGEKEEEAFQSLKLALTQPPALALPSLDKPFQLFVEETSGAAKGVLTQALGPWKRPVAYLSKRLDPVAAGWPRCLRAIAAAALLTREASKLTFGQDIEITSSHNLESLLRSPPDKWLTNARITQYQVLLLDPPRVRFKQTAALNPATLLPETDDTLPIHHCLDTLDSLTSTRPDLTDQPLAQAEATLFTDGSSYIRDGKRYAGAAVVTLDSVIWAEPLPIGTSAQKAELIALTKALEWSKDKSVNIYTDSRYAFATLHVHGMIYRERGLLTAGGKAIKNAPEILALLTAVWLPKRVAVMHCKGHQKDDAPTSTGNRRADEVAREVAIRPLSTQATISAGKRTADGSEFEKRTADGSEFESPKKKAKVE

SEQ ID NO: 12 - protein, 2093 aa, synthetic construct
MPAAKRVKLDGGDKKYSIGLDIGTNSVGWAVITDEYKVPSKKFKVLGNTDRHSIKKNLIGALLFDSGETAEATRLKRTARRRYTRRKNRICYLQEIFSNEMAKVDDSFFHRLEESFLVEEDKKHERHPIFGNIVDEVAYHEKYPTIYHLRKKLVDSTDKADLRLIYLALAHMIKFRGHFLIEGDLNPDNSDVDKLFIQLVQTYNQLFEENPINASGVDAKAILSARLSKSRRLENLIAQLPGEKKNGLFGNLIALSLGLTPNFKSNFDLAEDAKLQLSKDTYDDDLDNLLAQIGDQYADLFLAAKNLSDAILLSDILRVNTEITKAPLSASMIKRYDEHHQDLTLLKALVRQQLPEKYKEIFFDQSKNGYAGYIDGGASQEEFYKFIKPILEKMDGTEELLVKLNREDLLRKQRTFDNGSIPHQIHLGELHAILRRQEDFYPFLKDNREKIEKILTFRIPYYVGPLARGNSRFAWMTRKSEETITPWNFEEVVDKGASAQSFIERMTNFDKNLPNEKVLPKHSLLYEYFTVYNELTKVKYVTEGMRKPAFLSGEQKKAIVDLLFKTNRKVTVKQLKEDYFKKIECFDSVEISGVEDRFNASLGTYHDLLKIIKDKDFLDNEENEDILEDIVLTLTLFEDREMIEERLKTYAHLFDDKVMKQLKRRRYTGWGRLSRKLINGIRDKQSGKTILDFLKSDGFANRNFMQLIHDDSLTFKEDIQKAQVSGQGDSLHEHIANLAGSPAIKKGILQTVKVVDELVKVMGRHKPENIVIEMARENQTTQKGQKNSRERMKRIEEGIKELGSQILKEHPVENTQLQNEKLYLYYLQNGRDMYVDQELDINRLSDYDVDHIVPQSFLKDDSIDNKVLTRSDKARGKSDNVPSEEVVKKMKNYWRQLLNAKLITQRKFDNLTKAERGGLSELDKAGFIKRQLVETRQITKHVAQILDSRMNTKYDENDKLIREVKVITLKSKLVSDFRKDFQFYKVREINNYHHAHDAYLNAVVGTALIKKYPKLESEFVYGDYKVYDVRKMIAKSEQEIGKATAKYFFYSNIMNFFKTEITLANGEIRKRPLIETNGETGEIVWDKGRDFATVRKVLSMPQVNIVKKTEVQTGGFSKESILPKRNSDKLIARKKDWDPKKYGGFDSPTVAYSVLVVAKVEKGKSKKLKSVKELLGITIMERSSFEKNPIDFLEAKGYKEVKKDLIIKLPKYSLFELENGRKRMLASAGELQKGNELALPSKYVNFLYLASHYEKLKGSPEDNEQKQLFVEQHKHYLDEIIEQISEFSKRVILADANLDKVLSAYNKHRDKPIREQAENIIHLFTLTNLGAPAAFKYFDTTIDRKRYTSTKEVLDATLIHQSITGLYETRIDLSQLGGDGGGGSGGGGGTAPLEEEYRLFLEAPIQNVTLLEQWKREIPKVWAEINPPGLASTQAPIHVQLLSTALPVRVRQYPITLEAKRSLRETIRKFRAAGILRPVHSPWNTPLLPVRKSGTSEYRMVQDLREVNKRVETIHPTVPNPYTLLSLLPPDRIWYSVLDLKDAFFCIPLAPESQLIFAFEWADAEEGESGQLTWTRLPQGFKNSPTLFDEALNRDLQGFRLDHPSVSLLQYVDDLLIAADTQAACLSATRDLLMTLAELGYRVSGKKAQLCQEEVTYLGFKIHKGSRSLSNSRTQAILQIPVPKTKRQVREFLGTIGYCRLWIPGFAELAQPLYAATRGGNDPLVWGEKEEEAFQSLKLALTQPPALALPSLDKPFQLFVEETSGAAKGVLTQALGPWKRPVAYLSKRLDPVAAGWPRCLRAIAAAALLTREASKLTFGQDIEITSSHNLESLLRSPPDKWLTNARITQYQVLLLDPPRVRFKQTAALNPATLLPETDDTLPIHHCLDTLDSLTSTRPDLTDQPLAQAEATLFTDGSSYIRDGKRYAGAAVVTLDSVIWAEPLPIGTSAQKAELIALTKALEWSKDKSVNIYTDSRYAFATLHVHGMIYRERGLLTAGGKAIKNAPEILALLTAVWLPKRVAVMHCKGHQKDDAPTSTGNRRADEVAREVAIRPLSTQATISAGKRTADGSEFEKRTADGSEFESPKKKAKVE

SEQ ID NO: 13 - protein, 2103 aa, synthetic construct
MPAAKRVKLDGGDKKYSIGLDIGTNSVGWAVITDEYKVPSKKFKVLGNTDRHSIKKNLIGALLFDSGETAEATRLKRTARRRYTRRKNRICYLQEIFSNEMAKVDDSFFHRLEESFLVEEDKKHERHPIFGNIVDEVAYHEKYPTIYHLRKKLVDSTDKADLRLIYLALAHMIKFRGHFLIEGDLNPDNSDVDKLFIQLVQTYNQLFEENPINASGVDAKAILSARLSKSRRLENLIAQLPGEKKNGLFGNLIALSLGLTPNFKSNFDLAEDAKLQLSKDTYDDDLDNLLAQIGDQYADLFLAAKNLSDAILLSDILRVNTEITKAPLSASMIKRYDEHHQDLTLLKALVRQQLPEKYKEIFFDQSKNGYAGYIDGGASQEEFYKFIKPILEKMDGTEELLVKLNREDLLRKQRTFDNGSIPHQIHLGELHAILRRQEDFYPFLKDNREKIEKILTFRIPYYVGPLARGNSRFAWMTRKSEETITPWNFEEVVDKGASAQSFIERMTNFDKNLPNEKVLPKHSLLYEYFTVYNELTKVKYVTEGMRKPAFLSGEQKKAIVDLLFKTNRKVTVKQLKEDYFKKIECFDSVEISGVEDRFNASLGTYHDLLKIIKDKDFLDNEENEDILEDIVLTLTLFEDREMIEERLKTYAHLFDDKVMKQLKRRRYTGWGRLSRKLINGIRDKQSGKTILDFLKSDGFANRNFMQLIHDDSLTFKEDIQKAQVSGQGDSLHEHIANLAGSPAIKKGILQTVKVVDELVKVMGRHKPENIVIEMARENQTTQKGQKNSRERMKRIEEGIKELGSQILKEHPVENTQLQNEKLYLYYLQNGRDMYVDQELDINRLSDYDVDHIVPQSFLKDDSIDNKVLTRSDKARGKSDNVPSEEVVKKMKNYWRQLLNAKLITQRKFDNLTKAERGGLSELDKAGFIKRQLVETRQITKHVAQILDSRMNTKYDENDKLIREVKVITLKSKLVSDFRKDFQFYKVREINNYHHAHDAYLNAVVGTALIKKYPKLESEFVYGDYKVYDVRKMIAKSEQEIGKATAKYFFYSNIMNFFKTEITLANGEIRKRPLIETNGETGEIVWDKGRDFATVRKVLSMPQVNIVKKTEVQTGGFSKESILPKRNSDKLIARKKDWDPKKYGGFDSPTVAYSVLVVAKVEKGKSKKLKSVKELLGITIMERSSFEKNPIDFLEAKGYKEVKKDLIIKLPKYSLFELENGRKRMLASAGELQKGNELALPSKYVNFLYLASHYEKLKGSPEDNEQKQLFVEQHKHYLDEIIEQISEFSKRVILADANLDKVLSAYNKHRDKPIREQAENIIHLFTLTNLGAPAAFKYFDTTIDRKRYTSTKEVLDATLIHQSITGLYETRIDLSQLGGDGGSGSETPGTSESATPESGGTAPLEEEYRLFLEAPIQNVTLLEQWKREIPKVWAEINPPGLASTQAPIHVQLLSTALPVRVRQYPITLEAKRSLRETIRKFRAAGILRPVHSPWNTPLLPVRKSGTSEYRMVQDLREVNKRVETIHPTVPNPYTLLSLLPPDRIWYSVLDLKDAFFCIPLAPESQLIFAFEWADAEEGESGQLTWTRLPQGFKNSPTLFDEALNRDLQGFRLDHPSVSLLQYVDDLLIAADTQAACLSATRDLLMTLAELGYRVSGKKAQLCQEEVTYLGFKIHKGSRSLSNSRTQAILQIPVPKTKRQVREFLGTIGYCRLWIPGFAELAQPLYAATRGGNDPLVWGEKEEEAFQSLKLALTQPPALALPSLDKPFQLFVEETSGAAKGVLTQALGPWKRPVAYLSKRLDPVAAGWPRCLRAIAAAALLTREASKLTFGQDIEITSSHNLESLLRSPPDKWLTNARITQYQVLLLDPPRVRFKQTAALNPATLLPETDDTLPIHHCLDTLDSLTSTRPDLTDQPLAQAEATLFTDGSSYIRDGKRYAGAAVVTLDSVIWAEPLPIGTSAQKAELIALTKALEWSKDKSVNIYTDSRYAFATLHVHGMIYRERGLLTAGGKAIKNAPEILALLTAVWLPKRVAVMHCKGHQKDDAPTSTGNRRADEVAREVAIRPLSTQATISAGKRTADGSEFEKRTADGSEFESPKKKAKVE

SEQ ID NO: 14 - protein, 2099 aa, synthetic construct
MPAAKRVKLDGGDKKYSIGLDIGTNSVGWAVITDEYKVPSKKFKVLGNTDRHSIKKNLIGALLFDSGETAEATRLKRTARRRYTRRKNRICYLQEIFSNEMAKVDDSFFHRLEESFLVEEDKKHERHPIFGNIVDEVAYHEKYPTIYHLRKKLVDSTDKADLRLIYLALAHMIKFRGHFLIEGDLNPDNSDVDKLFIQLVQTYNQLFEENPINASGVDAKAILSARLSKSRRLENLIAQLPGEKKNGLFGNLIALSLGLTPNFKSNFDLAEDAKLQLSKDTYDDDLDNLLAQIGDQYADLFLAAKNLSDAILLSDILRVNTEITKAPLSASMIKRYDEHHQDLTLLKALVRQQLPEKYKEIFFDQSKNGYAGYIDGGASQEEFYKFIKPILEKMDGTEELLVKLNREDLLRKQRTFDNGSIPHQIHLGELHAILRRQEDFYPFLKDNREKIEKILTFRIPYYVGPLARGNSRFAWMTRKSEETITPWNFEEVVDKGASAQSFIERMTNFDKNLPNEKVLPKHSLLYEYFTVYNELTKVKYVTEGMRKPAFLSGEQKKAIVDLLFKTNRKVTVKQLKEDYFKKIECFDSVEISGVEDRFNASLGTYHDLLKIIKDKDFLDNEENEDILEDIVLTLTLFEDREMIEERLKTYAHLFDDKVMKQLKRRRYTGWGRLSRKLINGIRDKQSGKTILDFLKSDGFANRNFMQLIHDDSLTFKEDIQKAQVSGQGDSLHEHIANLAGSPAIKKGILQTVKVVDELVKVMGRHKPENIVIEMARENQTTQKGQKNSRERMKRIEEGIKELGSQILKEHPVENTQLQNEKLYLYYLQNGRDMYVDQELDINRLSDYDVDHIVPQSFLKDDSIDNKVLTRSDKARGKSDNVPSEEVVKKMKNYWRQLLNAKLITQRKFDNLTKAERGGLSELDKAGFIKRQLVETRQITKHVAQILDSRMNTKYDENDKLIREVKVITLKSKLVSDFRKDFQFYKVREINNYHHAHDAYLNAVVGTALIKKYPKLESEFVYGDYKVYDVRKMIAKSEQEIGKATAKYFFYSNIMNFFKTEITLANGEIRKRPLIETNGETGEIVWDKGRDFATVRKVLSMPQVNIVKKTEVQTGGFSKESILPKRNSDKLIARKKDWDPKKYGGFDSPTVAYSVLVVAKVEKGKSKKLKSVKELLGITIMERSSFEKNPIDFLEAKGYKEVKKDLIIKLPKYSLFELENGRKRMLASAGELQKGNELALPSKYVNFLYLASHYEKLKGSPEDNEQKQLFVEQHKHYLDEIIEQISEFSKRVILADANLDKVLSAYNKHRDKPIREQAENIIHLFTLTNLGAPAAFKYFDTTIDRKRYTSTKEVLDATLIHQSITGLYETRIDLSQLGGDGGGSAGSAAGSGEFGGTAPLEEEYRLFLEAPIQNVTLLEQWKREIPKVWAEINPPGLASTQAPIHVQLLSTALPVRVRQYPITLEAKRSLRETIRKFRAAGILRPVHSPWNTPLLPVRKSGTSEYRMVQDLREVNKRVETIHPTVPNPYTLLSLLPPDRIWYSVLDLKDAFFCIPLAPESQLIFAFEWADAEEGESGQLTWTRLPQGFKNSPTLFDEALNRDLQGFRLDHPSVSLLQYVDDLLIAADTQAACLSATRDLLMTLAELGYRVSGKKAQLCQEEVTYLGFKIHKGSRSLSNSRTQAILQIPVPKTKRQVREFLGTIGYCRLWIPGFAELAQPLYAATRGGNDPLVWGEKEEEAFQSLKLALTQPPALALPSLDKPFQLFVEETSGAAKGVLTQALGPWKRPVAYLSKRLDPVAAGWPRCLRAIAAAALLTREASKLTFGQDIEITSSHNLESLLRSPPDKWLTNARITQYQVLLLDPPRVRFKQTAALNPATLLPETDDTLPIHHCLDTLDSLTSTRPDLTDQPLAQAEATLFTDGSSYIRDGKRYAGAAVVTLDSVIWAEPLPIGTSAQKAELIALTKALEWSKDKSVNIYTDSRYAFATLHVHGMIYRERGLLTAGGKAIKNAPEILALLTAVWLPKRVAVMHCKGHQKDDAPTSTGNRRADEVAREVAIRPLSTQATISAGKRTADGSEFEKRTADGSEFESPKKKAKVE

SEQ ID NO: 15 - protein, 2096 aa, synthetic construct
MPAAKRVKLDGGDKKYSIGLDIGTNSVGWAVITDEYKVPSKKFKVLGNTDRHSIKKNLIGALLFDSGETAEATRLKRTARRRYTRRKNRICYLQEIFSNEMAKVDDSFFHRLEESFLVEEDKKHERHPIFGNIVDEVAYHEKYPTIYHLRKKLVDSTDKADLRLIYLALAHMIKFRGHFLIEGDLNPDNSDVDKLFIQLVQTYNQLFEENPINASGVDAKAILSARLSKSRRLENLIAQLPGEKKNGLFGNLIALSLGLTPNFKSNFDLAEDAKLQLSKDTYDDDLDNLLAQIGDQYADLFLAAKNLSDAILLSDILRVNTEITKAPLSASMIKRYDEHHQDLTLLKALVRQQLPEKYKEIFFDQSKNGYAGYIDGGASQEEFYKFIKPILEKMDGTEELLVKLNREDLLRKQRTFDNGSIPHQIHLGELHAILRRQEDFYPFLKDNREKIEKILTFRIPYYVGPLARGNSRFAWMTRKSEETITPWNFEEVVDKGASAQSFIERMTNFDKNLPNEKVLPKHSLLYEYFTVYNELTKVKYVTEGMRKPAFLSGEQKKAIVDLLFKTNRKVTVKQLKEDYFKKIECFDSVEISGVEDRFNASLGTYHDLLKIIKDKDFLDNEENEDILEDIVLTLTLFEDREMIEERLKTYAHLFDDKVMKQLKRRRYTGWGRLSRKLINGIRDKQSGKTILDFLKSDGFANRNFMQLIHDDSLTFKEDIQKAQVSGQGDSLHEHIANLAGSPAIKKGILQTVKVVDELVKVMGRHKPENIVIEMARENQTTQKGQKNSRERMKRIEEGIKELGSQILKEHPVENTQLQNEKLYLYYLQNGRDMYVDQELDINRLSDYDVDHIVPQSFLKDDSIDNKVLTRSDKARGKSDNVPSEEVVKKMKNYWRQLLNAKLITQRKFDNLTKAERGGLSELDKAGFIKRQLVETRQITKHVAQILDSRMNTKYDENDKLIREVKVITLKSKLVSDFRKDFQFYKVREINNYHHAHDAYLNAVVGTALIKKYPKLESEFVYGDYKVYDVRKMIAKSEQEIGKATAKYFFYSNIMNFFKTEITLANGEIRKRPLIETNGETGEIVWDKGRDFATVRKVLSMPQVNIVKKTEVQTGGFSKESILPKRNSDKLIARKKDWDPKKYGGFDSPTVAYSVLVVAKVEKGKSKKLKSVKELLGITIMERSSFEKNPIDFLEAKGYKEVKKDLIIKLPKYSLFELENGRKRMLASAGELQKGNELALPSKYVNFLYLASHYEKLKGSPEDNEQKQLFVEQHKHYLDEIIEQISEFSKRVILADANLDKVLSAYNKHRDKPIREQAENIIHLFTLTNLGAPAAFKYFDTTIDRKRYTSTKEVLDATLIHQSITGLYETRIDLSQLGGDGGGGGPAPGGSGGTAPLEEEYRLFLEAPIQNVTLLEQWKREIPKVWAEINPPGLASTQAPIHVQLLSTALPVRVRQYPITLEAKRSLRETIRKFRAAGILRPVHSPWNTPLLPVRKSGTSEYRMVQDLREVNKRVETIHPTVPNPYTLLSLLPPDRIWYSVLDLKDAFFCIPLAPESQLIFAFEWADAEEGESGQLTWTRLPQGFKNSPTLFDEALNRDLQGFRLDHPSVSLLQYVDDLLIAADTQAACLSATRDLLMTLAELGYRVSGKKAQLCQEEVTYLGFKIHKGSRSLSNSRTQAILQIPVPKTKRQVREFLGTIGYCRLWIPGFAELAQPLYAATRGGNDPLVWGEKEEEAFQSLKLALTQPPALALPSLDKPFQLFVEETSGAAKGVLTQALGPWKRPVAYLSKRLDPVAAGWPRCLRAIAAAALLTREASKLTFGQDIEITSSHNLESLLRSPPDKWLTNARITQYQVLLLDPPRVRFKQTAALNPATLLPETDDTLPIHHCLDTLDSLTSTRPDLTDQPLAQAEATLFTDGSSYIRDGKRYAGAAVVTLDSVIWAEPLPIGTSAQKAELIALTKALEWSKDKSVNIYTDSRYAFATLHVHGMIYRERGLLTAGGKAIKNAPEILALLTAVWLPKRVAVMHCKGHQKDDAPTSTGNRRADEVAREVAIRPLSTQATISAGKRTADGSEFEKRTADGSEFESPKKKAKVE

SEQ ID NO: 16 - protein, 2098 aa, synthetic construct
MPAAKRVKLDGGDKKYSIGLDIGTNSVGWAVITDEYKVPSKKFKVLGNTDRHSIKKNLIGALLFDSGETAEATRLKRTARRRYTRRKNRICYLQEIFSNEMAKVDDSFFHRLEESFLVEEDKKHERHPIFGNIVDEVAYHEKYPTIYHLRKKLVDSTDKADLRLIYLALAHMIKFRGHFLIEGDLNPDNSDVDKLFIQLVQTYNQLFEENPINASGVDAKAILSARLSKSRRLENLIAQLPGEKKNGLFGNLIALSLGLTPNFKSNFDLAEDAKLQLSKDTYDDDLDNLLAQIGDQYADLFLAAKNLSDAILLSDILRVNTEITKAPLSASMIKRYDEHHQDLTLLKALVRQQLPEKYKEIFFDQSKNGYAGYIDGGASQEEFYKFIKPILEKMDGTEELLVKLNREDLLRKQRTFDNGSIPHQIHLGELHAILRRQEDFYPFLKDNREKIEKILTFRIPYYVGPLARGNSRFAWMTRKSEETITPWNFEEVVDKGASAQSFIERMTNFDKNLPNEKVLPKHSLLYEYFTVYNELTKVKYVTEGMRKPAFLSGEQKKAIVDLLFKTNRKVTVKQLKEDYFKKIECFDSVEISGVEDRFNASLGTYHDLLKIIKDKDFLDNEENEDILEDIVLTLTLFEDREMIEERLKTYAHLFDDKVMKQLKRRRYTGWGRLSRKLINGIRDKQSGKTILDFLKSDGFANRNFMQLIHDDSLTFKEDIQKAQVSGQGDSLHEHIANLAGSPAIKKGILQTVKVVDELVKVMGRHKPENIVIEMARENQTTQKGQKNSRERMKRIEEGIKELGSQILKEHPVENTQLQNEKLYLYYLQNGRDMYVDQELDINRLSDYDVDHIVPQSFLKDDSIDNKVLTRSDKARGKSDNVPSEEVVKKMKNYWRQLLNAKLITQRKFDNLTKAERGGLSELDKAGFIKRQLVETRQITKHVAQILDSRMNTKYDENDKLIREVKVITLKSKLVSDFRKDFQFYKVREINNYHHAHDAYLNAVVGTALIKKYPKLESEFVYGDYKVYDVRKMIAKSEQEIGKATAKYFFYSNIMNFFKTEITLANGEIRKRPLIETNGETGEIVWDKGRDFATVRKVLSMPQVNIVKKTEVQTGGFSKESILPKRNSDKLIARKKDWDPKKYGGFDSPTVAYSVLVVAKVEKGKSKKLKSVKELLGITIMERSSFEKNPIDFLEAKGYKEVKKDLIIKLPKYSLFELENGRKRMLASAGELQKGNELALPSKYVNFLYLASHYEKLKGSPEDNEQKQLFVEQHKHYLDEIIEQISEFSKRVILADANLDKVLSAYNKHRDKPIREQAENIIHLFTLTNLGAPAAFKYFDTTIDRKRYTSTKEVLDATLIHQSITGLYETRIDLSQLGGDGGGSSGGGEAAAKGGTAPLEEEYRLFLEAPIQNVTLLEQWKREIPKVWAEINPPGLASTQAPIHVQLLSTALPVRVRQYPITLEAKRSLRETIRKFRAAGILRPVHSPWNTPLLPVRKSGTSEYRMVQDLREVNKRVETIHPTVPNPYTLLSLLPPDRIWYSVLDLKDAFFCIPLAPESQLIFAFEWADAEEGESGQLTWTRLPQGFKNSPTLFDEALNRDLQGFRLDHPSVSLLQYVDDLLIAADTQAACLSATRDLLMTLAELGYRVSGKKAQLCQEEVTYLGFKIHKGSRSLSNSRTQAILQIPVPKTKRQVREFLGTIGYCRLWIPGFAELAQPLYAATRGGNDPLVWGEKEEEAFQSLKLALTQPPALALPSLDKPFQLFVEETSGAAKGVLTQALGPWKRPVAYLSKRLDPVAAGWPRCLRAIAAAALLTREASKLTFGQDIEITSSHNLESLLRSPPDKWLTNARITQYQVLLLDPPRVRFKQTAALNPATLLPETDDTLPIHHCLDTLDSLTSTRPDLTDQPLAQAEATLFTDGSSYIRDGKRYAGAAVVTLDSVIWAEPLPIGTSAQKAELIALTKALEWSKDKSVNIYTDSRYAFATLHVHGMIYRERGLLTAGGKAIKNAPEILALLTAVWLPKRVAVMHCKGHQKDDAPTSTGNRRADEVAREVAIRPLSTQATISAGKRTADGSEFEKRTADGSEFESPKKKAKVE

SEQ ID NO: 17 - protein, 1998 aa, synthetic construct
MPAAKRVKLDGGDKKYSIGLDIGTNSVGWAVITDEYKVPSKKFKVLGNTDRHSIKKNLIGALLFDSGETAEATRLKRTARRRYTRRKNRICYLQEIFSNEMAKVDDSFFHRLEESFLVEEDKKHERHPIFGNIVDEVAYHEKYPTIYHLRKKLVDSTDKADLRLIYLALAHMIKFRGHFLIEGDLNPDNSDVDKLFIQLVQTYNQLFEENPINASGVDAKAILSARLSKSRRLENLIAQLPGEKKNGLFGNLIALSLGLTPNFKSNFDLAEDAKLQLSKDTYDDDLDNLLAQIGDQYADLFLAAKNLSDAILLSDILRVNTEITKAPLSASMIKRYDEHHQDLTLLKALVRQQLPEKYKEIFFDQSKNGYAGYIDGGASQEEFYKFIKPILEKMDGTEELLVKLNREDLLRKQRTFDNGSIPHQIHLGELHAILRRQEDFYPFLKDNREKIEKILTFRIPYYVGPLARGNSRFAWMTRKSEETITPWNFEEVVDKGASAQSFIERMTNFDKNLPNEKVLPKHSLLYEYFTVYNELTKVKYVTEGMRKPAFLSGEQKKAIVDLLFKTNRKVTVKQLKEDYFKKIECFDSVEISGVEDRFNASLGTYHDLLKIIKDKDFLDNEENEDILEDIVLTLTLFEDREMIEERLKTYAHLFDDKVMKQLKRRRYTGWGRLSRKLINGIRDKQSGKTILDFLKSDGFANRNFMQLIHDDSLTFKEDIQKAQVSGQGDSLHEHIANLAGSPAIKKGILQTVKVVDELVKVMGRHKPENIVIEMARENQTTQKGQKNSRERMKRIEEGIKELGSQILKEHPVENTQLQNEKLYLYYLQNGRDMYVDQELDINRLSDYDVDHIVPQSFLKDDSIDNKVLTRSDKARGKSDNVPSEEVVKKMKNYWRQLLNAKLITQRKFDNLTKAERGGLSELDKAGFIKRQLVETRQITKHVAQILDSRMNTKYDENDKLIREVKVITLKSKLVSDFRKDFQFYKVREINNYHHAHDAYLNAVVGTALIKKYPKLESEFVYGDYKVYDVRKMIAKSEQEIGKATAKYFFYSNIMNFFKTEITLANGEIRKRPLIETNGETGEIVWDKGRDFATVRKVLSMPQVNIVKKTEVQTGGFSKESILPKRNSDKLIARKKDWDPKKYGGFDSPTVAYSVLVVAKVEKGKSKKLKSVKELLGITIMERSSFEKNPIDFLEAKGYKEVKKDLIIKLPKYSLFELENGRKRMLASAGELQKGNELALPSKYVNFLYLASHYEKLKGSPEDNEQKQLFVEQHKHYLDEIIEQISEFSKRVILADANLDKVLSAYNKHRDKPIREQAENIIHLFTLTNLGAPAAFKYFDTTIDRKRYTSTKEVLDATLIHQSITGLYETRIDLSQLGGDGGPAPEAAAKGGGVLDTPPSHIGLEHLPPPPEVPQFPLNLERLQALQDLVHRSLEAGYISPWDGPGNNPVFPVRKPNGAWRFVHDLRATNALTKPIPALSPGPPDLTAIPTHPPHIICLDLKDAFFQIPVEDRFRFYLSFTLPSPGGLQPHRRFAWRVLPQGFINSPALFERALQEPLRQVSAAFSQSLLVSYMDDILYASPTEEQRSQCYQALAARLRDLGFQVASEKTSQTPSPVPFLGQMVHEQIVTYQSLPTLQISSPISLHQLQAVLGDLQWVSRGTPTTRRPLQLLYSSLKRHHDPRAIIQLSPEQLQGIAELRQALSHNARSRYNEQEPLLAYVHLTRAGSTLVLFQKGAQFPLAYFQTPLTDNQASPWGLLLLLGCQYLQTQALSSYAKPILKYYHNLPKTSLDNWIQSSEDPRVQELLQLWPQISSQGIQPPGPWKTLITRAEVFLTPQFSPDPIPAALCLFSDGATGRGAYCLWKDHLLDFQAVPAPESAQKGELAGLLAGLAAAPPEPVNIWVDSKYLYSLLRTLVLGAWLQPDPVPSYALLYKSLLRHPAIVVGHVRSHSSASHPIASLNNYVDQLAGKRTADGSEFEKRTADGSEFESPKKKAKVE

SEQ ID NO: 18 - protein, 2116 aa, synthetic construct
MPAAKRVKLDGGDKKYSIGLDIGTNSVGWAVITDEYKVPSKKFKVLGNTDRHSIKKNLIGALLFDSGETAEATRLKRTARRRYTRRKNRICYLQEIFSNEMAKVDDSFFHRLEESFLVEEDKKHERHPIFGNIVDEVAYHEKYPTIYHLRKKLVDSTDKADLRLIYLALAHMIKFRGHFLIEGDLNPDNSDVDKLFIQLVQTYNQLFEENPINASGVDAKAILSARLSKSRRLENLIAQLPGEKKNGLFGNLIALSLGLTPNFKSNFDLAEDAKLQLSKDTYDDDLDNLLAQIGDQYADLFLAAKNLSDAILLSDILRVNTEITKAPLSASMIKRYDEHHQDLTLLKALVRQQLPEKYKEIFFDQSKNGYAGYIDGGASQEEFYKFIKPILEKMDGTEELLVKLNREDLLRKQRTFDNGSIPHQIHLGELHAILRRQEDFYPFLKDNREKIEKILTFRIPYYVGPLARGNSRFAWMTRKSEETITPWNFEEVVDKGASAQSFIERMTNFDKNLPNEKVLPKHSLLYEYFTVYNELTKVKYVTEGMRKPAFLSGEQKKAIVDLLFKTNRKVTVKQLKEDYFKKIECFDSVEISGVEDRFNASLGTYHDLLKIIKDKDFLDNEENEDILEDIVLTLTLFEDREMIEERLKTYAHLFDDKVMKQLKRRRYTGWGRLSRKLINGIRDKQSGKTILDFLKSDGFANRNFMQLIHDDSLTFKEDIQKAQVSGQGDSLHEHIANLAGSPAIKKGILQTVKVVDELVKVMGRHKPENIVIEMARENQTTQKGQKNSRERMKRIEEGIKELGSQILKEHPVENTQLQNEKLYLYYLQNGRDMYVDQELDINRLSDYDVDHIVPQSFLKDDSIDNKVLTRSDKARGKSDNVPSEEVVKKMKNYWRQLLNAKLITQRKFDNLTKAERGGLSELDKAGFIKRQLVETRQITKHVAQILDSRMNTKYDENDKLIREVKVITLKSKLVSDFRKDFQFYKVREINNYHHAHDAYLNAVVGTALIKKYPKLESEFVYGDYKVYDVRKMIAKSEQEIGKATAKYFFYSNIMNFFKTEITLANGEIRKRPLIETNGETGEIVWDKGRDFATVRKVLSMPQVNIVKKTEVQTGGFSKESILPKRNSDKLIARKKDWDPKKYGGFDSPTVAYSVLVVAKVEKGKSKKLKSVKELLGITIMERSSFEKNPIDFLEAKGYKEVKKDLIIKLPKYSLFELENGRKRMLASAGELQKGNELALPSKYVNFLYLASHYEKLKGSPEDNEQKQLFVEQHKHYLDEIIEQISEFSKRVILADANLDKVLSAYNKHRDKPIREQAENIIHLFTLTNLGAPAAFKYFDTTIDRKRYTSTKEVLDATLIHQSITGLYETRIDLSQLGGDGGEAAAKPAPGGGGGWVQEISDSRPMLHIYLNGRRFLGLLNTGADKTCIAGRDWPANWPIHQTESSLQGLGMACGVARSSQPLRWQHEDKSGIIHPFVIPTLPFTLWGRDIMKDIKVRLMTDSPDDSQDLMIGAIESNLFADQISWKSDQPVWLNQWPLKQEKLQALQQLVTEQLQLGHLEESNSPWNTPVFVIKKKSGKWRLLQDLRAVNATMHDMGALQPGLPSPVAPPKGWEIIIIDLQDCFFNIKLHPEDCKRFAFSVPSPNFKRPYQRFQWKVLPQGMKNSPTLCQKFVDKAILTVRDKYQDSYIVHYMDDILLAHPSRSIVDEILTSMIQALNKHGLVVSTEKIQKYDNLKYLGTHIQGDSVSYQKLQIRTDKLRTLNDFQKLLGNINWIRPFLKLTTGELKPLFEILNPDSNPISTRKLTPEACKALQLMNERLSTARVKRLDLSQPWSLCILKTEYTPTACLWQDGVVEWIHLPHISPKVITPYDIFCTQLIIKGRHRSKELFSKDPDYIVVPYTKVQFDLLLQEKEDWPISLLGFLGEVHFHLPKDPLLTFTLQTAIIFPHMTSTTPLEKGIVIFTDGSANGRSVTYIQGREPIIKENTQNTAQQAEIVAVITAFEEVSQPFNLYTDSKYVTGLFPEIETATLSPRTKIYTELKHLQRLIHKRQEKFYIGHIRGHTGLPGPLAQGNAYADSLTRILTAGKRTADGSEFEKRTADGSEFESPKKKAKVE

SEQ ID NO: 19 - protein, 2114 aa, synthetic construct
MPAAKRVKLDGGDKKYSIGLDIGTNSVGWAVITDEYKVPSKKFKVLGNTDRHSIKKNLIGALLFDSGETAEATRLKRTARRRYTRRKNRICYLQEIFSNEMAKVDDSFFHRLEESFLVEEDKKHERHPIFGNIVDEVAYHEKYPTIYHLRKKLVDSTDKADLRLIYLALAHMIKFRGHFLIEGDLNPDNSDVDKLFIQLVQTYNQLFEENPINASGVDAKAILSARLSKSRRLENLIAQLPGEKKNGLFGNLIALSLGLTPNFKSNFDLAEDAKLQLSKDTYDDDLDNLLAQIGDQYADLFLAAKNLSDAILLSDILRVNTEITKAPLSASMIKRYDEHHQDLTLLKALVRQQLPEKYKEIFFDQSKNGYAGYIDGGASQEEFYKFIKPILEKMDGTEELLVKLNREDLLRKQRTFDNGSIPHQIHLGELHAILRRQEDFYPFLKDNREKIEKILTFRIPYYVGPLARGNSRFAWMTRKSEETITPWNFEEVVDKGASAQSFIERMTNFDKNLPNEKVLPKHSLLYEYFTVYNELTKVKYVTEGMRKPAFLSGEQKKAIVDLLFKTNRKVTVKQLKEDYFKKIECFDSVEISGVEDRFNASLGTYHDLLKIIKDKDFLDNEENEDILEDIVLTLTLFEDREMIEERLKTYAHLFDDKVMKQLKRRRYTGWGRLSRKLINGIRDKQSGKTILDFLKSDGFANRNFMQLIHDDSLTFKEDIQKAQVSGQGDSLHEHIANLAGSPAIKKGILQTVKVVDELVKVMGRHKPENIVIEMARENQTTQKGQKNSRERMKRIEEGIKELGSQILKEHPVENTQLQNEKLYLYYLQNGRDMYVDQELDINRLSDYDVDHIVPQSFLKDDSIDNKVLTRSDKARGKSDNVPSEEVVKKMKNYWRQLLNAKLITQRKFDNLTKAERGGLSELDKAGFIKRQLVETRQITKHVAQILDSRMNTKYDENDKLIREVKVITLKSKLVSDFRKDFQFYKVREINNYHHAHDAYLNAVVGTALIKKYPKLESEFVYGDYKVYDVRKMIAKSEQEIGKATAKYFFYSNIMNFFKTEITLANGEIRKRPLIETNGETGEIVWDKGRDFATVRKVLSMPQVNIVKKTEVQTGGFSKESILPKRNSDKLIARKKDWDPKKYGGFDSPTVAYSVLVVAKVEKGKSKKLKSVKELLGITIMERSSFEKNPIDFLEAKGYKEVKKDLIIKLPKYSLFELENGRKRMLASAGELQKGNELALPSKYVNFLYLASHYEKLKGSPEDNEQKQLFVEQHKHYLDEIIEQISEFSKRVILADANLDKVLSAYNKHRDKPIREQAENIIHLFTLTNLGAPAAFKYFDTTIDRKRYTSTKEVLDATLIHQSITGLYETRIDLSQLGGDGGPAPGGGGGSGGWVQEISDSRPMLHIYLNGRRFLGLLNTGADKTCIAGRDWPANWPIHQTESSLQGLGMACGVARSSQPLRWQHEDKSGIIHPFVIPTLPFTLWGRDIMKDIKVRLMTDSPDDSQDLMIGAIESNLFADQISWKSDQPVWLNQWPLKQEKLQALQQLVTEQLQLGHLEESNSPWNTPVFVIKKKSGKWRLLQDLRAVNATMHDMGALQPGLPSPVAPPKGWEIIIIDLQDCFFNIKLHPEDCKRFAFSVPSPNFKRPYQRFQWKVLPQGMKNSPTLCQKFVDKAILTVRDKYQDSYIVHYMDDILLAHPSRSIVDEILTSMIQALNKHGLVVSTEKIQKYDNLKYLGTHIQGDSVSYQKLQIRTDKLRTLNDFQKLLGNINWIRPFLKLTTGELKPLFEILNPDSNPISTRKLTPEACKALQLMNERLSTARVKRLDLSQPWSLCILKTEYTPTACLWQDGVVEWIHLPHISPKVITPYDIFCTQLIIKGRHRSKELFSKDPDYIVVPYTKVQFDLLLQEKEDWPISLLGFLGEVHFHLPKDPLLTFTLQTAIIFPHMTSTTPLEKGIVIFTDGSANGRSVTYIQGREPIIKENTQNTAQQAEIVAVITAFEEVSQPFNLYTDSKYVTGLFPEIETATLSPRTKIYTELKHLQRLIHKRQEKFYIGHIRGHTGLPGPLAQGNAYADSLTRILTAGKRTADGSEFEKRTADGSEFESPKKKAKVE

SEQ ID NO: 20 - protein, 2114 aa, synthetic construct
MPAAKRVKLDGGDKKYSIGLDIGTNSVGWAVITDEYKVPSKKFKVLGNTDRHSIKKNLIGALLFDSGETAEATRLKRTARRRYTRRKNRICYLQEIFSNEMAKVDDSFFHRLEESFLVEEDKKHERHPIFGNIVDEVAYHEKYPTIYHLRKKLVDSTDKADLRLIYLALAHMIKFRGHFLIEGDLNPDNSDVDKLFIQLVQTYNQLFEENPINASGVDAKAILSARLSKSRRLENLIAQLPGEKKNGLFGNLIALSLGLTPNFKSNFDLAEDAKLQLSKDTYDDDLDNLLAQIGDQYADLFLAAKNLSDAILLSDILRVNTEITKAPLSASMIKRYDEHHQDLTLLKALVRQQLPEKYKEIFFDQSKNGYAGYIDGGASQEEFYKFIKPILEKMDGTEELLVKLNREDLLRKQRTFDNGSIPHQIHLGELHAILRRQEDFYPFLKDNREKIEKILTFRIPYYVGPLARGNSRFAWMTRKSEETITPWNFEEVVDKGASAQSFIERMTNFDKNLPNEKVLPKHSLLYEYFTVYNELTKVKYVTEGMRKPAFLSGEQKKAIVDLLFKTNRKVTVKQLKEDYFKKIECFDSVEISGVEDRFNASLGTYHDLLKIIKDKDFLDNEENEDILEDIVLTLTLFEDREMIEERLKTYAHLFDDKVMKQLKRRRYTGWGRLSRKLINGIRDKQSGKTILDFLKSDGFANRNFMQLIHDDSLTFKEDIQKAQVSGQGDSLHEHIANLAGSPAIKKGILQTVKVVDELVKVMGRHKPENIVIEMARENQTTQKGQKNSRERMKRIEEGIKELGSQILKEHPVENTQLQNEKLYLYYLQNGRDMYVDQELDINRLSDYDVDHIVPQSFLKDDSIDNKVLTRSDKARGKSDNVPSEEVVKKMKNYWRQLLNAKLITQRKFDNLTKAERGGLSELDKAGFIKRQLVETRQITKHVAQILDSRMNTKYDENDKLIREVKVITLKSKLVSDFRKDFQFYKVREINNYHHAHDAYLNAVVGTALIKKYPKLESEFVYGDYKVYDVRKMIAKSEQEIGKATAKYFFYSNIMNFFKTEITLANGEIRKRPLIETNGETGEIVWDKGRDFATVRKVLSMPQVNIVKKTEVQTGGFSKESILPKRNSDKLIARKKDWDPKKYGGFDSPTVAYSVLVVAKVEKGKSKKLKSVKELLGITIMERSSFEKNPIDFLEAKGYKEVKKDLIIKLPKYSLFELENGRKRMLASAGELQKGNELALPSKYVNFLYLASHYEKLKGSPEDNEQKQLFVEQHKHYLDEIIEQISEFSKRVILADANLDKVLSAYNKHRDKPIREQAENIIHLFTLTNLGAPAAFKYFDTTIDRKRYTSTKEVLDATLIHQSITGLYETRIDLSQLGGDGGGGSGSSGGGGGWVQEISDSRPMLHIYLNGRRFLGLLNTGADKTCIAGRDWPANWPIHQTESSLQGLGMACGVARSSQPLRWQHEDKSGIIHPFVIPTLPFTLWGRDIMKDIKVRLMTDSPDDSQDLMIGAIESNLFADQISWKSDQPVWLNQWPLKQEKLQALQQLVTEQLQLGHLEESNSPWNTPVFVIKKKSGKWRLLQDLRAVNATMHDMGALQPGLPSPVAPPKGWEIIIIDLQDCFFNIKLHPEDCKRFAFSVPSPNFKRPYQRFQWKVLPQGMKNSPTLCQKFVDKAILTVRDKYQDSYIVHYMDDILLAHPSRSIVDEILTSMIQALNKHGLVVSTEKIQKYDNLKYLGTHIQGDSVSYQKLQIRTDKLRTLNDFQKLLGNINWIRPFLKLTTGELKPLFEILNPDSNPISTRKLTPEACKALQLMNERLSTARVKRLDLSQPWSLCILKTEYTPTACLWQDGVVEWIHLPHISPKVITPYDIFCTQLIIKGRHRSKELFSKDPDYIVVPYTKVQFDLLLQEKEDWPISLLGFLGEVHFHLPKDPLLTFTLQTAIIFPHMTSTTPLEKGIVIFTDGSANGRSVTYIQGREPIIKENTQNTAQQAEIVAVITAFEEVSQPFNLYTDSKYVTGLFPEIETATLSPRTKIYTELKHLQRLIHKRQEKFYIGHIRGHTGLPGPLAQGNAYADSLTRILTAGKRTADGSEFEKRTADGSEFESPKKKAKVE

SEQ ID NO: 21 - protein, 2116 aa, synthetic construct
MPAAKRVKLDGGDKKYSIGLDIGTNSVGWAVITDEYKVPSKKFKVLGNTDRHSIKKNLIGALLFDSGETAEATRLKRTARRRYTRRKNRICYLQEIFSNEMAKVDDSFFHRLEESFLVEEDKKHERHPIFGNIVDEVAYHEKYPTIYHLRKKLVDSTDKADLRLIYLALAHMIKFRGHFLIEGDLNPDNSDVDKLFIQLVQTYNQLFEENPINASGVDAKAILSARLSKSRRLENLIAQLPGEKKNGLFGNLIALSLGLTPNFKSNFDLAEDAKLQLSKDTYDDDLDNLLAQIGDQYADLFLAAKNLSDAILLSDILRVNTEITKAPLSASMIKRYDEHHQDLTLLKALVRQQLPEKYKEIFFDQSKNGYAGYIDGGASQEEFYKFIKPILEKMDGTEELLVKLNREDLLRKQRTFDNGSIPHQIHLGELHAILRRQEDFYPFLKDNREKIEKILTFRIPYYVGPLARGNSRFAWMTRKSEETITPWNFEEVVDKGASAQSFIERMTNFDKNLPNEKVLPKHSLLYEYFTVYNELTKVKYVTEGMRKPAFLSGEQKKAIVDLLFKTNRKVTVKQLKEDYFKKIECFDSVEISGVEDRFNASLGTYHDLLKIIKDKDFLDNEENEDILEDIVLTLTLFEDREMIEERLKTYAHLFDDKVMKQLKRRRYTGWGRLSRKLINGIRDKQSGKTILDFLKSDGFANRNFMQLIHDDSLTFKEDIQKAQVSGQGDSLHEHIANLAGSPAIKKGILQTVKVVDELVKVMGRHKPENIVIEMARENQTTQKGQKNSRERMKRIEEGIKELGSQILKEHPVENTQLQNEKLYLYYLQNGRDMYVDQELDINRLSDYDVDHIVPQSFLKDDSIDNKVLTRSDKARGKSDNVPSEEVVKKMKNYWRQLLNAKLITQRKFDNLTKAERGGLSELDKAGFIKRQLVETRQITKHVAQILDSRMNTKYDENDKLIREVKVITLKSKLVSDFRKDFQFYKVREINNYHHAHDAYLNAVVGTALIKKYPKLESEFVYGDYKVYDVRKMIAKSEQEIGKATAKYFFYSNIMNFFKTEITLANGEIRKRPLIETNGETGEIVWDKGRDFATVRKVLSMPQVNIVKKTEVQTGGFSKESILPKRNSDKLIARKKDWDPKKYGGFDSPTVAYSVLVVAKVEKGKSKKLKSVKELLGITIMERSSFEKNPIDFLEAKGYKEVKKDLIIKLPKYSLFELENGRKRMLASAGELQKGNELALPSKYVNFLYLASHYEKLKGSPEDNEQKQLFVEQHKHYLDEIIEQISEFSKRVILADANLDKVLSAYNKHRDKPIREQAENIIHLFTLTNLGAPAAFKYFDTTIDRKRYTSTKEVLDATLIHQSITGLYETRIDLSQLGGDGGPAPGGSEAAAKGGVQEISDSRPMLHIYLNGRRFLGLLDTGADKTCIAGRDWPANWPIHQTESSLQGLGMACGVARSSQPLRWQHEDKSGIIHPFVIPTLPFTLWGRDIMKDIKVRLMTDSPDDSQDLMIGAIESNLFADQISWKSDQPVWLNQWPLKQEKLQALQQLVTEQLQLGHLEESNSPWNTPVFVIKKKSGKWRLLQDLRAVNATMHDMGALQPGLPSPPAVPKGWEIIIIDLQDCFFNIKLHPEDCKRFAFSVPSPNFKRPYQRFQWKVLPQGMKNSPTLCQKFVDKAILTVRDKYQDSYIVHYMDDILLAHPSRSIVDEILTSMIQALNKHGLVVSTEKIQKYDNLKYLGTHIQGDSVSYQKLQIRTDKLRTLNDFQKLLGNINWIRPFLKLTTGELKPLFEILNPDSNPISTRKLTPEACKALQLMNERLSTARVKRLDLSQPWSLCILKTEYTPTACLWQDGVVEWIHLPHISPKVITPYDIFCTQLIIKGRHRSKELFSKDPDYIVVPYTKVQFDLLLQEKEDWPISLLGFLGEVHFHLPKDPLLTFTLQTAIIFPHMTSTTPLEKGIVIFTDGSANGRSVTYIQGREPIIKENTQNTAQQAEIVAVITAFEEVSQPFNLYTDSKYVTGLFPEIETATLSPRTKIYTELKHLQRLIHKRQEKFYIGHIRGHTGLPGPLAQGNAYADSLTRILTAAGKRTADGSEFEKRTADGSEFESPKKKAKVE

SEQ ID NO: 22 - protein, 2116 aa, synthetic construct
MPAAKRVKLDGGDKKYSIGLDIGTNSVGWAVITDEYKVPSKKFKVLGNTDRHSIKKNLIGALLFDSGETAEATRLKRTARRRYTRRKNRICYLQEIFSNEMAKVDDSFFHRLEESFLVEEDKKHERHPIFGNIVDEVAYHEKYPTIYHLRKKLVDSTDKADLRLIYLALAHMIKFRGHFLIEGDLNPDNSDVDKLFIQLVQTYNQLFEENPINASGVDAKAILSARLSKSRRLENLIAQLPGEKKNGLFGNLIALSLGLTPNFKSNFDLAEDAKLQLSKDTYDDDLDNLLAQIGDQYADLFLAAKNLSDAILLSDILRVNTEITKAPLSASMIKRYDEHHQDLTLLKALVRQQLPEKYKEIFFDQSKNGYAGYIDGGASQEEFYKFIKPILEKMDGTEELLVKLNREDLLRKQRTFDNGSIPHQIHLGELHAILRRQEDFYPFLKDNREKIEKILTFRIPYYVGPLARGNSRFAWMTRKSEETITPWNFEEVVDKGASAQSFIERMTNFDKNLPNEKVLPKHSLLYEYFTVYNELTKVKYVTEGMRKPAFLSGEQKKAIVDLLFKTNRKVTVKQLKEDYFKKIECFDSVEISGVEDRFNASLGTYHDLLKIIKDKDFLDNEENEDILEDIVLTLTLFEDREMIEERLKTYAHLFDDKVMKQLKRRRYTGWGRLSRKLINGIRDKQSGKTILDFLKSDGFANRNFMQLIHDDSLTFKEDIQKAQVSGQGDSLHEHIANLAGSPAIKKGILQTVKVVDELVKVMGRHKPENIVIEMARENQTTQKGQKNSRERMKRIEEGIKELGSQILKEHPVENTQLQNEKLYLYYLQNGRDMYVDQELDINRLSDYDVDHIVPQSFLKDDSIDNKVLTRSDKARGKSDNVPSEEVVKKMKNYWRQLLNAKLITQRKFDNLTKAERGGLSELDKAGFIKRQLVETRQITKHVAQILDSRMNTKYDENDKLIREVKVITLKSKLVSDFRKDFQFYKVREINNYHHAHDAYLNAVVGTALIKKYPKLESEFVYGDYKVYDVRKMIAKSEQEIGKATAKYFFYSNIMNFFKTEITLANGEIRKRPLIETNGETGEIVWDKGRDFATVRKVLSMPQVNIVKKTEVQTGGFSKESILPKRNSDKLIARKKDWDPKKYGGFDSPTVAYSVLVVAKVEKGKSKKLKSVKELLGITIMERSSFEKNPIDFLEAKGYKEVKKDLIIKLPKYSLFELENGRKRMLASAGELQKGNELALPSKYVNFLYLASHYEKLKGSPEDNEQKQLFVEQHKHYLDEIIEQISEFSKRVILADANLDKVLSAYNKHRDKPIREQAENIIHLFTLTNLGAPAAFKYFDTTIDRKRYTSTKEVLDATLIHQSITGLYETRIDLSQLGGDGGGGSEAAAKGGGGGVQEISDSRPMLHIYLNGRRFLGLLDTGADKTCIAGRDWPANWPIHQTESSLQGLGMACGVARSSQPLRWQHEDKSGIIHPFVIPTLPFTLWGRDIMKDIKVRLMTDSPDDSQDLMIGAIESNLFADQISWKSDQPVWLNQWPLKQEKLQALQQLVTEQLQLGHLEESNSPWNTPVFVIKKKSGKWRLLQDLRAVNATMHDMGALQPGLPSPPAVPKGWEIIIIDLQDCFFNIKLHPEDCKRFAFSVPSPNFKRPYQRFQWKVLPQGMKNSPTLCQKFVDKAILTVRDKYQDSYIVHYMDDILLAHPSRSIVDEILTSMIQALNKHGLVVSTEKIQKYDNLKYLGTHIQGDSVSYQKLQIRTDKLRTLNDFQKLLGNINWIRPFLKLTTGELKPLFEILNPDSNPISTRKLTPEACKALQLMNERLSTARVKRLDLSQPWSLCILKTEYTPTACLWQDGVVEWIHLPHISPKVITPYDIFCTQLIIKGRHRSKELFSKDPDYIVVPYTKVQFDLLLQEKEDWPISLLGFLGEVHFHLPKDPLLTFTLQTAIIFPHMTSTTPLEKGIVIFTDGSANGRSVTYIQGREPIIKENTQNTAQQAEIVAVITAFEEVSQPFNLYTDSKYVTGLFPEIETATLSPRTKIYTELKHLQRLIHKRQEKFYIGHIRGHTGLPGPLAQGNAYADSLTRILTAAGKRTADGSEFEKRTADGSEFESPKKKAKVE

SEQ ID NO: 23 - protein, 2116 aa, synthetic construct
MPAAKRVKLDGGDKKYSIGLDIGTNSVGWAVITDEYKVPSKKFKVLGNTDRHSIKKNLIGALLFDSGETAEATRLKRTARRRYTRRKNRICYLQEIFSNEMAKVDDSFFHRLEESFLVEEDKKHERHPIFGNIVDEVAYHEKYPTIYHLRKKLVDSTDKADLRLIYLALAHMIKFRGHFLIEGDLNPDNSDVDKLFIQLVQTYNQLFEENPINASGVDAKAILSARLSKSRRLENLIAQLPGEKKNGLFGNLIALSLGLTPNFKSNFDLAEDAKLQLSKDTYDDDLDNLLAQIGDQYADLFLAAKNLSDAILLSDILRVNTEITKAPLSASMIKRYDEHHQDLTLLKALVRQQLPEKYKEIFFDQSKNGYAGYIDGGASQEEFYKFIKPILEKMDGTEELLVKLNREDLLRKQRTFDNGSIPHQIHLGELHAILRRQEDFYPFLKDNREKIEKILTFRIPYYVGPLARGNSRFAWMTRKSEETITPWNFEEVVDKGASAQSFIERMTNFDKNLPNEKVLPKHSLLYEYFTVYNELTKVKYVTEGMRKPAFLSGEQKKAIVDLLFKTNRKVTVKQLKEDYFKKIECFDSVEISGVEDRFNASLGTYHDLLKIIKDKDFLDNEENEDILEDIVLTLTLFEDREMIEERLKTYAHLFDDKVMKQLKRRRYTGWGRLSRKLINGIRDKQSGKTILDFLKSDGFANRNFMQLIHDDSLTFKEDIQKAQVSGQGDSLHEHIANLAGSPAIKKGILQTVKVVDELVKVMGRHKPENIVIEMARENQTTQKGQKNSRERMKRIEEGIKELGSQILKEHPVENTQLQNEKLYLYYLQNGRDMYVDQELDINRLSDYDVDHIVPQSFLKDDSIDNKVLTRSDKARGKSDNVPSEEVVKKMKNYWRQLLNAKLITQRKFDNLTKAERGGLSELDKAGFIKRQLVETRQITKHVAQILDSRMNTKYDENDKLIREVKVITLKSKLVSDFRKDFQFYKVREINNYHHAHDAYLNAVVGTALIKKYPKLESEFVYGDYKVYDVRKMIAKSEQEIGKATAKYFFYSNIMNFFKTEITLANGEIRKRPLIETNGETGEIVWDKGRDFATVRKVLSMPQVNIVKKTEVQTGGFSKESILPKRNSDKLIARKKDWDPKKYGGFDSPTVAYSVLVVAKVEKGKSKKLKSVKELLGITIMERSSFEKNPIDFLEAKGYKEVKKDLIIKLPKYSLFELENGRKRMLASAGELQKGNELALPSKYVNFLYLASHYEKLKGSPEDNEQKQLFVEQHKHYLDEIIEQISEFSKRVILADANLDKVLSAYNKHRDKPIREQAENIIHLFTLTNLGAPAAFKYFDTTIDRKRYTSTKEVLDATLIHQSITGLYETRIDLSQLGGDGGGGGGGSEAAAKGGVQEISDSRPMLHIYLNGRRFLGLLDTGADKTCIAGRDWPANWPIHQTESSLQGLGMACGVARSSQPLRWQHEDKSGIIHPFVIPTLPFTLWGRDIMKDIKVRLMTDSPDDSQDLMIGAIESNLFADQISWKSDQPVWLNQWPLKQEKLQALQQLVTEQLQLGHLEESNSPWNTPVFVIKKKSGKWRLLQDLRAVNATMHDMGALQPGLPSPPAVPKGWEIIIIDLQDCFFNIKLHPEDCKRFAFSVPSPNFKRPYQRFQWKVLPQGMKNSPTLCQKFVDKAILTVRDKYQDSYIVHYMDDILLAHPSRSIVDEILTSMIQALNKHGLVVSTEKIQKYDNLKYLGTHIQGDSVSYQKLQIRTDKLRTLNDFQKLLGNINWIRPFLKLTTGELKPLFEILNPDSNPISTRKLTPEACKALQLMNERLSTARVKRLDLSQPWSLCILKTEYTPTACLWQDGVVEWIHLPHISPKVITPYDIFCTQLIIKGRHRSKELFSKDPDYIVVPYTKVQFDLLLQEKEDWPISLLGFLGEVHFHLPKDPLLTFTLQTAIIFPHMTSTTPLEKGIVIFTDGSANGRSVTYIQGREPIIKENTQNTAQQAEIVAVITAFEEVSQPFNLYTDSKYVTGLFPEIETATLSPRTKIYTELKHLQRLIHKRQEKFYIGHIRGHTGLPGPLAQGNAYADSLTRILTAAGKRTADGSEFEKRTADGSEFESPKKKAKVE

SEQ ID NO: 24 - protein, 2116 aa, synthetic construct
MPAAKRVKLDGGDKKYSIGLDIGTNSVGWAVITDEYKVPSKKFKVLGNTDRHSIKKNLIGALLFDSGETAEATRLKRTARRRYTRRKNRICYLQEIFSNEMAKVDDSFFHRLEESFLVEEDKKHERHPIFGNIVDEVAYHEKYPTIYHLRKKLVDSTDKADLRLIYLALAHMIKFRGHFLIEGDLNPDNSDVDKLFIQLVQTYNQLFEENPINASGVDAKAILSARLSKSRRLENLIAQLPGEKKNGLFGNLIALSLGLTPNFKSNFDLAEDAKLQLSKDTYDDDLDNLLAQIGDQYADLFLAAKNLSDAILLSDILRVNTEITKAPLSASMIKRYDEHHQDLTLLKALVRQQLPEKYKEIFFDQSKNGYAGYIDGGASQEEFYKFIKPILEKMDGTEELLVKLNREDLLRKQRTFDNGSIPHQIHLGELHAILRRQEDFYPFLKDNREKIEKILTFRIPYYVGPLARGNSRFAWMTRKSEETITPWNFEEVVDKGASAQSFIERMTNFDKNLPNEKVLPKHSLLYEYFTVYNELTKVKYVTEGMRKPAFLSGEQKKAIVDLLFKTNRKVTVKQLKEDYFKKIECFDSVEISGVEDRFNASLGTYHDLLKIIKDKDFLDNEENEDILEDIVLTLTLFEDREMIEERLKTYAHLFDDKVMKQLKRRRYTGWGRLSRKLINGIRDKQSGKTILDFLKSDGFANRNFMQLIHDDSLTFKEDIQKAQVSGQGDSLHEHIANLAGSPAIKKGILQTVKVVDELVKVMGRHKPENIVIEMARENQTTQKGQKNSRERMKRIEEGIKELGSQILKEHPVENTQLQNEKLYLYYLQNGRDMYVDQELDINRLSDYDVDHIVPQSFLKDDSIDNKVLTRSDKARGKSDNVPSEEVVKKMKNYWRQLLNAKLITQRKFDNLTKAERGGLSELDKAGFIKRQLVETRQITKHVAQILDSRMNTKYDENDKLIREVKVITLKSKLVSDFRKDFQFYKVREINNYHHAHDAYLNAVVGTALIKKYPKLESEFVYGDYKVYDVRKMIAKSEQEIGKATAKYFFYSNIMNFFKTEITLANGEIRKRPLIETNGETGEIVWDKGRDFATVRKVLSMPQVNIVKKTEVQTGGFSKESILPKRNSDKLIARKKDWDPKKYGGFDSPTVAYSVLVVAKVEKGKSKKLKSVKELLGITIMERSSFEKNPIDFLEAKGYKEVKKDLIIKLPKYSLFELENGRKRMLASAGELQKGNELALPSKYVNFLYLASHYEKLKGSPEDNEQKQLFVEQHKHYLDEIIEQISEFSKRVILADANLDKVLSAYNKHRDKPIREQAENIIHLFTLTNLGAPAAFKYFDTTIDRKRYTSTKEVLDATLIHQSITGLYETRIDLSQLGGDGGPAPEAAAKGSSGGVQEISDSRPMLHIYLNGRRFLGLLDTGADKTCIAGRDWPANWPIHQTESSLQGLGMACGVARSSQPLRWQHEDKSGIIHPFVIPTLPFTLWGRDIMKDIKVRLMTDSPDDSQDLMIGAIESNLFADQISWKSDQPVWLNQWPLKQEKLQALQQLVTEQLQLGHLEESNSPWNTPVFVIKKKSGKWRLLQDLRAVNATMHDMGALQPGLPSPPAVPKGWEIIIIDLQDCFFNIKLHPEDCKRFAFSVPSPNFKRPYQRFQWKVLPQGMKNSPTLCQKFVDKAILTVRDKYQDSYIVHYMDDILLAHPSRSIVDEILTSMIQALNKHGLVVSTEKIQKYDNLKYLGTHIQGDSVSYQKLQIRTDKLRTLNDFQKLLGNINWIRPFLKLTTGELKPLFEILNPDSNPISTRKLTPEACKALQLMNERLSTARVKRLDLSQPWSLCILKTEYTPTACLWQDGVVEWIHLPHISPKVITPYDIFCTQLIIKGRHRSKELFSKDPDYIVVPYTKVQFDLLLQEKEDWPISLLGFLGEVHFHLPKDPLLTFTLQTAIIFPHMTSTTPLEKGIVIFTDGSANGRSVTYIQGREPIIKENTQNTAQQAEIVAVITAFEEVSQPFNLYTDSKYVTGLFPEIETATLSPRTKIYTELKHLQRLIHKRQEKFYIGHIRGHTGLPGPLAQGNAYADSLTRILTAAGKRTADGSEFEKRTADGSEFESPKKKAKVE

SEQ ID NO: 25 - protein, 2116 aa, synthetic construct
MPAAKRVKLDGGDKKYSIGLDIGTNSVGWAVITDEYKVPSKKFKVLGNTDRHSIKKNLIGALLFDSGETAEATRLKRTARRRYTRRKNRICYLQEIFSNEMAKVDDSFFHRLEESFLVEEDKKHERHPIFGNIVDEVAYHEKYPTIYHLRKKLVDSTDKADLRLIYLALAHMIKFRGHFLIEGDLNPDNSDVDKLFIQLVQTYNQLFEENPINASGVDAKAILSARLSKSRRLENLIAQLPGEKKNGLFGNLIALSLGLTPNFKSNFDLAEDAKLQLSKDTYDDDLDNLLAQIGDQYADLFLAAKNLSDAILLSDILRVNTEITKAPLSASMIKRYDEHHQDLTLLKALVRQQLPEKYKEIFFDQSKNGYAGYIDGGASQEEFYKFIKPILEKMDGTEELLVKLNREDLLRKQRTFDNGSIPHQIHLGELHAILRRQEDFYPFLKDNREKIEKILTFRIPYYVGPLARGNSRFAWMTRKSEETITPWNFEEVVDKGASAQSFIERMTNFDKNLPNEKVLPKHSLLYEYFTVYNELTKVKYVTEGMRKPAFLSGEQKKAIVDLLFKTNRKVTVKQLKEDYFKKIECFDSVEISGVEDRFNASLGTYHDLLKIIKDKDFLDNEENEDILEDIVLTLTLFEDREMIEERLKTYAHLFDDKVMKQLKRRRYTGWGRLSRKLINGIRDKQSGKTILDFLKSDGFANRNFMQLIHDDSLTFKEDIQKAQVSGQGDSLHEHIANLAGSPAIKKGILQTVKVVDELVKVMGRHKPENIVIEMARENQTTQKGQKNSRERMKRIEEGIKELGSQILKEHPVENTQLQNEKLYLYYLQNGRDMYVDQELDINRLSDYDVDHIVPQSFLKDDSIDNKVLTRSDKARGKSDNVPSEEVVKKMKNYWRQLLNAKLITQRKFDNLTKAERGGLSELDKAGFIKRQLVETRQITKHVAQILDSRMNTKYDENDKLIREVKVITLKSKLVSDFRKDFQFYKVREINNYHHAHDAYLNAVVGTALIKKYPKLESEFVYGDYKVYDVRKMIAKSEQEIGKATAKYFFYSNIMNFFKTEITLANGEIRKRPLIETNGETGEIVWDKGRDFATVRKVLSMPQVNIVKKTEVQTGGFSKESILPKRNSDKLIARKKDWDPKKYGGFDSPTVAYSVLVVAKVEKGKSKKLKSVKELLGITIMERSSFEKNPIDFLEAKGYKEVKKDLIIKLPKYSLFELENGRKRMLASAGELQKGNELALPSKYVNFLYLASHYEKLKGSPEDNEQKQLFVEQHKHYLDEIIEQISEFSKRVILADANLDKVLSAYNKHRDKPIREQAENIIHLFTLTNLGAPAAFKYFDTTIDRKRYTSTKEVLDATLIHQSITGLYETRIDLSQLGGDGGGGSGSSEAAAKGGVQEISDSRPMLHIYLNGRRFLGLLDTGADKTCIAGRDWPANWPIHQTESSLQGLGMACGVARSSQPLRWQHEDKSGIIHPFVIPTLPFTLWGRDIMKDIKVRLMTDSPDDSQDLMIGAIESNLFADQISWKSDQPVWLNQWPLKQEKLQALQQLVTEQLQLGHLEESNSPWNTPVFVIKKKSGKWRLLQDLRAVNATMHDMGALQPGLPSPPAVPKGWEIIIIDLQDCFFNIKLHPEDCKRFAFSVPSPNFKRPYQRFQWKVLPQGMKNSPTLCQKFVDKAILTVRDKYQDSYIVHYMDDILLAHPSRSIVDEILTSMIQALNKHGLVVSTEKIQKYDNLKYLGTHIQGDSVSYQKLQIRTDKLRTLNDFQKLLGNINWIRPFLKLTTGELKPLFEILNPDSNPISTRKLTPEACKALQLMNERLSTARVKRLDLSQPWSLCILKTEYTPTACLWQDGVVEWIHLPHISPKVITPYDIFCTQLIIKGRHRSKELFSKDPDYIVVPYTKVQFDLLLQEKEDWPISLLGFLGEVHFHLPKDPLLTFTLQTAIIFPHMTSTTPLEKGIVIFTDGSANGRSVTYIQGREPIIKENTQNTAQQAEIVAVITAFEEVSQPFNLYTDSKYVTGLFPEIETATLSPRTKIYTELKHLQRLIHKRQEKFYIGHIRGHTGLPGPLAQGNAYADSLTRILTAAGKRTADGSEFEKRTADGSEFESPKKKAKVE

SEQ ID NO: 26 - protein, 2116 aa, synthetic construct
MPAAKRVKLDGGDKKYSIGLDIGTNSVGWAVITDEYKVPSKKFKVLGNTDRHSIKKNLIGALLFDSGETAEATRLKRTARRRYTRRKNRICYLQEIFSNEMAKVDDSFFHRLEESFLVEEDKKHERHPIFGNIVDEVAYHEKYPTIYHLRKKLVDSTDKADLRLIYLALAHMIKFRGHFLIEGDLNPDNSDVDKLFIQLVQTYNQLFEENPINASGVDAKAILSARLSKSRRLENLIAQLPGEKKNGLFGNLIALSLGLTPNFKSNFDLAEDAKLQLSKDTYDDDLDNLLAQIGDQYADLFLAAKNLSDAILLSDILRVNTEITKAPLSASMIKRYDEHHQDLTLLKALVRQQLPEKYKEIFFDQSKNGYAGYIDGGASQEEFYKFIKPILEKMDGTEELLVKLNREDLLRKQRTFDNGSIPHQIHLGELHAILRRQEDFYPFLKDNREKIEKILTFRIPYYVGPLARGNSRFAWMTRKSEETITPWNFEEVVDKGASAQSFIERMTNFDKNLPNEKVLPKHSLLYEYFTVYNELTKVKYVTEGMRKPAFLSGEQKKAIVDLLFKTNRKVTVKQLKEDYFKKIECFDSVEISGVEDRFNASLGTYHDLLKIIKDKDFLDNEENEDILEDIVLTLTLFEDREMIEERLKTYAHLFDDKVMKQLKRRRYTGWGRLSRKLINGIRDKQSGKTILDFLKSDGFANRNFMQLIHDDSLTFKEDIQKAQVSGQGDSLHEHIANLAGSPAIKKGILQTVKVVDELVKVMGRHKPENIVIEMARENQTTQKGQKNSRERMKRIEEGIKELGSQILKEHPVENTQLQNEKLYLYYLQNGRDMYVDQELDINRLSDYDVDHIVPQSFLKDDSIDNKVLTRSDKARGKSDNVPSEEVVKKMKNYWRQLLNAKLITQRKFDNLTKAERGGLSELDKAGFIKRQLVETRQITKHVAQILDSRMNTKYDENDKLIREVKVITLKSKLVSDFRKDFQFYKVREINNYHHAHDAYLNAVVGTALIKKYPKLESEFVYGDYKVYDVRKMIAKSEQEIGKATAKYFFYSNIMNFFKTEITLANGEIRKRPLIETNGETGEIVWDKGRDFATVRKVLSMPQVNIVKKTEVQTGGFSKESILPKRNSDKLIARKKDWDPKKYGGFDSPTVAYSVLVVAKVEKGKSKKLKSVKELLGITIMERSSFEKNPIDFLEAKGYKEVKKDLIIKLPKYSLFELENGRKRMLASAGELQKGNELALPSKYVNFLYLASHYEKLKGSPEDNEQKQLFVEQHKHYLDEIIEQISEFSKRVILADANLDKVLSAYNKHRDKPIREQAENIIHLFTLTNLGAPAAFKYFDTTIDRKRYTSTKEVLDATLIHQSITGLYETRIDLSQLGGDGGEAAAKGGSGSSGGVQEISDSRPMLHIYLNGRRFLGLLDTGADKTCIAGRDWPANWPIHQTESSLQGLGMACGVARSSQPLRWQHEDKSGIIHPFVIPTLPFTLWGRDIMKDIKVRLMTDSPDDSQDLMIGAIESNLFADQISWKSDQPVWLNQWPLKQEKLQALQQLVTEQLQLGHLEESNSPWNTPVFVIKKKSGKWRLLQDLRAVNATMHDMGALQPGLPSPVAVPKGWEIIIIDLQDCFFNIKLHPEDCKRFAFSVPSPNFKRPYQRFQWKVLPQGMKNSPTLCQKFVDKAILTVRDKYQDSYIVHYMDDILLAHPSRSIVDEILTSMIQALNKHGLVVSTEKIQKYDNLKYLGTHIQGDSVSYQKLQIRTDKLRTLNDFQKLLGNINWIRPFLKLTTGELKPLFEILNPDSNPISTRKLTPEACKALQLMNERLSTARVKRLDLSQPWSLCILKTEYTPTACLWQDGVVEWIHLPHISPKVITPYDIFCTQLIIKGRHRSKELFSKDPDYIVVPYTKVQFDLLLQEKEDWPISLLGFLGEVHFHLPKDPLLTFTLQTAIIFPHMTSTTPLEKGIVIFTDGSANGRSVTYIQGREPIIKENTQNTAQQAEIVAVITAFEEVSQPFNLYTDSKYVTGLFPEIETATLSPRTKIYTELKHLQRLIHKRQEKFYIGHIRGHTGLPGPLAQGNAYADSLTRILTAAGKRTADGSEFEKRTADGSEFESPKKKAKVE

SEQ ID NO: 27 - protein, 2116 aa, synthetic construct
MPAAKRVKLDGGDKKYSIGLDIGTNSVGWAVITDEYKVPSKKFKVLGNTDRHSIKKNLIGALLFDSGETAEATRLKRTARRRYTRRKNRICYLQEIFSNEMAKVDDSFFHRLEESFLVEEDKKHERHPIFGNIVDEVAYHEKYPTIYHLRKKLVDSTDKADLRLIYLALAHMIKFRGHFLIEGDLNPDNSDVDKLFIQLVQTYNQLFEENPINASGVDAKAILSARLSKSRRLENLIAQLPGEKKNGLFGNLIALSLGLTPNFKSNFDLAEDAKLQLSKDTYDDDLDNLLAQIGDQYADLFLAAKNLSDAILLSDILRVNTEITKAPLSASMIKRYDEHHQDLTLLKALVRQQLPEKYKEIFFDQSKNGYAGYIDGGASQEEFYKFIKPILEKMDGTEELLVKLNREDLLRKQRTFDNGSIPHQIHLGELHAILRRQEDFYPFLKDNREKIEKILTFRIPYYVGPLARGNSRFAWMTRKSEETITPWNFEEVVDKGASAQSFIERMTNFDKNLPNEKVLPKHSLLYEYFTVYNELTKVKYVTEGMRKPAFLSGEQKKAIVDLLFKTNRKVTVKQLKEDYFKKIECFDSVEISGVEDRFNASLGTYHDLLKIIKDKDFLDNEENEDILEDIVLTLTLFEDREMIEERLKTYAHLFDDKVMKQLKRRRYTGWGRLSRKLINGIRDKQSGKTILDFLKSDGFANRNFMQLIHDDSLTFKEDIQKAQVSGQGDSLHEHIANLAGSPAIKKGILQTVKVVDELVKVMGRHKPENIVIEMARENQTTQKGQKNSRERMKRIEEGIKELGSQILKEHPVENTQLQNEKLYLYYLQNGRDMYVDQELDINRLSDYDVDHIVPQSFLKDDSIDNKVLTRSDKARGKSDNVPSEEVVKKMKNYWRQLLNAKLITQRKFDNLTKAERGGLSELDKAGFIKRQLVETRQITKHVAQILDSRMNTKYDENDKLIREVKVITLKSKLVSDFRKDFQFYKVREINNYHHAHDAYLNAVVGTALIKKYPKLESEFVYGDYKVYDVRKMIAKSEQEIGKATAKYFFYSNIMNFFKTEITLANGEIRKRPLIETNGETGEIVWDKGRDFATVRKVLSMPQVNIVKKTEVQTGGFSKESILPKRNSDKLIARKKDWDPKKYGGFDSPTVAYSVLVVAKVEKGKSKKLKSVKELLGITIMERSSFEKNPIDFLEAKGYKEVKKDLIIKLPKYSLFELENGRKRMLASAGELQKGNELALPSKYVNFLYLASHYEKLKGSPEDNEQKQLFVEQHKHYLDEIIEQISEFSKRVILADANLDKVLSAYNKHRDKPIREQAENIIHLFTLTNLGAPAAFKYFDTTIDRKRYTSTKEVLDATLIHQSITGLYETRIDLSQLGGDGGEAAAKGGGGGSGGVQEISDSRPMLHIYLNGRRFLGLLDTGADKTCIAGRDWPANWPIHQTESSLQGLGMACGVARSSQPLRWQHEDKSGIIHPFVIPTLPFTLWGRDIMKDIKVRLMTDSPDDSQDLMIGAIESNLFADQISWKSDQPVWLNQWPLKQEKLQALQQLVTEQLQLGHLEESNSPWNTPVFVIKKKSGKWRLLQDLRAVNATMHDMGALQPGLPSPVAVPKGWEIIIIDLQDCFFNIKLHPEDCKRFAFSVPSPNFKRPYQRFQWKVLPQGMKNSPTLCQKFVDKAILTVRDKYQDSYIVHYMDDILLAHPSRSIVDEILTSMIQALNKHGLVVSTEKIQKYDNLKYLGTHIQGDSVSYQKLQIRTDKLRTLNDFQKLLGNINWIRPFLKLTTGELKPLFEILNPDSNPISTRKLTPEACKALQLMNERLSTARVKRLDLSQPWSLCILKTEYTPTACLWQDGVVEWIHLPHISPKVITPYDIFCTQLIIKGRHRSKELFSKDPDYIVVPYTKVQFDLLLQEKEDWPISLLGFLGEVHFHLPKDPLLTFTLQTAIIFPHMTSTTPLEKGIVIFTDGSANGRSVTYIQGREPIIKENTQNTAQQAEIVAVITAFEEVSQPFNLYTDSKYVTGLFPEIETATLSPRTKIYTELKHLQRLIHKRQEKFYIGHIRGHTGLPGPLAQGNAYADSLTRILTAAGKRTADGSEFEKRTADGSEFESPKKKAKVE

SEQ ID NO: 28 - protein, 2116 aa, synthetic construct
MPAAKRVKLDGGDKKYSIGLDIGTNSVGWAVITDEYKVPSKKFKVLGNTDRHSIKKNLIGALLFDSGETAEATRLKRTARRRYTRRKNRICYLQEIFSNEMAKVDDSFFHRLEESFLVEEDKKHERHPIFGNIVDEVAYHEKYPTIYHLRKKLVDSTDKADLRLIYLALAHMIKFRGHFLIEGDLNPDNSDVDKLFIQLVQTYNQLFEENPINASGVDAKAILSARLSKSRRLENLIAQLPGEKKNGLFGNLIALSLGLTPNFKSNFDLAEDAKLQLSKDTYDDDLDNLLAQIGDQYADLFLAAKNLSDAILLSDILRVNTEITKAPLSASMIKRYDEHHQDLTLLKALVRQQLPEKYKEIFFDQSKNGYAGYIDGGASQEEFYKFIKPILEKMDGTEELLVKLNREDLLRKQRTFDNGSIPHQIHLGELHAILRRQEDFYPFLKDNREKIEKILTFRIPYYVGPLARGNSRFAWMTRKSEETITPWNFEEVVDKGASAQSFIERMTNFDKNLPNEKVLPKHSLLYEYFTVYNELTKVKYVTEGMRKPAFLSGEQKKAIVDLLFKTNRKVTVKQLKEDYFKKIECFDSVEISGVEDRFNASLGTYHDLLKIIKDKDFLDNEENEDILEDIVLTLTLFEDREMIEERLKTYAHLFDDKVMKQLKRRRYTGWGRLSRKLINGIRDKQSGKTILDFLKSDGFANRNFMQLIHDDSLTFKEDIQKAQVSGQGDSLHEHIANLAGSPAIKKGILQTVKVVDELVKVMGRHKPENIVIEMARENQTTQKGQKNSRERMKRIEEGIKELGSQILKEHPVENTQLQNEKLYLYYLQNGRDMYVDQELDINRLSDYDVDHIVPQSFLKDDSIDNKVLTRSDKARGKSDNVPSEEVVKKMKNYWRQLLNAKLITQRKFDNLTKAERGGLSELDKAGFIKRQLVETRQITKHVAQILDSRMNTKYDENDKLIREVKVITLKSKLVSDFRKDFQFYKVREINNYHHAHDAYLNAVVGTALIKKYPKLESEFVYGDYKVYDVRKMIAKSEQEIGKATAKYFFYSNIMNFFKTEITLANGEIRKRPLIETNGETGEIVWDKGRDFATVRKVLSMPQVNIVKKTEVQTGGFSKESILPKRNSDKLIARKKDWDPKKYGGFDSPTVAYSVLVVAKVEKGKSKKLKSVKELLGITIMERSSFEKNPIDFLEAKGYKEVKKDLIIKLPKYSLFELENGRKRMLASAGELQKGNELALPSKYVNFLYLASHYEKLKGSPEDNEQKQLFVEQHKHYLDEIIEQISEFSKRVILADANLDKVLSAYNKHRDKPIREQAENIIHLFTLTNLGAPAAFKYFDTTIDRKRYTSTKEVLDATLIHQSITGLYETRIDLSQLGGDGGEAAAKPAPGGSGGVQEISDSRPMLHIYLNGRRFLGLLDTGADKTCIAGRDWPANWPIHQTESSLQGLGMACGVARSSQPLRWQHEDKSGIIHPFVIPTLPFTLWGRDIMKDIKVRLMTDSPDDSQDLMIGAIESNLFADQISWKSDQPVWLNQWPLKQEKLQALQQLVTEQLQLGHLEESNSPWNTPVFVIKKKSGKWRLLQDLRAVNATMHDMGALQPGLPSPVAVPKGWEIIIIDLQDCFFNIKLHPEDCKRFAFSVPSPNFKRPYQRFQWKVLPQGMKNSPTLCQKFVDKAILTVRDKYQDSYIVHYMDDILLAHPSRSIVDEILTSMIQALNKHGLVVSTEKIQKYDNLKYLGTHIQGDSVSYQKLQIRTDKLRTLNDFQKLLGNINWIRPFLKLTTGELKPLFEILNPDSNPISTRKLTPEACKALQLMNERLSTARVKRLDLSQPWSLCILKTEYTPTACLWQDGVVEWIHLPHISPKVITPYDIFCTQLIIKGRHRSKELFSKDPDYIVVPYTKVQFDLLLQEKEDWPISLLGFLGEVHFHLPKDPLLTFTLQTAIIFPHMTSTTPLEKGIVIFTDGSANGRSVTYIQGREPIIKENTQNTAQQAEIVAVITAFEEVSQPFNLYTDSKYVTGLFPEIETATLSPRTKIYTELKHLQRLIHKRQEKFYIGHIRGHTGLPGPLAQGNAYADSLTRILTAAGKRTADGSEFEKRTADGSEFESPKKKAKVE

SEQ ID NO: 29 - protein, 2113 aa, synthetic construct
MPAAKRVKLDGGDKKYSIGLDIGTNSVGWAVITDEYKVPSKKFKVLGNTDRHSIKKNLIGALLFDSGETAEATRLKRTARRRYTRRKNRICYLQEIFSNEMAKVDDSFFHRLEESFLVEEDKKHERHPIFGNIVDEVAYHEKYPTIYHLRKKLVDSTDKADLRLIYLALAHMIKFRGHFLIEGDLNPDNSDVDKLFIQLVQTYNQLFEENPINASGVDAKAILSARLSKSRRLENLIAQLPGEKKNGLFGNLIALSLGLTPNFKSNFDLAEDAKLQLSKDTYDDDLDNLLAQIGDQYADLFLAAKNLSDAILLSDILRVNTEITKAPLSASMIKRYDEHHQDLTLLKALVRQQLPEKYKEIFFDQSKNGYAGYIDGGASQEEFYKFIKPILEKMDGTEELLVKLNREDLLRKQRTFDNGSIPHQIHLGELHAILRRQEDFYPFLKDNREKIEKILTFRIPYYVGPLARGNSRFAWMTRKSEETITPWNFEEVVDKGASAQSFIERMTNFDKNLPNEKVLPKHSLLYEYFTVYNELTKVKYVTEGMRKPAFLSGEQKKAIVDLLFKTNRKVTVKQLKEDYFKKIECFDSVEISGVEDRFNASLGTYHDLLKIIKDKDFLDNEENEDILEDIVLTLTLFEDREMIEERLKTYAHLFDDKVMKQLKRRRYTGWGRLSRKLINGIRDKQSGKTILDFLKSDGFANRNFMQLIHDDSLTFKEDIQKAQVSGQGDSLHEHIANLAGSPAIKKGILQTVKVVDELVKVMGRHKPENIVIEMARENQTTQKGQKNSRERMKRIEEGIKELGSQILKEHPVENTQLQNEKLYLYYLQNGRDMYVDQELDINRLSDYDVDHIVPQSFLKDDSIDNKVLTRSDKARGKSDNVPSEEVVKKMKNYWRQLLNAKLITQRKFDNLTKAERGGLSELDKAGFIKRQLVETRQITKHVAQILDSRMNTKYDENDKLIREVKVITLKSKLVSDFRKDFQFYKVREINNYHHAHDAYLNAVVGTALIKKYPKLESEFVYGDYKVYDVRKMIAKSEQEIGKATAKYFFYSNIMNFFKTEITLANGEIRKRPLIETNGETGEIVWDKGRDFATVRKVLSMPQVNIVKKTEVQTGGFSKESILPKRNSDKLIARKKDWDPKKYGGFDSPTVAYSVLVVAKVEKGKSKKLKSVKELLGITIMERSSFEKNPIDFLEAKGYKEVKKDLIIKLPKYSLFELENGRKRMLASAGELQKGNELALPSKYVNFLYLASHYEKLKGSPEDNEQKQLFVEQHKHYLDEIIEQISEFSKRVILADANLDKVLSAYNKHRDKPIREQAENIIHLFTLTNLGAPAAFKYFDTTIDRKRYTSTKEVLDATLIHQSITGLYETRIDLSQLGGDGGGGSEAAAKGGVQEISDSRPMLHIYLNGRRFLGLLDTGADKTCIAGRDWPANWPIHQTESSLQGLGMACGVARSSQPLRWQHEDKSGIIHPFVIPTLPFTLWGRDIMKDIKVRLMTDSPDDSQDLMIGAIESNLFADQISWKSDQPVWLNQWPLKQEKLQALQQLVTEQLQLGHLEESNSPWNTPVFVIKKKSGKWRLLQDLRAVNATMHDMGALQPGLPSPVAVPKGWEIIIIDLQDCFFNIKLHPEDCKRFAFSVPSPNFKRPYQRFQWKVLPQGMKNSPTLCQKFVDKAILTVRDKYQDSYIVHYMDDILLAHPSRSIVDEILTSMIQALNKHGLVVSTEKIQKYDNLKYLGTHIQGDSVSYQKLQIRTDKLRTLNDFQKLLGNINWIRPFLKLTTGELKPLFEILNPDSNPISTRKLTPEACKALQLMNERLSTARVKRLDLSQPWSLCILKTEYTPTACLWQDGVVEWIHLPHISPKVITPYDIFCTQLIIKGRHRSKELFSKDPDYIVVPYTKVQFDLLLQEKEDWPISLLGFLGEVHFHLPKDPLLTFTLQTAIIFPHMTSTTPLEKGIVIFTDGSANGRSVTYIQGREPIIKENTQNTAQQAEIVAVITAFEEVSQPFNLYTDSKYVTGLFPEIETATLSPRTKIYTELKHLQRLIHKRQEKFYIGHIRGHTGLPGPLAQGNAYADSLTRILTAAGKRTADGSEFEKRTADGSEFESPKKKAKVE

SEQ ID NO: 30 - protein, 2111 aa, synthetic construct
MPAAKRVKLDGGDKKYSIGLDIGTNSVGWAVITDEYKVPSKKFKVLGNTDRHSIKKNLIGALLFDSGETAEATRLKRTARRRYTRRKNRICYLQEIFSNEMAKVDDSFFHRLEESFLVEEDKKHERHPIFGNIVDEVAYHEKYPTIYHLRKKLVDSTDKADLRLIYLALAHMIKFRGHFLIEGDLNPDNSDVDKLFIQLVQTYNQLFEENPINASGVDAKAILSARLSKSRRLENLIAQLPGEKKNGLFGNLIALSLGLTPNFKSNFDLAEDAKLQLSKDTYDDDLDNLLAQIGDQYADLFLAAKNLSDAILLSDILRVNTEITKAPLSASMIKRYDEHHQDLTLLKALVRQQLPEKYKEIFFDQSKNGYAGYIDGGASQEEFYKFIKPILEKMDGTEELLVKLNREDLLRKQRTFDNGSIPHQIHLGELHAILRRQEDFYPFLKDNREKIEKILTFRIPYYVGPLARGNSRFAWMTRKSEETITPWNFEEVVDKGASAQSFIERMTNFDKNLPNEKVLPKHSLLYEYFTVYNELTKVKYVTEGMRKPAFLSGEQKKAIVDLLFKTNRKVTVKQLKEDYFKKIECFDSVEISGVEDRFNASLGTYHDLLKIIKDKDFLDNEENEDILEDIVLTLTLFEDREMIEERLKTYAHLFDDKVMKQLKRRRYTGWGRLSRKLINGIRDKQSGKTILDFLKSDGFANRNFMQLIHDDSLTFKEDIQKAQVSGQGDSLHEHIANLAGSPAIKKGILQTVKVVDELVKVMGRHKPENIVIEMARENQTTQKGQKNSRERMKRIEEGIKELGSQILKEHPVENTQLQNEKLYLYYLQNGRDMYVDQELDINRLSDYDVDHIVPQSFLKDDSIDNKVLTRSDKARGKSDNVPSEEVVKKMKNYWRQLLNAKLITQRKFDNLTKAERGGLSELDKAGFIKRQLVETRQITKHVAQILDSRMNTKYDENDKLIREVKVITLKSKLVSDFRKDFQFYKVREINNYHHAHDAYLNAVVGTALIKKYPKLESEFVYGDYKVYDVRKMIAKSEQEIGKATAKYFFYSNIMNFFKTEITLANGEIRKRPLIETNGETGEIVWDKGRDFATVRKVLSMPQVNIVKKTEVQTGGFSKESILPKRNSDKLIARKKDWDPKKYGGFDSPTVAYSVLVVAKVEKGKSKKLKSVKELLGITIMERSSFEKNPIDFLEAKGYKEVKKDLIIKLPKYSLFELENGRKRMLASAGELQKGNELALPSKYVNFLYLASHYEKLKGSPEDNEQKQLFVEQHKHYLDEIIEQISEFSKRVILADANLDKVLSAYNKHRDKPIREQAENIIHLFTLTNLGAPAAFKYFDTTIDRKRYTSTKEVLDATLIHQSITGLYETRIDLSQLGGDGGGSSGGGGGVQEISDSRPMLHIYLNGRRFLGLLDTGADKTCIAGRDWPANWPIHQTESSLQGLGMACGVARSSQPLRWQHEDKSGIIHPFVIPTLPFTLWGRDIMKDIKVRLMTDSPDDSQDLMIGAIESNLFADQISWKSDQPVWLNQWPLKQEKLQALQQLVTEQLQLGHLEESNSPWNTPVFVIKKKSGKWRLLQDLRAVNATMHDMGALQPGLPSPVAVPKGWEIIIIDLQDCFFNIKLHPEDCKRFAFSVPSPNFKRPYQRFQWKVLPQGMKNSPTLCQKFVDKAILTVRDKYQDSYIVHYMDDILLAHPSRSIVDEILTSMIQALNKHGLVVSTEKIQKYDNLKYLGTHIQGDSVSYQKLQIRTDKLRTLNDFQKLLGNINWIRPFLKLTTGELKPLFEILNPDSNPISTRKLTPEACKALQLMNERLSTARVKRLDLSQPWSLCILKTEYTPTACLWQDGVVEWIHLPHISPKVITPYDIFCTQLIIKGRHRSKELFSKDPDYIVVPYTKVQFDLLLQEKEDWPISLLGFLGEVHFHLPKDPLLTFTLQTAIIFPHMTSTTPLEKGIVIFTDGSANGRSVTYIQGREPIIKENTQNTAQQAEIVAVITAFEEVSQPFNLYTDSKYVTGLFPEIETATLSPRTKIYTELKHLQRLIHKRQEKFYIGHIRGHTGLPGPLAQGNAYADSLTRILTAAGKRTADGSEFEKRTADGSEFESPKKKAKVE

SEQ ID NO: 31 - protein, 2114 aa, synthetic construct
MPAAKRVKLDGGDKKYSIGLDIGTNSVGWAVITDEYKVPSKKFKVLGNTDRHSIKKNLIGALLFDSGETAEATRLKRTARRRYTRRKNRICYLQEIFSNEMAKVDDSFFHRLEESFLVEEDKKHERHPIFGNIVDEVAYHEKYPTIYHLRKKLVDSTDKADLRLIYLALAHMIKFRGHFLIEGDLNPDNSDVDKLFIQLVQTYNQLFEENPINASGVDAKAILSARLSKSRRLENLIAQLPGEKKNGLFGNLIALSLGLTPNFKSNFDLAEDAKLQLSKDTYDDDLDNLLAQIGDQYADLFLAAKNLSDAILLSDILRVNTEITKAPLSASMIKRYDEHHQDLTLLKALVRQQLPEKYKEIFFDQSKNGYAGYIDGGASQEEFYKFIKPILEKMDGTEELLVKLNREDLLRKQRTFDNGSIPHQIHLGELHAILRRQEDFYPFLKDNREKIEKILTFRIPYYVGPLARGNSRFAWMTRKSEETITPWNFEEVVDKGASAQSFIERMTNFDKNLPNEKVLPKHSLLYEYFTVYNELTKVKYVTEGMRKPAFLSGEQKKAIVDLLFKTNRKVTVKQLKEDYFKKIECFDSVEISGVEDRFNASLGTYHDLLKIIKDKDFLDNEENEDILEDIVLTLTLFEDREMIEERLKTYAHLFDDKVMKQLKRRRYTGWGRLSRKLINGIRDKQSGKTILDFLKSDGFANRNFMQLIHDDSLTFKEDIQKAQVSGQGDSLHEHIANLAGSPAIKKGILQTVKVVDELVKVMGRHKPENIVIEMARENQTTQKGQKNSRERMKRIEEGIKELGSQILKEHPVENTQLQNEKLYLYYLQNGRDMYVDQELDINRLSDYDVDHIVPQSFLKDDSIDNKVLTRSDKARGKSDNVPSEEVVKKMKNYWRQLLNAKLITQRKFDNLTKAERGGLSELDKAGFIKRQLVETRQITKHVAQILDSRMNTKYDENDKLIREVKVITLKSKLVSDFRKDFQFYKVREINNYHHAHDAYLNAVVGTALIKKYPKLESEFVYGDYKVYDVRKMIAKSEQEIGKATAKYFFYSNIMNFFKTEITLANGEIRKRPLIETNGETGEIVWDKGRDFATVRKVLSMPQVNIVKKTEVQTGGFSKESILPKRNSDKLIARKKDWDPKKYGGFDSPTVAYSVLVVAKVEKGKSKKLKSVKELLGITIMERSSFEKNPIDFLEAKGYKEVKKDLIIKLPKYSLFELENGRKRMLASAGELQKGNELALPSKYVNFLYLASHYEKLKGSPEDNEQKQLFVEQHKHYLDEIIEQISEFSKRVILADANLDKVLSAYNKHRDKPIREQAENIIHLFTLTNLGAPAAFKYFDTTIDRKRYTSTKEVLDATLIHQSITGLYETRIDLSQLGGDGGGGGPAPGSSGGVQEISDSRPMLHIYLNGRRFLGLLDTGADKTCIAGRDWPANWPIHQTESSLQGLGMACGVARSSQPLRWQHEDKSGIIHPFVIPTLPFTLWGRDIMKDIKVRLMTDSPDDSQDLMIGAIESNLFADQISWKSDQPVWLNQWPLKQEKLQALQQLVTEQLQLGHLEESNSPWNTPVFVIKKKSGKWRLLQDLRAVNATMHDMGALQPGLPSPVAVPKGWEIIIIDLQDCFFNIKLHPEDCKRFAFSVPSPNFKRPYQRFQWKVLPQGMKNSPTLCQKFVDKAILTVRDKYQDSYIVHYMDDILLAHPSRSIVDEILTSMIQALNKHGLVVSTEKIQKYDNLKYLGTHIQGDSVSYQKLQIRTDKLRTLNDFQKLLGNINWIRPFLKLTTGELKPLFEILNPDSNPISTRKLTPEACKALQLMNERLSTARVKRLDLSQPWSLCILKTEYTPTACLWQDGVVEWIHLPHISPKVITPYDIFCTQLIIKGRHRSKELFSKDPDYIVVPYTKVQFDLLLQEKEDWPISLLGFLGEVHFHLPKDPLLTFTLQTAIIFPHMTSTTPLEKGIVIFTDGSANGRSVTYIQGREPIIKENTQNTAQQAEIVAVITAFEEVSQPFNLYTDSKYVTGLFPEIETATLSPRTKIYTELKHLQRLIHKRQEKFYIGHIRGHTGLPGPLAQGNAYADSLTRILTAAGKRTADGSEFEKRTADGSEFESPKKKAKVE

SEQ ID NO: 32 - protein, 2010 aa, synthetic construct
MPAAKRVKLDGGDKKYSIGLDIGTNSVGWAVITDEYKVPSKKFKVLGNTDRHSIKKNLIGALLFDSGETAEATRLKRTARRRYTRRKNRICYLQEIFSNEMAKVDDSFFHRLEESFLVEEDKKHERHPIFGNIVDEVAYHEKYPTIYHLRKKLVDSTDKADLRLIYLALAHMIKFRGHFLIEGDLNPDNSDVDKLFIQLVQTYNQLFEENPINASGVDAKAILSARLSKSRRLENLIAQLPGEKKNGLFGNLIALSLGLTPNFKSNFDLAEDAKLQLSKDTYDDDLDNLLAQIGDQYADLFLAAKNLSDAILLSDILRVNTEITKAPLSASMIKRYDEHHQDLTLLKALVRQQLPEKYKEIFFDQSKNGYAGYIDGGASQEEFYKFIKPILEKMDGTEELLVKLNREDLLRKQRTFDNGSIPHQIHLGELHAILRRQEDFYPFLKDNREKIEKILTFRIPYYVGPLARGNSRFAWMTRKSEETITPWNFEEVVDKGASAQSFIERMTNFDKNLPNEKVLPKHSLLYEYFTVYNELTKVKYVTEGMRKPAFLSGEQKKAIVDLLFKTNRKVTVKQLKEDYFKKIECFDSVEISGVEDRFNASLGTYHDLLKIIKDKDFLDNEENEDILEDIVLTLTLFEDREMIEERLKTYAHLFDDKVMKQLKRRRYTGWGRLSRKLINGIRDKQSGKTILDFLKSDGFANRNFMQLIHDDSLTFKEDIQKAQVSGQGDSLHEHIANLAGSPAIKKGILQTVKVVDELVKVMGRHKPENIVIEMARENQTTQKGQKNSRERMKRIEEGIKELGSQILKEHPVENTQLQNEKLYLYYLQNGRDMYVDQELDINRLSDYDVDHIVPQSFLKDDSIDNKVLTRSDKARGKSDNVPSEEVVKKMKNYWRQLLNAKLITQRKFDNLTKAERGGLSELDKAGFIKRQLVETRQITKHVAQILDSRMNTKYDENDKLIREVKVITLKSKLVSDFRKDFQFYKVREINNYHHAHDAYLNAVVGTALIKKYPKLESEFVYGDYKVYDVRKMIAKSEQEIGKATAKYFFYSNIMNFFKTEITLANGEIRKRPLIETNGETGEIVWDKGRDFATVRKVLSMPQVNIVKKTEVQTGGFSKESILPKRNSDKLIARKKDWDPKKYGGFDSPTVAYSVLVVAKVEKGKSKKLKSVKELLGITIMERSSFEKNPIDFLEAKGYKEVKKDLIIKLPKYSLFELENGRKRMLASAGELQKGNELALPSKYVNFLYLASHYEKLKGSPEDNEQKQLFVEQHKHYLDEIIEQISEFSKRVILADANLDKVLSAYNKHRDKPIREQAENIIHLFTLTNLGAPAAFKYFDTTIDRKRYTSTKEVLDATLIHQSITGLYETRIDLSQLGGDGGGGGEAAAKGSSGGLTAAIDILAPQQCAEPITWKSDEPVWVDQWPLTNDKLAAAQQLVQEQLEAGHITESSSPWNTPIFVIKKKSGKWRLLQDLRAVNATMVLMGALQPGLPSPVAIPQGYLKIIIDLKDCFFSIPLHPSDQKRFAFSLPSTNFKEPMQRFQWKVLPQGMANSPTLCQKYVATAIHKVRHAWKQMYIIHYMDDILIAGKDGQQVLQCFDQLKQELTAAGLHIAPEKVQLQDPYTYLGFELNGPKITNQKAVIRKDKLQTLNDFQKLLGDINWLRPYLKLTTGDLKPLFDTLKGDSDPNSHRSLSKEALASLEKVETAIAEQFVTHINYSLPLIFLIFNTALTPTGLFWQDNPIMWIHLPASPKKVLLPYYDAIADLIILGRDHSKKYFGIEPSTIIQPYSKSQIDWLMQNTEMWPIACASFVGILDNHYPPNKLIQFCKLHTFVFPQIISKTPLNNALLVFTDGSSTGMAAYTLTDTTIKFQTNLNSAQLVELQALIAVLSAFPNQPLNIYTDSAYLAHSIPLLETVAQIKHISETAKLFLQCQQLIYNRSIPFYIGHVRAHSGLPGPIAQGNQRADLATKIVASNINTAGKRTADGSEFEKRTADGSEFESPKKKAKVE

SEQ ID NO: 33 - protein, 2008 aa, synthetic construct
MPAAKRVKLDGGDKKYSIGLDIGTNSVGWAVITDEYKVPSKKFKVLGNTDRHSIKKNLIGALLFDSGETAEATRLKRTARRRYTRRKNRICYLQEIFSNEMAKVDDSFFHRLEESFLVEEDKKHERHPIFGNIVDEVAYHEKYPTIYHLRKKLVDSTDKADLRLIYLALAHMIKFRGHFLIEGDLNPDNSDVDKLFIQLVQTYNQLFEENPINASGVDAKAILSARLSKSRRLENLIAQLPGEKKNGLFGNLIALSLGLTPNFKSNFDLAEDAKLQLSKDTYDDDLDNLLAQIGDQYADLFLAAKNLSDAILLSDILRVNTEITKAPLSASMIKRYDEHHQDLTLLKALVRQQLPEKYKEIFFDQSKNGYAGYIDGGASQEEFYKFIKPILEKMDGTEELLVKLNREDLLRKQRTFDNGSIPHQIHLGELHAILRRQEDFYPFLKDNREKIEKILTFRIPYYVGPLARGNSRFAWMTRKSEETITPWNFEEVVDKGASAQSFIERMTNFDKNLPNEKVLPKHSLLYEYFTVYNELTKVKYVTEGMRKPAFLSGEQKKAIVDLLFKTNRKVTVKQLKEDYFKKIECFDSVEISGVEDRFNASLGTYHDLLKIIKDKDFLDNEENEDILEDIVLTLTLFEDREMIEERLKTYAHLFDDKVMKQLKRRRYTGWGRLSRKLINGIRDKQSGKTILDFLKSDGFANRNFMQLIHDDSLTFKEDIQKAQVSGQGDSLHEHIANLAGSPAIKKGILQTVKVVDELVKVMGRHKPENIVIEMARENQTTQKGQKNSRERMKRIEEGIKELGSQILKEHPVENTQLQNEKLYLYYLQNGRDMYVDQELDINRLSDYDVDHIVPQSFLKDDSIDNKVLTRSDKARGKSDNVPSEEVVKKMKNYWRQLLNAKLITQRKFDNLTKAERGGLSELDKAGFIKRQLVETRQITKHVAQILDSRMNTKYDENDKLIREVKVITLKSKLVSDFRKDFQFYKVREINNYHHAHDAYLNAVVGTALIKKYPKLESEFVYGDYKVYDVRKMIAKSEQEIGKATAKYFFYSNIMNFFKTEITLANGEIRKRPLIETNGETGEIVWDKGRDFATVRKVLSMPQVNIVKKTEVQTGGFSKESILPKRNSDKLIARKKDWDPKKYGGFDSPTVAYSVLVVAKVEKGKSKKLKSVKELLGITIMERSSFEKNPIDFLEAKGYKEVKKDLIIKLPKYSLFELENGRKRMLASAGELQKGNELALPSKYVNFLYLASHYEKLKGSPEDNEQKQLFVEQHKHYLDEIIEQISEFSKRVILADANLDKVLSAYNKHRDKPIREQAENIIHLFTLTNLGAPAAFKYFDTTIDRKRYTSTKEVLDATLIHQSITGLYETRIDLSQLGGDGGGSSPAPGGGGGLTAAIDILAPQQCAEPITWKSDEPVWVDQWPLTNDKLAAAQQLVQEQLEAGHITESSSPWNTPIFVIKKKSGKWRLLQDLRAVNATMVLMGALQPGLPSPVAPPQGYLKIIIDLKDCFFSIPLHPSDQKRFAFSLPSTNFKEPMQRFQWKVLPQGMANSPTLCQKYVATAIHKVRHAWKQMYIIHYMDDILIAGKDGQQVLQCFDQLKQELTAAGLHIAPEKVQLQDPYTYLGFELNGPKITNQKAVIRKDKLQTLNDFQKLLGDINWLRPYLKLTTGDLKPLFDTLKPDSDPNSHRSLSKEALASLEKVETAIAEQFVTHINYSLPLIFLIFNTALTPTGLFWQDNPIMWIHLPASPKKVLLPYYDAIADLIILGRDHSKKYFGIEPSTIIQPYSKSQIDWLMQNTEMWPIACASFVGILDNHYPPNKLIQFCKLHTFVFPQIISKTPLNNALLVFTDGSSTGMAAYTLTDTTIKFQTNLNSAQLVELQALIAVLSAFPNQPLNIYTDSAYLAHSIPLLETVAQIKHISETAKLFLQCQQLIYNRSIPFYIGHVRAHSGLPGPIAQGNQRADLATKIVASNINTAGKRTADGSEFEKRTADGSEFESPKKKAKVE

SEQ ID NO: 34 - protein, 2085 aa, synthetic construct
MPAAKRVKLDGGDKKYSIGLDIGTNSVGWAVITDEYKVPSKKFKVLGNTDRHSIKKNLIGALLFDSGETAEATRLKRTARRRYTRRKNRICYLQEIFSNEMAKVDDSFFHRLEESFLVEEDKKHERHPIFGNIVDEVAYHEKYPTIYHLRKKLVDSTDKADLRLIYLALAHMIKFRGHFLIEGDLNPDNSDVDKLFIQLVQTYNQLFEENPINASGVDAKAILSARLSKSRRLENLIAQLPGEKKNGLFGNLIALSLGLTPNFKSNFDLAEDAKLQLSKDTYDDDLDNLLAQIGDQYADLFLAAKNLSDAILLSDILRVNTEITKAPLSASMIKRYDEHHQDLTLLKALVRQQLPEKYKEIFFDQSKNGYAGYIDGGASQEEFYKFIKPILEKMDGTEELLVKLNREDLLRKQRTFDNGSIPHQIHLGELHAILRRQEDFYPFLKDNREKIEKILTFRIPYYVGPLARGNSRFAWMTRKSEETITPWNFEEVVDKGASAQSFIERMTNFDKNLPNEKVLPKHSLLYEYFTVYNELTKVKYVTEGMRKPAFLSGEQKKAIVDLLFKTNRKVTVKQLKEDYFKKIECFDSVEISGVEDRFNASLGTYHDLLKIIKDKDFLDNEENEDILEDIVLTLTLFEDREMIEERLKTYAHLFDDKVMKQLKRRRYTGWGRLSRKLINGIRDKQSGKTILDFLKSDGFANRNFMQLIHDDSLTFKEDIQKAQVSGQGDSLHEHIANLAGSPAIKKGILQTVKVVDELVKVMGRHKPENIVIEMARENQTTQKGQKNSRERMKRIEEGIKELGSQILKEHPVENTQLQNEKLYLYYLQNGRDMYVDQELDINRLSDYDVDHIVPQSFLKDDSIDNKVLTRSDKARGKSDNVPSEEVVKKMKNYWRQLLNAKLITQRKFDNLTKAERGGLSELDKAGFIKRQLVETRQITKHVAQILDSRMNTKYDENDKLIREVKVITLKSKLVSDFRKDFQFYKVREINNYHHAHDAYLNAVVGTALIKKYPKLESEFVYGDYKVYDVRKMIAKSEQEIGKATAKYFFYSNIMNFFKTEITLANGEIRKRPLIETNGETGEIVWDKGRDFATVRKVLSMPQVNIVKKTEVQTGGFSKESILPKRNSDKLIARKKDWDPKKYGGFDSPTVAYSVLVVAKVEKGKSKKLKSVKELLGITIMERSSFEKNPIDFLEAKGYKEVKKDLIIKLPKYSLFELENGRKRMLASAGELQKGNELALPSKYVNFLYLASHYEKLKGSPEDNEQKQLFVEQHKHYLDEIIEQISEFSKRVILADANLDKVLSAYNKHRDKPIREQAENIIHLFTLTNLGAPAAFKYFDTTIDRKRYTSTKEVLDATLIHQSITGLYETRIDLSQLGGDGGEAAAKGSSGGLDDEYRLYSPLVKPDQNIQFWLEQFPQAWAETAGMGLAKQVPPQVIQLKASATPVSVRQYPLSKEAQEGIRPHVQRLIQQGILVPVQSPWNTPLLPVRKPGTNDYRPVQDLREVNKRVQDIHPTVPNPYNLLCALPPQRSWYTVLDLKDAFFCLRLHPTSQPLFAFEWRDPGTGRTGQLTWTRLPQGFKNSPTIFNEALHRDLANFRIQHPQVTLLQYVDDLLLAGATKQDCLEGTKALLLELSDLGYRASAKKAQICRREVTYLGYSLRDGQRWLTEARKKTVVQIPAPTTAKQVREFLGKAGFCRLFIPGFATLAAPLYPLTKPKGEFSWAPEHQKAFDAIKKALLSAPALALPDVTKPFTLYVDERKGVARGVLTQTLGPWRRPVAYLSKKLDPVASGWPVCLKAIAAVAILVKDADKLTLGQNITVIAPHALENIVRQPPDRWMTNARMTHYQSLLLTERVTFAPPAALNPATLLPEETDEPVTHDCHQLLIEETGVRKDLTDIPLTGEVLTWFTDGSSYVVEGKRMAGAAVVDGTRTIWASSLPEGTSAQKAELMALTQALRLAEGKSINIYTDSRYAFATAHVHGAIYKQRGWLTSAGREIKNKEEILSLLEALHLPKRLAIIHCPGHQKAKDPISRGNQMADRVAKQAAQGVNLLPAGKRTADGSEFEKRTADGSEFESPKKKAKVE

SEQ ID NO: 35 - protein, 2088 aa, synthetic construct
MPAAKRVKLDGGDKKYSIGLDIGTNSVGWAVITDEYKVPSKKFKVLGNTDRHSIKKNLIGALLFDSGETAEATRLKRTARRRYTRRKNRICYLQEIFSNEMAKVDDSFFHRLEESFLVEEDKKHERHPIFGNIVDEVAYHEKYPTIYHLRKKLVDSTDKADLRLIYLALAHMIKFRGHFLIEGDLNPDNSDVDKLFIQLVQTYNQLFEENPINASGVDAKAILSARLSKSRRLENLIAQLPGEKKNGLFGNLIALSLGLTPNFKSNFDLAEDAKLQLSKDTYDDDLDNLLAQIGDQYADLFLAAKNLSDAILLSDILRVNTEITKAPLSASMIKRYDEHHQDLTLLKALVRQQLPEKYKEIFFDQSKNGYAGYIDGGASQEEFYKFIKPILEKMDGTEELLVKLNREDLLRKQRTFDNGSIPHQIHLGELHAILRRQEDFYPFLKDNREKIEKILTFRIPYYVGPLARGNSRFAWMTRKSEETITPWNFEEVVDKGASAQSFIERMTNFDKNLPNEKVLPKHSLLYEYFTVYNELTKVKYVTEGMRKPAFLSGEQKKAIVDLLFKTNRKVTVKQLKEDYFKKIECFDSVEISGVEDRFNASLGTYHDLLKIIKDKDFLDNEENEDILEDIVLTLTLFEDREMIEERLKTYAHLFDDKVMKQLKRRRYTGWGRLSRKLINGIRDKQSGKTILDFLKSDGFANRNFMQLIHDDSLTFKEDIQKAQVSGQGDSLHEHIANLAGSPAIKKGILQTVKVVDELVKVMGRHKPENIVIEMARENQTTQKGQKNSRERMKRIEEGIKELGSQILKEHPVENTQLQNEKLYLYYLQNGRDMYVDQELDINRLSDYDVDHIVPQSFLKDDSIDNKVLTRSDKARGKSDNVPSEEVVKKMKNYWRQLLNAKLITQRKFDNLTKAERGGLSELDKAGFIKRQLVETRQITKHVAQILDSRMNTKYDENDKLIREVKVITLKSKLVSDFRKDFQFYKVREINNYHHAHDAYLNAVVGTALIKKYPKLESEFVYGDYKVYDVRKMIAKSEQEIGKATAKYFFYSNIMNFFKTEITLANGEIRKRPLIETNGETGEIVWDKGRDFATVRKVLSMPQVNIVKKTEVQTGGFSKESILPKRNSDKLIARKKDWDPKKYGGFDSPTVAYSVLVVAKVEKGKSKKLKSVKELLGITIMERSSFEKNPIDFLEAKGYKEVKKDLIIKLPKYSLFELENGRKRMLASAGELQKGNELALPSKYVNFLYLASHYEKLKGSPEDNEQKQLFVEQHKHYLDEIIEQISEFSKRVILADANLDKVLSAYNKHRDKPIREQAENIIHLFTLTNLGAPAAFKYFDTTIDRKRYTSTKEVLDATLIHQSITGLYETRIDLSQLGGDGGEAAAKGGSPAPGGLDDEYRLYSPLVKPDQNIQFWLEQFPQAWAETAGMGLAKQVPPQVIQLKASATPVSVRQYPLSKEAQEGIRPHVQRLIQQGILVPVQSPWNTPLLPVRKPGTNDYRPVQDLREVNKRVQDIHPTVPNPYNLLCALPPQRSWYTVLDLKDAFFCLRLHPTSQPLFAFEWRDPGTGRTGQLTWTRLPQGFKNSPTIFNEALHRDLANFRIQHPQVTLLQYVDDLLLAGATKQDCLEGTKALLLELSDLGYRASAKKAQICRREVTYLGYSLRDGQRWLTEARKKTVVQIPAPTTAKQVREFLGKAGFCRLFIPGFATLAAPLYPLTKPKGEFSWAPEHQKAFDAIKKALLSAPALALPDVTKPFTLYVDERKGVARGVLTQTLGPWRRPVAYLSKKLDPVASGWPVCLKAIAAVAILVKDADKLTLGQNITVIAPHALENIVRQPPDRWMTNARMTHYQSLLLTERVTFAPPAALNPATLLPEETDEPVTHDCHQLLIEETGVRKDLTDIPLTGEVLTWFTDGSSYVVEGKRMAGAAVVDGTRTIWASSLPEGTSAQKAELMALTQALRLAEGKSINIYTDSRYAFATAHVHGAIYKQRGWLTSAGREIKNKEEILSLLEALHLPKRLAIIHCPGHQKAKDPISRGNQMADRVAKQAAQGVNLLPAGKRTADGSEFEKRTADGSEFESPKKKAKVE

SEQ ID NO: 36 - protein, 2123 aa, synthetic construct
MPAAKRVKLDGGDKKYSIGLDIGTNSVGWAVITDEYKVPSKKFKVLGNTDRHSIKKNLIGALLFDSGETAEATRLKRTARRRYTRRKNRICYLQEIFSNEMAKVDDSFFHRLEESFLVEEDKKHERHPIFGNIVDEVAYHEKYPTIYHLRKKLVDSTDKADLRLIYLALAHMIKFRGHFLIEGDLNPDNSDVDKLFIQLVQTYNQLFEENPINASGVDAKAILSARLSKSRRLENLIAQLPGEKKNGLFGNLIALSLGLTPNFKSNFDLAEDAKLQLSKDTYDDDLDNLLAQIGDQYADLFLAAKNLSDAILLSDILRVNTEITKAPLSASMIKRYDEHHQDLTLLKALVRQQLPEKYKEIFFDQSKNGYAGYIDGGASQEEFYKFIKPILEKMDGTEELLVKLNREDLLRKQRTFDNGSIPHQIHLGELHAILRRQEDFYPFLKDNREKIEKILTFRIPYYVGPLARGNSRFAWMTRKSEETITPWNFEEVVDKGASAQSFIERMTNFDKNLPNEKVLPKHSLLYEYFTVYNELTKVKYVTEGMRKPAFLSGEQKKAIVDLLFKTNRKVTVKQLKEDYFKKIECFDSVEISGVEDRFNASLGTYHDLLKIIKDKDFLDNEENEDILEDIVLTLTLFEDREMIEERLKTYAHLFDDKVMKQLKRRRYTGWGRLSRKLINGIRDKQSGKTILDFLKSDGFANRNFMQLIHDDSLTFKEDIQKAQVSGQGDSLHEHIANLAGSPAIKKGILQTVKVVDELVKVMGRHKPENIVIEMARENQTTQKGQKNSRERMKRIEEGIKELGSQILKEHPVENTQLQNEKLYLYYLQNGRDMYVDQELDINRLSDYDVDHIVPQSFLKDDSIDNKVLTRSDKARGKSDNVPSEEVVKKMKNYWRQLLNAKLITQRKFDNLTKAERGGLSELDKAGFIKRQLVETRQITKHVAQILDSRMNTKYDENDKLIREVKVITLKSKLVSDFRKDFQFYKVREINNYHHAHDAYLNAVVGTALIKKYPKLESEFVYGDYKVYDVRKMIAKSEQEIGKATAKYFFYSNIMNFFKTEITLANGEIRKRPLIETNGETGEIVWDKGRDFATVRKVLSMPQVNIVKKTEVQTGGFSKESILPKRNSDKLIARKKDWDPKKYGGFDSPTVAYSVLVVAKVEKGKSKKLKSVKELLGITIMERSSFEKNPIDFLEAKGYKEVKKDLIIKLPKYSLFELENGRKRMLASAGELQKGNELALPSKYVNFLYLASHYEKLKGSPEDNEQKQLFVEQHKHYLDEIIEQISEFSKRVILADANLDKVLSAYNKHRDKPIREQAENIIHLFTLTNLGAPAAFKYFDTTIDRKRYTSTKEVLDATLIHQSITGLYETRIDLSQLGGDGGAEAAAKEAAAKEAAAKEAAAKALEAEAAAKEAAAKEAAAKEAAAKAGGLDDEYRLYSPLVKPDQNIQFWLEQFPQAWAETAGMGLAKQVPPQVIQLKASATPVSVRQYPLSKEAQEGIRPHVQRLIQQGILVPVQSPWNTPLLPVRKPGTNDYRPVQDLREVNKRVQDIHPTVPNPYNLLCALPPQRSWYTVLDLKDAFFCLRLHPTSQPLFAFEWRDPGTGRTGQLTWTRLPQGFKNSPTIFNEALHRDLANFRIQHPQVTLLQYVDDLLLAGATKQDCLEGTKALLLELSDLGYRASAKKAQICRREVTYLGYSLRDGQRWLTEARKKTVVQIPAPTTAKQVREFLGKAGFCRLFIPGFATLAAPLYPLTKPKGEFSWAPEHQKAFDAIKKALLSAPALALPDVTKPFTLYVDERKGVARGVLTQTLGPWRRPVAYLSKKLDPVASGWPVCLKAIAAVAILVKDADKLTLGQNITVIAPHALENIVRQPPDRWMTNARMTHYQSLLLTERVTFAPPAALNPATLLPEETDEPVTHDCHQLLIEETGVRKDLTDIPLTGEVLTWFTDGSSYVVEGKRMAGAAVVDGTRTIWASSLPEGTSAQKAELMALTQALRLAEGKSINIYTDSRYAFATAHVHGAIYKQRGWLTSAGREIKNKEEILSLLEALHLPKRLAIIHCPGHQKAKDPISRGNQMADRVAKQAAQGVNLLPAGKRTADGSEFEKRTADGSEFESPKKKAKVE

SEQ ID NO: 37 - protein, 2092 aa, synthetic construct
MPAAKRVKLDGGDKKYSIGLDIGTNSVGWAVITDEYKVPSKKFKVLGNTDRHSIKKNLIGALLFDSGETAEATRLKRTARRRYTRRKNRICYLQEIFSNEMAKVDDSFFHRLEESFLVEEDKKHERHPIFGNIVDEVAYHEKYPTIYHLRKKLVDSTDKADLRLIYLALAHMIKFRGHFLIEGDLNPDNSDVDKLFIQLVQTYNQLFEENPINASGVDAKAILSARLSKSRRLENLIAQLPGEKKNGLFGNLIALSLGLTPNFKSNFDLAEDAKLQLSKDTYDDDLDNLLAQIGDQYADLFLAAKNLSDAILLSDILRVNTEITKAPLSASMIKRYDEHHQDLTLLKALVRQQLPEKYKEIFFDQSKNGYAGYIDGGASQEEFYKFIKPILEKMDGTEELLVKLNREDLLRKQRTFDNGSIPHQIHLGELHAILRRQEDFYPFLKDNREKIEKILTFRIPYYVGPLARGNSRFAWMTRKSEETITPWNFEEVVDKGASAQSFIERMTNFDKNLPNEKVLPKHSLLYEYFTVYNELTKVKYVTEGMRKPAFLSGEQKKAIVDLLFKTNRKVTVKQLKEDYFKKIECFDSVEISGVEDRFNASLGTYHDLLKIIKDKDFLDNEENEDILEDIVLTLTLFEDREMIEERLKTYAHLFDDKVMKQLKRRRYTGWGRLSRKLINGIRDKQSGKTILDFLKSDGFANRNFMQLIHDDSLTFKEDIQKAQVSGQGDSLHEHIANLAGSPAIKKGILQTVKVVDELVKVMGRHKPENIVIEMARENQTTQKGQKNSRERMKRIEEGIKELGSQILKEHPVENTQLQNEKLYLYYLQNGRDMYVDQELDINRLSDYDVDHIVPQSFLKDDSIDNKVLTRSDKARGKSDNVPSEEVVKKMKNYWRQLLNAKLITQRKFDNLTKAERGGLSELDKAGFIKRQLVETRQITKHVAQILDSRMNTKYDENDKLIREVKVITLKSKLVSDFRKDFQFYKVREINNYHHAHDAYLNAVVGTALIKKYPKLESEFVYGDYKVYDVRKMIAKSEQEIGKATAKYFFYSNIMNFFKTEITLANGEIRKRPLIETNGETGEIVWDKGRDFATVRKVLSMPQVNIVKKTEVQTGGFSKESILPKRNSDKLIARKKDWDPKKYGGFDSPTVAYSVLVVAKVEKGKSKKLKSVKELLGITIMERSSFEKNPIDFLEAKGYKEVKKDLIIKLPKYSLFELENGRKRMLASAGELQKGNELALPSKYVNFLYLASHYEKLKGSPEDNEQKQLFVEQHKHYLDEIIEQISEFSKRVILADANLDKVLSAYNKHRDKPIREQAENIIHLFTLTNLGAPAAFKYFDTTIDRKRYTSTKEVLDATLIHQSITGLYETRIDLSQLGGDGGEAAAKEAAAKEAAAKGGLDDEYRLYSPLVKPDQNIQFWLEQFPQAWAETAGMGLAKQVPPQVIQLKASATPVSVRQYPLSKEAQEGIRPHVQRLIQQGILVPVQSPWNTPLLPVRKPGTNDYRPVQDLREVNKRVQDIHPTVPNPYNLLCALPPQRSWYTVLDLKDAFFCLRLHPTSQPLFAFEWRDPGTGRTGQLTWTRLPQGFKNSPTIFNEALHRDLANFRIQHPQVTLLQYVDDLLLAGATKQDCLEGTKALLLELSDLGYRASAKKAQICRREVTYLGYSLRDGQRWLTEARKKTVVQIPAPTTAKQVREFLGKAGFCRLFIPGFATLAAPLYPLTKPKGEFSWAPEHQKAFDAIKKALLSAPALALPDVTKPFTLYVDERKGVARGVLTQTLGPWRRPVAYLSKKLDPVASGWPVCLKAIAAVAILVKDADKLTLGQNITVIAPHALENIVRQPPDRWMTNARMTHYQSLLLTERVTFAPPAALNPATLLPEETDEPVTHDCHQLLIEETGVRKDLTDIPLTGEVLTWFTDGSSYVVEGKRMAGAAVVDGTRTIWASSLPEGTSAQKAELMALTQALRLAEGKSINIYTDSRYAFATAHVHGAIYKQRGWLTSAGREIKNKEEILSLLEALHLPKRLAIIHCPGHQKAKDPISRGNQMADRVAKQAAQGVNLLPAGKRTADGSEFEKRTADGSEFESPKKKAKVE

SEQ ID NO: 38 - protein, 2086 aa, synthetic construct
MPAAKRVKLDGGDKKYSIGLDIGTNSVGWAVITDEYKVPSKKFKVLGNTDRHSIKKNLIGALLFDSGETAEATRLKRTARRRYTRRKNRICYLQEIFSNEMAKVDDSFFHRLEESFLVEEDKKHERHPIFGNIVDEVAYHEKYPTIYHLRKKLVDSTDKADLRLIYLALAHMIKFRGHFLIEGDLNPDNSDVDKLFIQLVQTYNQLFEENPINASGVDAKAILSARLSKSRRLENLIAQLPGEKKNGLFGNLIALSLGLTPNFKSNFDLAEDAKLQLSKDTYDDDLDNLLAQIGDQYADLFLAAKNLSDAILLSDILRVNTEITKAPLSASMIKRYDEHHQDLTLLKALVRQQLPEKYKEIFFDQSKNGYAGYIDGGASQEEFYKFIKPILEKMDGTEELLVKLNREDLLRKQRTFDNGSIPHQIHLGELHAILRRQEDFYPFLKDNREKIEKILTFRIPYYVGPLARGNSRFAWMTRKSEETITPWNFEEVVDKGASAQSFIERMTNFDKNLPNEKVLPKHSLLYEYFTVYNELTKVKYVTEGMRKPAFLSGEQKKAIVDLLFKTNRKVTVKQLKEDYFKKIECFDSVEISGVEDRFNASLGTYHDLLKIIKDKDFLDNEENEDILEDIVLTLTLFEDREMIEERLKTYAHLFDDKVMKQLKRRRYTGWGRLSRKLINGIRDKQSGKTILDFLKSDGFANRNFMQLIHDDSLTFKEDIQKAQVSGQGDSLHEHIANLAGSPAIKKGILQTVKVVDELVKVMGRHKPENIVIEMARENQTTQKGQKNSRERMKRIEEGIKELGSQILKEHPVENTQLQNEKLYLYYLQNGRDMYVDQELDINRLSDYDVDHIVPQSFLKDDSIDNKVLTRSDKARGKSDNVPSEEVVKKMKNYWRQLLNAKLITQRKFDNLTKAERGGLSELDKAGFIKRQLVETRQITKHVAQILDSRMNTKYDENDKLIREVKVITLKSKLVSDFRKDFQFYKVREINNYHHAHDAYLNAVVGTALIKKYPKLESEFVYGDYKVYDVRKMIAKSEQEIGKATAKYFFYSNIMNFFKTEITLANGEIRKRPLIETNGETGEIVWDKGRDFATVRKVLSMPQVNIVKKTEVQTGGFSKESILPKRNSDKLIARKKDWDPKKYGGFDSPTVAYSVLVVAKVEKGKSKKLKSVKELLGITIMERSSFEKNPIDFLEAKGYKEVKKDLIIKLPKYSLFELENGRKRMLASAGELQKGNELALPSKYVNFLYLASHYEKLKGSPEDNEQKQLFVEQHKHYLDEIIEQISEFSKRVILADANLDKVLSAYNKHRDKPIREQAENIIHLFTLTNLGAPAAFKYFDTTIDRKRYTSTKEVLDATLIHQSITGLYETRIDLSQLGGDGGGGSGSSPAPGGLDDEYRLYSPLVKPDQNIQFWLEQFPQAWAETAGMGLAKQVPPQVIQLKASATPVSVRQYPLSKEAQEGIRPHVQRLIQQGILVPVQSPWNTPLLPVRKPGTNDYRPVQDLREVNKRVQDIHPTVPNPYNLLCALPPQRSWYTVLDLKDAFFCLRLHPTSQPLFAFEWRDPGTGRTGQLTWTRLPQGFKNSPTIFNEALHRDLANFRIQHPQVTLLQYVDDLLLAGATKQDCLEGTKALLLELSDLGYRASAKKAQICRREVTYLGYSLRDGQRWLTEARKKTVVQIPAPTTAKQVREFLGKAGFCRLFIPGFATLAAPLYPLTKPKGEFSWAPEHQKAFDAIKKALLSAPALALPDVTKPFTLYVDERKGVARGVLTQTLGPWRRPVAYLSKKLDPVASGWPVCLKAIAAVAILVKDADKLTLGQNITVIAPHALENIVRQPPDRWMTNARMTHYQSLLLTERVTFAPPAALNPATLLPEETDEPVTHDCHQLLIEETGVRKDLTDIPLTGEVLTWFTDGSSYVVEGKRMAGAAVVDGTRTIWASSLPEGTSAQKAELMALTQALRLAEGKSINIYTDSRYAFATAHVHGAIYKQRGWLTSAGREIKNKEEILSLLEALHLPKRLAIIHCPGHQKAKDPISRGNQMADRVAKQAAQGVNLLPAGKRTADGSEFEKRTADGSEFESPKKKAKVE

SEQ ID NO: 39 - protein, 2102 aa, synthetic construct
MPAAKRVKLDGGDKKYSIGLDIGTNSVGWAVITDEYKVPSKKFKVLGNTDRHSIKKNLIGALLFDSGETAEATRLKRTARRRYTRRKNRICYLQEIFSNEMAKVDDSFFHRLEESFLVEEDKKHERHPIFGNIVDEVAYHEKYPTIYHLRKKLVDSTDKADLRLIYLALAHMIKFRGHFLIEGDLNPDNSDVDKLFIQLVQTYNQLFEENPINASGVDAKAILSARLSKSRRLENLIAQLPGEKKNGLFGNLIALSLGLTPNFKSNFDLAEDAKLQLSKDTYDDDLDNLLAQIGDQYADLFLAAKNLSDAILLSDILRVNTEITKAPLSASMIKRYDEHHQDLTLLKALVRQQLPEKYKEIFFDQSKNGYAGYIDGGASQEEFYKFIKPILEKMDGTEELLVKLNREDLLRKQRTFDNGSIPHQIHLGELHAILRRQEDFYPFLKDNREKIEKILTFRIPYYVGPLARGNSRFAWMTRKSEETITPWNFEEVVDKGASAQSFIERMTNFDKNLPNEKVLPKHSLLYEYFTVYNELTKVKYVTEGMRKPAFLSGEQKKAIVDLLFKTNRKVTVKQLKEDYFKKIECFDSVEISGVEDRFNASLGTYHDLLKIIKDKDFLDNEENEDILEDIVLTLTLFEDREMIEERLKTYAHLFDDKVMKQLKRRRYTGWGRLSRKLINGIRDKQSGKTILDFLKSDGFANRNFMQLIHDDSLTFKEDIQKAQVSGQGDSLHEHIANLAGSPAIKKGILQTVKVVDELVKVMGRHKPENIVIEMARENQTTQKGQKNSRERMKRIEEGIKELGSQILKEHPVENTQLQNEKLYLYYLQNGRDMYVDQELDINRLSDYDVDHIVPQSFLKDDSIDNKVLTRSDKARGKSDNVPSEEVVKKMKNYWRQLLNAKLITQRKFDNLTKAERGGLSELDKAGFIKRQLVETRQITKHVAQILDSRMNTKYDENDKLIREVKVITLKSKLVSDFRKDFQFYKVREINNYHHAHDAYLNAVVGTALIKKYPKLESEFVYGDYKVYDVRKMIAKSEQEIGKATAKYFFYSNIMNFFKTEITLANGEIRKRPLIETNGETGEIVWDKGRDFATVRKVLSMPQVNIVKKTEVQTGGFSKESILPKRNSDKLIARKKDWDPKKYGGFDSPTVAYSVLVVAKVEKGKSKKLKSVKELLGITIMERSSFEKNPIDFLEAKGYKEVKKDLIIKLPKYSLFELENGRKRMLASAGELQKGNELALPSKYVNFLYLASHYEKLKGSPEDNEQKQLFVEQHKHYLDEIIEQISEFSKRVILADANLDKVLSAYNKHRDKPIREQAENIIHLFTLTNLGAPAAFKYFDTTIDRKRYTSTKEVLDATLIHQSITGLYETRIDLSQLGGDGGEAAAKEAAAKEAAAKEAAAKEAAAKGGLDDEYRLYSPLVKPDQNIQFWLEQFPQAWAETAGMGLAKQVPPQVIQLKASATPVSVRQYPLSKEAQEGIRPHVQRLIQQGILVPVQSPWNTPLLPVRKPGTNDYRPVQDLREVNKRVQDIHPTVPNPYNLLCALPPQRSWYTVLDLKDAFFCLRLHPTSQPLFAFEWRDPGTGRTGQLTWTRLPQGFKNSPTIFNEALHRDLANFRIQHPQVTLLQYVDDLLLAGATKQDCLEGTKALLLELSDLGYRASAKKAQICRREVTYLGYSLRDGQRWLTEARKKTVVQIPAPTTAKQVREFLGKAGFCRLFIPGFATLAAPLYPLTKPKGEFSWAPEHQKAFDAIKKALLSAPALALPDVTKPFTLYVDERKGVARGVLTQTLGPWRRPVAYLSKKLDPVASGWPVCLKAIAAVAILVKDADKLTLGQNITVIAPHALENIVRQPPDRWMTNARMTHYQSLLLTERVTFAPPAALNPATLLPEETDEPVTHDCHQLLIEETGVRKDLTDIPLTGEVLTWFTDGSSYVVEGKRMAGAAVVDGTRTIWASSLPEGTSAQKAELMALTQALRLAEGKSINIYTDSRYAFATAHVHGAIYKQRGWLTSAGREIKNKEEILSLLEALHLPKRLAIIHCPGHQKAKDPISRGNQMADRVAKQAAQGVNLLPAGKRTADGSEFEKRTADGSEFESPKKKAKVE

SEQ ID NO: 40 - protein, 2088 aa, synthetic construct
MPAAKRVKLDGGDKKYSIGLDIGTNSVGWAVITDEYKVPSKKFKVLGNTDRHSIKKNLIGALLFDSGETAEATRLKRTARRRYTRRKNRICYLQEIFSNEMAKVDDSFFHRLEESFLVEEDKKHERHPIFGNIVDEVAYHEKYPTIYHLRKKLVDSTDKADLRLIYLALAHMIKFRGHFLIEGDLNPDNSDVDKLFIQLVQTYNQLFEENPINASGVDAKAILSARLSKSRRLENLIAQLPGEKKNGLFGNLIALSLGLTPNFKSNFDLAEDAKLQLSKDTYDDDLDNLLAQIGDQYADLFLAAKNLSDAILLSDILRVNTEITKAPLSASMIKRYDEHHQDLTLLKALVRQQLPEKYKEIFFDQSKNGYAGYIDGGASQEEFYKFIKPILEKMDGTEELLVKLNREDLLRKQRTFDNGSIPHQIHLGELHAILRRQEDFYPFLKDNREKIEKILTFRIPYYVGPLARGNSRFAWMTRKSEETITPWNFEEVVDKGASAQSFIERMTNFDKNLPNEKVLPKHSLLYEYFTVYNELTKVKYVTEGMRKPAFLSGEQKKAIVDLLFKTNRKVTVKQLKEDYFKKIECFDSVEISGVEDRFNASLGTYHDLLKIIKDKDFLDNEENEDILEDIVLTLTLFEDREMIEERLKTYAHLFDDKVMKQLKRRRYTGWGRLSRKLINGIRDKQSGKTILDFLKSDGFANRNFMQLIHDDSLTFKEDIQKAQVSGQGDSLHEHIANLAGSPAIKKGILQTVKVVDELVKVMGRHKPENIVIEMARENQTTQKGQKNSRERMKRIEEGIKELGSQILKEHPVENTQLQNEKLYLYYLQNGRDMYVDQELDINRLSDYDVDHIVPQSFLKDDSIDNKVLTRSDKARGKSDNVPSEEVVKKMKNYWRQLLNAKLITQRKFDNLTKAERGGLSELDKAGFIKRQLVETRQITKHVAQILDSRMNTKYDENDKLIREVKVITLKSKLVSDFRKDFQFYKVREINNYHHAHDAYLNAVVGTALIKKYPKLESEFVYGDYKVYDVRKMIAKSEQEIGKATAKYFFYSNIMNFFKTEITLANGEIRKRPLIETNGETGEIVWDKGRDFATVRKVLSMPQVNIVKKTEVQTGGFSKESILPKRNSDKLIARKKDWDPKKYGGFDSPTVAYSVLVVAKVEKGKSKKLKSVKELLGITIMERSSFEKNPIDFLEAKGYKEVKKDLIIKLPKYSLFELENGRKRMLASAGELQKGNELALPSKYVNFLYLASHYEKLKGSPEDNEQKQLFVEQHKHYLDEIIEQISEFSKRVILADANLDKVLSAYNKHRDKPIREQAENIIHLFTLTNLGAPAAFKYFDTTIDRKRYTSTKEVLDATLIHQSITGLYETRIDLSQLGGDGGGSSGGGEAAAKGGLDDEYRLYSPLVKPDQNIQFWLEQFPQAWAETAGMGLAKQVPPQVIQLKASATPVSVRQYPLSKEAQEGIRPHVQRLIQQGILVPVQSPWNTPLLPVRKPGTNDYRPVQDLREVNKRVQDIHPTVPNPYNLLCALPPQRSWYTVLDLKDAFFCLRLHPTSQPLFAFEWRDPGTGRTGQLTWTRLPQGFKNSPTIFNEALHRDLANFRIQHPQVTLLQYVDDLLLAGATKQDCLEGTKALLLELSDLGYRASAKKAQICRREVTYLGYSLRDGQRWLTEARKKTVVQIPAPTTAKQVREFLGKAGFCRLFIPGFATLAAPLYPLTKPKGEFSWAPEHQKAFDAIKKALLSAPALALPDVTKPFTLYVDERKGVARGVLTQTLGPWRRPVAYLSKKLDPVASGWPVCLKAIAAVAILVKDADKLTLGQNITVIAPHALENIVRQPPDRWMTNARMTHYQSLLLTERVTFAPPAALNPATLLPEETDEPVTHDCHQLLIEETGVRKDLTDIPLTGEVLTWFTDGSSYVVEGKRMAGAAVVDGTRTIWASSLPEGTSAQKAELMALTQALRLAEGKSINIYTDSRYAFATAHVHGAIYKQRGWLTSAGREIKNKEEILSLLEALHLPKRLAIIHCPGHQKAKDPISRGNQMADRVAKQAAQGVNLLPAGKRTADGSEFEKRTADGSEFESPKKKAKVE

SEQ ID NO: 41 - protein, 2089 aa, synthetic construct
MPAAKRVKLDGGDKKYSIGLDIGTNSVGWAVITDEYKVPSKKFKVLGNTDRHSIKKNLIGALLFDSGETAEATRLKRTARRRYTRRKNRICYLQEIFSNEMAKVDDSFFHRLEESFLVEEDKKHERHPIFGNIVDEVAYHEKYPTIYHLRKKLVDSTDKADLRLIYLALAHMIKFRGHFLIEGDLNPDNSDVDKLFIQLVQTYNQLFEENPINASGVDAKAILSARLSKSRRLENLIAQLPGEKKNGLFGNLIALSLGLTPNFKSNFDLAEDAKLQLSKDTYDDDLDNLLAQIGDQYADLFLAAKNLSDAILLSDILRVNTEITKAPLSASMIKRYDEHHQDLTLLKALVRQQLPEKYKEIFFDQSKNGYAGYIDGGASQEEFYKFIKPILEKMDGTEELLVKLNREDLLRKQRTFDNGSIPHQIHLGELHAILRRQEDFYPFLKDNREKIEKILTFRIPYYVGPLARGNSRFAWMTRKSEETITPWNFEEVVDKGASAQSFIERMTNFDKNLPNEKVLPKHSLLYEYFTVYNELTKVKYVTEGMRKPAFLSGEQKKAIVDLLFKTNRKVTVKQLKEDYFKKIECFDSVEISGVEDRFNASLGTYHDLLKIIKDKDFLDNEENEDILEDIVLTLTLFEDREMIEERLKTYAHLFDDKVMKQLKRRRYTGWGRLSRKLINGIRDKQSGKTILDFLKSDGFANRNFMQLIHDDSLTFKEDIQKAQVSGQGDSLHEHIANLAGSPAIKKGILQTVKVVDELVKVMGRHKPENIVIEMARENQTTQKGQKNSRERMKRIEEGIKELGSQILKEHPVENTQLQNEKLYLYYLQNGRDMYVDQELDINRLSDYDVDHIVPQSFLKDDSIDNKVLTRSDKARGKSDNVPSEEVVKKMKNYWRQLLNAKLITQRKFDNLTKAERGGLSELDKAGFIKRQLVETRQITKHVAQILDSRMNTKYDENDKLIREVKVITLKSKLVSDFRKDFQFYKVREINNYHHAHDAYLNAVVGTALIKKYPKLESEFVYGDYKVYDVRKMIAKSEQEIGKATAKYFFYSNIMNFFKTEITLANGEIRKRPLIETNGETGEIVWDKGRDFATVRKVLSMPQVNIVKKTEVQTGGFSKESILPKRNSDKLIARKKDWDPKKYGGFDSPTVAYSVLVVAKVEKGKSKKLKSVKELLGITIMERSSFEKNPIDFLEAKGYKEVKKDLIIKLPKYSLFELENGRKRMLASAGELQKGNELALPSKYVNFLYLASHYEKLKGSPEDNEQKQLFVEQHKHYLDEIIEQISEFSKRVILADANLDKVLSAYNKHRDKPIREQAENIIHLFTLTNLGAPAAFKYFDTTIDRKRYTSTKEVLDATLIHQSITGLYETRIDLSQLGGDGGGSSGSSGSSGSSGGLDDEYRLYSPLVKPDQNIQFWLEQFPQAWAETAGMGLAKQVPPQVIQLKASATPVSVRQYPLSKEAQEGIRPHVQRLIQQGILVPVQSPWNTPLLPVRKPGTNDYRPVQDLREVNKRVQDIHPTVPNPYNLLCALPPQRSWYTVLDLKDAFFCLRLHPTSQPLFAFEWRDPGTGRTGQLTWTRLPQGFKNSPTIFNEALHRDLANFRIQHPQVTLLQYVDDLLLAGATKQDCLEGTKALLLELSDLGYRASAKKAQICRREVTYLGYSLRDGQRWLTEARKKTVVQIPAPTTAKQVREFLGKAGFCRLFIPGFATLAAPLYPLTKPKGEFSWAPEHQKAFDAIKKALLSAPALALPDVTKPFTLYVDERKGVARGVLTQTLGPWRRPVAYLSKKLDPVASGWPVCLKAIAAVAILVKDADKLTLGQNITVIAPHALENIVRQPPDRWMTNARMTHYQSLLLTERVTFAPPAALNPATLLPEETDEPVTHDCHQLLIEETGVRKDLTDIPLTGEVLTWFTDGSSYVVEGKRMAGAAVVDGTRTIWASSLPEGTSAQKAELMALTQALRLAEGKSINIYTDSRYAFATAHVHGAIYKQRGWLTSAGREIKNKEEILSLLEALHLPKRLAIIHCPGHQKAKDPISRGNQMADRVAKQAAQGVNLLPAGKRTADGSEFEKRTADGSEFESPKKKAKVE

SEQ ID NO: 42 - protein, 2088 aa, synthetic construct
MPAAKRVKLDGGDKKYSIGLDIGTNSVGWAVITDEYKVPSKKFKVLGNTDRHSIKKNLIGALLFDSGETAEATRLKRTARRRYTRRKNRICYLQEIFSNEMAKVDDSFFHRLEESFLVEEDKKHERHPIFGNIVDEVAYHEKYPTIYHLRKKLVDSTDKADLRLIYLALAHMIKFRGHFLIEGDLNPDNSDVDKLFIQLVQTYNQLFEENPINASGVDAKAILSARLSKSRRLENLIAQLPGEKKNGLFGNLIALSLGLTPNFKSNFDLAEDAKLQLSKDTYDDDLDNLLAQIGDQYADLFLAAKNLSDAILLSDILRVNTEITKAPLSASMIKRYDEHHQDLTLLKALVRQQLPEKYKEIFFDQSKNGYAGYIDGGASQEEFYKFIKPILEKMDGTEELLVKLNREDLLRKQRTFDNGSIPHQIHLGELHAILRRQEDFYPFLKDNREKIEKILTFRIPYYVGPLARGNSRFAWMTRKSEETITPWNFEEVVDKGASAQSFIERMTNFDKNLPNEKVLPKHSLLYEYFTVYNELTKVKYVTEGMRKPAFLSGEQKKAIVDLLFKTNRKVTVKQLKEDYFKKIECFDSVEISGVEDRFNASLGTYHDLLKIIKDKDFLDNEENEDILEDIVLTLTLFEDREMIEERLKTYAHLFDDKVMKQLKRRRYTGWGRLSRKLINGIRDKQSGKTILDFLKSDGFANRNFMQLIHDDSLTFKEDIQKAQVSGQGDSLHEHIANLAGSPAIKKGILQTVKVVDELVKVMGRHKPENIVIEMARENQTTQKGQKNSRERMKRIEEGIKELGSQILKEHPVENTQLQNEKLYLYYLQNGRDMYVDQELDINRLSDYDVDHIVPQSFLKDDSIDNKVLTRSDKARGKSDNVPSEEVVKKMKNYWRQLLNAKLITQRKFDNLTKAERGGLSELDKAGFIKRQLVETRQITKHVAQILDSRMNTKYDENDKLIREVKVITLKSKLVSDFRKDFQFYKVREINNYHHAHDAYLNAVVGTALIKKYPKLESEFVYGDYKVYDVRKMIAKSEQEIGKATAKYFFYSNIMNFFKTEITLANGEIRKRPLIETNGETGEIVWDKGRDFATVRKVLSMPQVNIVKKTEVQTGGFSKESILPKRNSDKLIARKKDWDPKKYGGFDSPTVAYSVLVVAKVEKGKSKKLKSVKELLGITIMERSSFEKNPIDFLEAKGYKEVKKDLIIKLPKYSLFELENGRKRMLASAGELQKGNELALPSKYVNFLYLASHYEKLKGSPEDNEQKQLFVEQHKHYLDEIIEQISEFSKRVILADANLDKVLSAYNKHRDKPIREQAENIIHLFTLTNLGAPAAFKYFDTTIDRKRYTSTKEVLDATLIHQSITGLYETRIDLSQLGGDGGGSSEAAAKGGGGGLDDEYRLYSPLVKPDQNIQFWLEQFPQAWAETAGMGLAKQVPPQVIQLKASATPVSVRQYPLSKEAQEGIRPHVQRLIQQGILVPVQSPWNTPLLPVRKPGTNDYRPVQDLREVNKRVQDIHPTVPNPYNLLCALPPQRSWYTVLDLKDAFFCLRLHPTSQPLFAFEWRDPGTGRTGQLTWTRLPQGFKNSPTIFNEALHRDLANFRIQHPQVTLLQYVDDLLLAGATKQDCLEGTKALLLELSDLGYRASAKKAQICRREVTYLGYSLRDGQRWLTEARKKTVVQIPAPTTAKQVREFLGKAGFCRLFIPGFATLAAPLYPLTKPKGEFSWAPEHQKAFDAIKKALLSAPALALPDVTKPFTLYVDERKGVARGVLTQTLGPWRRPVAYLSKKLDPVASGWPVCLKAIAAVAILVKDADKLTLGQNITVIAPHALENIVRQPPDRWMTNARMTHYQSLLLTERVTFAPPAALNPATLLPEETDEPVTHDCHQLLIEETGVRKDLTDIPLTGEVLTWFTDGSSYVVEGKRMAGAAVVDGTRTIWASSLPEGTSAQKAELMALTQALRLAEGKSINIYTDSRYAFATAHVHGAIYKQRGWLTSAGREIKNKEEILSLLEALHLPKRLAIIHCPGHQKAKDPISRGNQMADRVAKQAAQGVNLLPAGKRTADGSEFEKRTADGSEFESPKKKAKVE

SEQ ID NO: 43 - protein, 2086 aa, synthetic construct
MPAAKRVKLDGGDKKYSIGLDIGTNSVGWAVITDEYKVPSKKFKVLGNTDRHSIKKNLIGALLFDSGETAEATRLKRTARRRYTRRKNRICYLQEIFSNEMAKVDDSFFHRLEESFLVEEDKKHERHPIFGNIVDEVAYHEKYPTIYHLRKKLVDSTDKADLRLIYLALAHMIKFRGHFLIEGDLNPDNSDVDKLFIQLVQTYNQLFEENPINASGVDAKAILSARLSKSRRLENLIAQLPGEKKNGLFGNLIALSLGLTPNFKSNFDLAEDAKLQLSKDTYDDDLDNLLAQIGDQYADLFLAAKNLSDAILLSDILRVNTEITKAPLSASMIKRYDEHHQDLTLLKALVRQQLPEKYKEIFFDQSKNGYAGYIDGGASQEEFYKFIKPILEKMDGTEELLVKLNREDLLRKQRTFDNGSIPHQIHLGELHAILRRQEDFYPFLKDNREKIEKILTFRIPYYVGPLARGNSRFAWMTRKSEETITPWNFEEVVDKGASAQSFIERMTNFDKNLPNEKVLPKHSLLYEYFTVYNELTKVKYVTEGMRKPAFLSGEQKKAIVDLLFKTNRKVTVKQLKEDYFKKIECFDSVEISGVEDRFNASLGTYHDLLKIIKDKDFLDNEENEDILEDIVLTLTLFEDREMIEERLKTYAHLFDDKVMKQLKRRRYTGWGRLSRKLINGIRDKQSGKTILDFLKSDGFANRNFMQLIHDDSLTFKEDIQKAQVSGQGDSLHEHIANLAGSPAIKKGILQTVKVVDELVKVMGRHKPENIVIEMARENQTTQKGQKNSRERMKRIEEGIKELGSQILKEHPVENTQLQNEKLYLYYLQNGRDMYVDQELDINRLSDYDVDHIVPQSFLKDDSIDNKVLTRSDKARGKSDNVPSEEVVKKMKNYWRQLLNAKLITQRKFDNLTKAERGGLSELDKAGFIKRQLVETRQITKHVAQILDSRMNTKYDENDKLIREVKVITLKSKLVSDFRKDFQFYKVREINNYHHAHDAYLNAVVGTALIKKYPKLESEFVYGDYKVYDVRKMIAKSEQEIGKATAKYFFYSNIMNFFKTEITLANGEIRKRPLIETNGETGEIVWDKGRDFATVRKVLSMPQVNIVKKTEVQTGGFSKESILPKRNSDKLIARKKDWDPKKYGGFDSPTVAYSVLVVAKVEKGKSKKLKSVKELLGITIMERSSFEKNPIDFLEAKGYKEVKKDLIIKLPKYSLFELENGRKRMLASAGELQKGNELALPSKYVNFLYLASHYEKLKGSPEDNEQKQLFVEQHKHYLDEIIEQISEFSKRVILADANLDKVLSAYNKHRDKPIREQAENIIHLFTLTNLGAPAAFKYFDTTIDRKRYTSTKEVLDATLIHQSITGLYETRIDLSQLGGDGGGGGGSSPAPGGLDDEYRLYSPLVKPDQNIQFWLEQFPQAWAETAGMGLAKQVPPQVIQLKASATPVSVRQYPLSKEAQEGIRPHVQRLIQQGILVPVQSPWNTPLLPVRKPGTNDYRPVQDLREVNKRVQDIHPTVPNPYNLLCALPPQRSWYTVLDLKDAFFCLRLHPTSQPLFAFEWRDPGTGRTGQLTWTRLPQGFKNSPTIFNEALHRDLANFRIQHPQVTLLQYVDDLLLAGATKQDCLEGTKALLLELSDLGYRASAKKAQICRREVTYLGYSLRDGQRWLTEARKKTVVQIPAPTTAKQVREFLGKAGFCRLFIPGFATLAAPLYPLTKPKGEFSWAPEHQKAFDAIKKALLSAPALALPDVTKPFTLYVDERKGVARGVLTQTLGPWRRPVAYLSKKLDPVASGWPVCLKAIAAVAILVKDADKLTLGQNITVIAPHALENIVRQPPDRWMTNARMTHYQSLLLTERVTFAPPAALNPATLLPEETDEPVTHDCHQLLIEETGVRKDLTDIPLTGEVLTWFTDGSSYVVEGKRMAGAAVVDGTRTIWASSLPEGTSAQKAELMALTQALRLAEGKSINIYTDSRYAFATAHVHGAIYKQRGWLTSAGREIKNKEEILSLLEALHLPKRLAIIHCPGHQKAKDPISRGNQMADRVAKQAAQGVNLLPAGKRTADGSEFEKRTADGSEFESPKKKAKVE

SEQ ID NO: 44 - protein, 2086 aa, synthetic construct
MPAAKRVKLDGGDKKYSIGLDIGTNSVGWAVITDEYKVPSKKFKVLGNTDRHSIKKNLIGALLFDSGETAEATRLKRTARRRYTRRKNRICYLQEIFSNEMAKVDDSFFHRLEESFLVEEDKKHERHPIFGNIVDEVAYHEKYPTIYHLRKKLVDSTDKADLRLIYLALAHMIKFRGHFLIEGDLNPDNSDVDKLFIQLVQTYNQLFEENPINASGVDAKAILSARLSKSRRLENLIAQLPGEKKNGLFGNLIALSLGLTPNFKSNFDLAEDAKLQLSKDTYDDDLDNLLAQIGDQYADLFLAAKNLSDAILLSDILRVNTEITKAPLSASMIKRYDEHHQDLTLLKALVRQQLPEKYKEIFFDQSKNGYAGYIDGGASQEEFYKFIKPILEKMDGTEELLVKLNREDLLRKQRTFDNGSIPHQIHLGELHAILRRQEDFYPFLKDNREKIEKILTFRIPYYVGPLARGNSRFAWMTRKSEETITPWNFEEVVDKGASAQSFIERMTNFDKNLPNEKVLPKHSLLYEYFTVYNELTKVKYVTEGMRKPAFLSGEQKKAIVDLLFKTNRKVTVKQLKEDYFKKIECFDSVEISGVEDRFNASLGTYHDLLKIIKDKDFLDNEENEDILEDIVLTLTLFEDREMIEERLKTYAHLFDDKVMKQLKRRRYTGWGRLSRKLINGIRDKQSGKTILDFLKSDGFANRNFMQLIHDDSLTFKEDIQKAQVSGQGDSLHEHIANLAGSPAIKKGILQTVKVVDELVKVMGRHKPENIVIEMARENQTTQKGQKNSRERMKRIEEGIKELGSQILKEHPVENTQLQNEKLYLYYLQNGRDMYVDQELDINRLSDYDVDHIVPQSFLKDDSIDNKVLTRSDKARGKSDNVPSEEVVKKMKNYWRQLLNAKLITQRKFDNLTKAERGGLSELDKAGFIKRQLVETRQITKHVAQILDSRMNTKYDENDKLIREVKVITLKSKLVSDFRKDFQFYKVREINNYHHAHDAYLNAVVGTALIKKYPKLESEFVYGDYKVYDVRKMIAKSEQEIGKATAKYFFYSNIMNFFKTEITLANGEIRKRPLIETNGETGEIVWDKGRDFATVRKVLSMPQVNIVKKTEVQTGGFSKESILPKRNSDKLIARKKDWDPKKYGGFDSPTVAYSVLVVAKVEKGKSKKLKSVKELLGITIMERSSFEKNPIDFLEAKGYKEVKKDLIIKLPKYSLFELENGRKRMLASAGELQKGNELALPSKYVNFLYLASHYEKLKGSPEDNEQKQLFVEQHKHYLDEIIEQISEFSKRVILADANLDKVLSAYNKHRDKPIREQAENIIHLFTLTNLGAPAAFKYFDTTIDRKRYTSTKEVLDATLIHQSITGLYETRIDLSQLGGDGGPAPGGSGGGGGLDDEYRLYSPLVKPDQNIQFWLEQFPQAWAETAGMGLAKQVPPQVIQLKASATPVSVRQYPLSKEAQEGIRPHVQRLIQQGILVPVQSPWNTPLLPVRKPGTNDYRPVQDLREVNKRVQDIHPTVPNPYNLLCALPPQRSWYTVLDLKDAFFCLRLHPTSQPLFAFEWRDPGTGRTGQLTWTRLPQGFKNSPTIFNEALHRDLANFRIQHPQVTLLQYVDDLLLAGATKQDCLEGTKALLLELSDLGYRASAKKAQICRREVTYLGYSLRDGQRWLTEARKKTVVQIPAPTTAKQVREFLGKAGFCRLFIPGFATLAAPLYPLTKPKGEFSWAPEHQKAFDAIKKALLSAPALALPDVTKPFTLYVDERKGVARGVLTQTLGPWRRPVAYLSKKLDPVASGWPVCLKAIAAVAILVKDADKLTLGQNITVIAPHALENIVRQPPDRWMTNARMTHYQSLLLTERVTFAPPAALNPATLLPEETDEPVTHDCHQLLIEETGVRKDLTDIPLTGEVLTWFTDGSSYVVEGKRMAGAAVVDGTRTIWASSLPEGTSAQKAELMALTQALRLAEGKSINIYTDSRYAFATAHVHGAIYKQRGWLTSAGREIKNKEEILSLLEALHLPKRLAIIHCPGHQKAKDPISRGNQMADRVAKQAAQGVNLLPAGKRTADGSEFEKRTADGSEFESPKKKAKVE

SEQ ID NO: 45 - protein, 2084 aa, synthetic construct
MPAAKRVKLDGGDKKYSIGLDIGTNSVGWAVITDEYKVPSKKFKVLGNTDRHSIKKNLIGALLFDSGETAEATRLKRTARRRYTRRKNRICYLQEIFSNEMAKVDDSFFHRLEESFLVEEDKKHERHPIFGNIVDEVAYHEKYPTIYHLRKKLVDSTDKADLRLIYLALAHMIKFRGHFLIEGDLNPDNSDVDKLFIQLVQTYNQLFEENPINASGVDAKAILSARLSKSRRLENLIAQLPGEKKNGLFGNLIALSLGLTPNFKSNFDLAEDAKLQLSKDTYDDDLDNLLAQIGDQYADLFLAAKNLSDAILLSDILRVNTEITKAPLSASMIKRYDEHHQDLTLLKALVRQQLPEKYKEIFFDQSKNGYAGYIDGGASQEEFYKFIKPILEKMDGTEELLVKLNREDLLRKQRTFDNGSIPHQIHLGELHAILRRQEDFYPFLKDNREKIEKILTFRIPYYVGPLARGNSRFAWMTRKSEETITPWNFEEVVDKGASAQSFIERMTNFDKNLPNEKVLPKHSLLYEYFTVYNELTKVKYVTEGMRKPAFLSGEQKKAIVDLLFKTNRKVTVKQLKEDYFKKIECFDSVEISGVEDRFNASLGTYHDLLKIIKDKDFLDNEENEDILEDIVLTLTLFEDREMIEERLKTYAHLFDDKVMKQLKRRRYTGWGRLSRKLINGIRDKQSGKTILDFLKSDGFANRNFMQLIHDDSLTFKEDIQKAQVSGQGDSLHEHIANLAGSPAIKKGILQTVKVVDELVKVMGRHKPENIVIEMARENQTTQKGQKNSRERMKRIEEGIKELGSQILKEHPVENTQLQNEKLYLYYLQNGRDMYVDQELDINRLSDYDVDHIVPQSFLKDDSIDNKVLTRSDKARGKSDNVPSEEVVKKMKNYWRQLLNAKLITQRKFDNLTKAERGGLSELDKAGFIKRQLVETRQITKHVAQILDSRMNTKYDENDKLIREVKVITLKSKLVSDFRKDFQFYKVREINNYHHAHDAYLNAVVGTALIKKYPKLESEFVYGDYKVYDVRKMIAKSEQEIGKATAKYFFYSNIMNFFKTEITLANGEIRKRPLIETNGETGEIVWDKGRDFATVRKVLSMPQVNIVKKTEVQTGGFSKESILPKRNSDKLIARKKDWDPKKYGGFDSPTVAYSVLVVAKVEKGKSKKLKSVKELLGITIMERSSFEKNPIDFLEAKGYKEVKKDLIIKLPKYSLFELENGRKRMLASAGELQKGNELALPSKYVNFLYLASHYEKLKGSPEDNEQKQLFVEQHKHYLDEIIEQISEFSKRVILADANLDKVLSAYNKHRDKPIREQAENIIHLFTLTNLGAPAAFKYFDTTIDRKRYTSTKEVLDATLIHQSITGLYETRIDLSQLGGDGGPAPAPAPGGLDDEYRLYSPLVKPDQNIQFWLEQFPQAWAETAGMGLAKQVPPQVIQLKASATPVSVRQYPLSKEAQEGIRPHVQRLIQQGILVPVQSPWNTPLLPVRKPGTNDYRPVQDLREVNKRVQDIHPTVPNPYNLLCALPPQRSWYTVLDLKDAFFCLRLHPTSQPLFAFEWRDPGTGRTGQLTWTRLPQGFKNSPTIFNEALHRDLANFRIQHPQVTLLQYVDDLLLAGATKQDCLEGTKALLLELSDLGYRASAKKAQICRREVTYLGYSLRDGQRWLTEARKKTVVQIPAPTTAKQVREFLGKAGFCRLFIPGFATLAAPLYPLTKPKGEFSWAPEHQKAFDAIKKALLSAPALALPDVTKPFTLYVDERKGVARGVLTQTLGPWRRPVAYLSKKLDPVASGWPVCLKAIAAVAILVKDADKLTLGQNITVIAPHALENIVRQPPDRWMTNARMTHYQSLLLTERVTFAPPAALNPATLLPEETDEPVTHDCHQLLIEETGVRKDLTDIPLTGEVLTWFTDGSSYVVEGKRMAGAAVVDGTRTIWASSLPEGTSAQKAELMALTQALRLAEGKSINIYTDSRYAFATAHVHGAIYKQRGWLTSAGREIKNKEEILSLLEALHLPKRLAIIHCPGHQKAKDPISRGNQMADRVAKQAAQGVNLLPAGKRTADGSEFEKRTADGSEFESPKKKAKVE

SEQ ID NO: 46 - protein, 2097 aa, synthetic construct
MPAAKRVKLDGGDKKYSIGLDIGTNSVGWAVITDEYKVPSKKFKVLGNTDRHSIKKNLIGALLFDSGETAEATRLKRTARRRYTRRKNRICYLQEIFSNEMAKVDDSFFHRLEESFLVEEDKKHERHPIFGNIVDEVAYHEKYPTIYHLRKKLVDSTDKADLRLIYLALAHMIKFRGHFLIEGDLNPDNSDVDKLFIQLVQTYNQLFEENPINASGVDAKAILSARLSKSRRLENLIAQLPGEKKNGLFGNLIALSLGLTPNFKSNFDLAEDAKLQLSKDTYDDDLDNLLAQIGDQYADLFLAAKNLSDAILLSDILRVNTEITKAPLSASMIKRYDEHHQDLTLLKALVRQQLPEKYKEIFFDQSKNGYAGYIDGGASQEEFYKFIKPILEKMDGTEELLVKLNREDLLRKQRTFDNGSIPHQIHLGELHAILRRQEDFYPFLKDNREKIEKILTFRIPYYVGPLARGNSRFAWMTRKSEETITPWNFEEVVDKGASAQSFIERMTNFDKNLPNEKVLPKHSLLYEYFTVYNELTKVKYVTEGMRKPAFLSGEQKKAIVDLLFKTNRKVTVKQLKEDYFKKIECFDSVEISGVEDRFNASLGTYHDLLKIIKDKDFLDNEENEDILEDIVLTLTLFEDREMIEERLKTYAHLFDDKVMKQLKRRRYTGWGRLSRKLINGIRDKQSGKTILDFLKSDGFANRNFMQLIHDDSLTFKEDIQKAQVSGQGDSLHEHIANLAGSPAIKKGILQTVKVVDELVKVMGRHKPENIVIEMARENQTTQKGQKNSRERMKRIEEGIKELGSQILKEHPVENTQLQNEKLYLYYLQNGRDMYVDQELDINRLSDYDVDHIVPQSFLKDDSIDNKVLTRSDKARGKSDNVPSEEVVKKMKNYWRQLLNAKLITQRKFDNLTKAERGGLSELDKAGFIKRQLVETRQITKHVAQILDSRMNTKYDENDKLIREVKVITLKSKLVSDFRKDFQFYKVREINNYHHAHDAYLNAVVGTALIKKYPKLESEFVYGDYKVYDVRKMIAKSEQEIGKATAKYFFYSNIMNFFKTEITLANGEIRKRPLIETNGETGEIVWDKGRDFATVRKVLSMPQVNIVKKTEVQTGGFSKESILPKRNSDKLIARKKDWDPKKYGGFDSPTVAYSVLVVAKVEKGKSKKLKSVKELLGITIMERSSFEKNPIDFLEAKGYKEVKKDLIIKLPKYSLFELENGRKRMLASAGELQKGNELALPSKYVNFLYLASHYEKLKGSPEDNEQKQLFVEQHKHYLDEIIEQISEFSKRVILADANLDKVLSAYNKHRDKPIREQAENIIHLFTLTNLGAPAAFKYFDTTIDRKRYTSTKEVLDATLIHQSITGLYETRIDLSQLGGDGGEAAAKEAAAKEAAAKEAAAKGGLDDEYRLYSPLVKPDQNIQFWLEQFPQAWAETAGMGLAKQVPPQVIQLKASATPVSVRQYPLSKEAQEGIRPHVQRLIQQGILVPVQSPWNTPLLPVRKPGTNDYRPVQDLREVNKRVQDIHPTVPNPYNLLCALPPQRSWYTVLDLKDAFFCLRLHPTSQPLFAFEWRDPGTGRTGQLTWTRLPQGFKNSPTIFNEALHRDLANFRIQHPQVTLLQYVDDLLLAGATKQDCLEGTKALLLELSDLGYRASAKKAQICRREVTYLGYSLRDGQRWLTEARKKTVVQIPAPTTAKQVREFLGKAGFCRLFIPGFATLAAPLYPLTKPKGEFSWAPEHQKAFDAIKKALLSAPALALPDVTKPFTLYVDERKGVARGVLTQTLGPWRRPVAYLSKKLDPVASGWPVCLKAIAAVAILVKDADKLTLGQNITVIAPHALENIVRQPPDRWMTNARMTHYQSLLLTERVTFAPPAALNPATLLPEETDEPVTHDCHQLLIEETGVRKDLTDIPLTGEVLTWFTDGSSYVVEGKRMAGAAVVDGTRTIWASSLPEGTSAQKAELMALTQALRLAEGKSINIYTDSRYAFATAHVHGAIYKQRGWLTSAGREIKNKEEILSLLEALHLPKRLAIIHCPGHQKAKDPISRGNQMADRVAKQAAQGVNLLPAGKRTADGSEFEKRTADGSEFESPKKKAKVE

SEQ ID NO: 47 - protein, 2083 aa, synthetic construct
MPAAKRVKLDGGDKKYSIGLDIGTNSVGWAVITDEYKVPSKKFKVLGNTDRHSIKKNLIGALLFDSGETAEATRLKRTARRRYTRRKNRICYLQEIFSNEMAKVDDSFFHRLEESFLVEEDKKHERHPIFGNIVDEVAYHEKYPTIYHLRKKLVDSTDKADLRLIYLALAHMIKFRGHFLIEGDLNPDNSDVDKLFIQLVQTYNQLFEENPINASGVDAKAILSARLSKSRRLENLIAQLPGEKKNGLFGNLIALSLGLTPNFKSNFDLAEDAKLQLSKDTYDDDLDNLLAQIGDQYADLFLAAKNLSDAILLSDILRVNTEITKAPLSASMIKRYDEHHQDLTLLKALVRQQLPEKYKEIFFDQSKNGYAGYIDGGASQEEFYKFIKPILEKMDGTEELLVKLNREDLLRKQRTFDNGSIPHQIHLGELHAILRRQEDFYPFLKDNREKIEKILTFRIPYYVGPLARGNSRFAWMTRKSEETITPWNFEEVVDKGASAQSFIERMTNFDKNLPNEKVLPKHSLLYEYFTVYNELTKVKYVTEGMRKPAFLSGEQKKAIVDLLFKTNRKVTVKQLKEDYFKKIECFDSVEISGVEDRFNASLGTYHDLLKIIKDKDFLDNEENEDILEDIVLTLTLFEDREMIEERLKTYAHLFDDKVMKQLKRRRYTGWGRLSRKLINGIRDKQSGKTILDFLKSDGFANRNFMQLIHDDSLTFKEDIQKAQVSGQGDSLHEHIANLAGSPAIKKGILQTVKVVDELVKVMGRHKPENIVIEMARENQTTQKGQKNSRERMKRIEEGIKELGSQILKEHPVENTQLQNEKLYLYYLQNGRDMYVDQELDINRLSDYDVDHIVPQSFLKDDSIDNKVLTRSDKARGKSDNVPSEEVVKKMKNYWRQLLNAKLITQRKFDNLTKAERGGLSELDKAGFIKRQLVETRQITKHVAQILDSRMNTKYDENDKLIREVKVITLKSKLVSDFRKDFQFYKVREINNYHHAHDAYLNAVVGTALIKKYPKLESEFVYGDYKVYDVRKMIAKSEQEIGKATAKYFFYSNIMNFFKTEITLANGEIRKRPLIETNGETGEIVWDKGRDFATVRKVLSMPQVNIVKKTEVQTGGFSKESILPKRNSDKLIARKKDWDPKKYGGFDSPTVAYSVLVVAKVEKGKSKKLKSVKELLGITIMERSSFEKNPIDFLEAKGYKEVKKDLIIKLPKYSLFELENGRKRMLASAGELQKGNELALPSKYVNFLYLASHYEKLKGSPEDNEQKQLFVEQHKHYLDEIIEQISEFSKRVILADANLDKVLSAYNKHRDKPIREQAENIIHLFTLTNLGAPAAFKYFDTTIDRKRYTSTKEVLDATLIHQSITGLYETRIDLSQLGGDGGGSSPAPGGLDDEYRLYSPLVKPDQNIQFWLEQFPQAWAETAGMGLAKQVPPQVIQLKASATPVSVRQYPLSKEAQEGIRPHVQRLIQQGILVPVQSPWNTPLLPVRKPGTNDYRPVQDLREVNKRVQDIHPTVPNPYNLLCALPPQRSWYTVLDLKDAFFCLRLHPTSQPLFAFEWRDPGTGRTGQLTWTRLPQGFKNSPTIFNEALHRDLANFRIQHPQVTLLQYVDDLLLAGATKQDCLEGTKALLLELSDLGYRASAKKAQICRREVTYLGYSLRDGQRWLTEARKKTVVQIPAPTTAKQVREFLGKAGFCRLFIPGFATLAAPLYPLTKPKGEFSWAPEHQKAFDAIKKALLSAPALALPDVTKPFTLYVDERKGVARGVLTQTLGPWRRPVAYLSKKLDPVASGWPVCLKAIAAVAILVKDADKLTLGQNITVIAPHALENIVRQPPDRWMTNARMTHYQSLLLTERVTFAPPAALNPATLLPEETDEPVTHDCHQLLIEETGVRKDLTDIPLTGEVLTWFTDGSSYVVEGKRMAGAAVVDGTRTIWASSLPEGTSAQKAELMALTQALRLAEGKSINIYTDSRYAFATAHVHGAIYKQRGWLTSAGREIKNKEEILSLLEALHLPKRLAIIHCPGHQKAKDPISRGNQMADRVAKQAAQGVNLLPAGKRTADGSEFEKRTADGSEFESPKKKAKVE

SEQ ID NO: 48 - protein, 2085 aa, synthetic construct
MPAAKRVKLDGGDKKYSIGLDIGTNSVGWAVITDEYKVPSKKFKVLGNTDRHSIKKNLIGALLFDSGETAEATRLKRTARRRYTRRKNRICYLQEIFSNEMAKVDDSFFHRLEESFLVEEDKKHERHPIFGNIVDEVAYHEKYPTIYHLRKKLVDSTDKADLRLIYLALAHMIKFRGHFLIEGDLNPDNSDVDKLFIQLVQTYNQLFEENPINASGVDAKAILSARLSKSRRLENLIAQLPGEKKNGLFGNLIALSLGLTPNFKSNFDLAEDAKLQLSKDTYDDDLDNLLAQIGDQYADLFLAAKNLSDAILLSDILRVNTEITKAPLSASMIKRYDEHHQDLTLLKALVRQQLPEKYKEIFFDQSKNGYAGYIDGGASQEEFYKFIKPILEKMDGTEELLVKLNREDLLRKQRTFDNGSIPHQIHLGELHAILRRQEDFYPFLKDNREKIEKILTFRIPYYVGPLARGNSRFAWMTRKSEETITPWNFEEVVDKGASAQSFIERMTNFDKNLPNEKVLPKHSLLYEYFTVYNELTKVKYVTEGMRKPAFLSGEQKKAIVDLLFKTNRKVTVKQLKEDYFKKIECFDSVEISGVEDRFNASLGTYHDLLKIIKDKDFLDNEENEDILEDIVLTLTLFEDREMIEERLKTYAHLFDDKVMKQLKRRRYTGWGRLSRKLINGIRDKQSGKTILDFLKSDGFANRNFMQLIHDDSLTFKEDIQKAQVSGQGDSLHEHIANLAGSPAIKKGILQTVKVVDELVKVMGRHKPENIVIEMARENQTTQKGQKNSRERMKRIEEGIKELGSQILKEHPVENTQLQNEKLYLYYLQNGRDMYVDQELDINRLSDYDVDHIVPQSFLKDDSIDNKVLTRSDKARGKSDNVPSEEVVKKMKNYWRQLLNAKLITQRKFDNLTKAERGGLSELDKAGFIKRQLVETRQITKHVAQILDSRMNTKYDENDKLIREVKVITLKSKLVSDFRKDFQFYKVREINNYHHAHDAYLNAVVGTALIKKYPKLESEFVYGDYKVYDVRKMIAKSEQEIGKATAKYFFYSNIMNFFKTEITLANGEIRKRPLIETNGETGEIVWDKGRDFATVRKVLSMPQVNIVKKTEVQTGGFSKESILPKRNSDKLIARKKDWDPKKYGGFDSPTVAYSVLVVAKVEKGKSKKLKSVKELLGITIMERSSFEKNPIDFLEAKGYKEVKKDLIIKLPKYSLFELENGRKRMLASAGELQKGNELALPSKYVNFLYLASHYEKLKGSPEDNEQKQLFVEQHKHYLDEIIEQISEFSKRVILADANLDKVLSAYNKHRDKPIREQAENIIHLFTLTNLGAPAAFKYFDTTIDRKRYTSTKEVLDATLIHQSITGLYETRIDLSQLGGDGGEAAAKGGGGGLDDEYRLYSPLVKPDQNIQFWLEQFPQAWAETAGMGLAKQVPPQVIQLKASATPVSVRQYPLSKEAQEGIRPHVQRLIQQGILVPVQSPWNTPLLPVRKPGTNDYRPVQDLREVNKRVQDIHPTVPNPYNLLCALPPQRSWYTVLDLKDAFFCLRLHPTSQPLFAFEWRDPGTGRTGQLTWTRLPQGFKNSPTIFNEALHRDLANFRIQHPQVTLLQYVDDLLLAGATKQDCLEGTKALLLELSDLGYRASAKKAQICRREVTYLGYSLRDGQRWLTEARKKTVVQIPAPTTAKQVREFLGKAGFCRLFIPGFATLAAPLYPLTKPKGEFSWAPEHQKAFDAIKKALLSAPALALPDVTKPFTLYVDERKGVARGVLTQTLGPWRRPVAYLSKKLDPVASGWPVCLKAIAAVAILVKDADKLTLGQNITVIAPHALENIVRQPPDRWMTNARMTHYQSLLLTERVTFAPPAALNPATLLPEETDEPVTHDCHQLLIEETGVRKDLTDIPLTGEVLTWFTDGSSYVVEGKRMAGAAVVDGTRTIWASSLPEGTSAQKAELMALTQALRLAEGKSINIYTDSRYAFATAHVHGAIYKQRGWLTSAGREIKNKEEILSLLEALHLPKRLAIIHCPGHQKAKDPISRGNQMADRVAKQAAQGVNLLPAGKRTADGSEFEKRTADGSEFESPKKKAKVE

SEQ ID NO: 49 - protein, 2088 aa, synthetic construct
MPAAKRVKLDGGDKKYSIGLDIGTNSVGWAVITDEYKVPSKKFKVLGNTDRHSIKKNLIGALLFDSGETAEATRLKRTARRRYTRRKNRICYLQEIFSNEMAKVDDSFFHRLEESFLVEEDKKHERHPIFGNIVDEVAYHEKYPTIYHLRKKLVDSTDKADLRLIYLALAHMIKFRGHFLIEGDLNPDNSDVDKLFIQLVQTYNQLFEENPINASGVDAKAILSARLSKSRRLENLIAQLPGEKKNGLFGNLIALSLGLTPNFKSNFDLAEDAKLQLSKDTYDDDLDNLLAQIGDQYADLFLAAKNLSDAILLSDILRVNTEITKAPLSASMIKRYDEHHQDLTLLKALVRQQLPEKYKEIFFDQSKNGYAGYIDGGASQEEFYKFIKPILEKMDGTEELLVKLNREDLLRKQRTFDNGSIPHQIHLGELHAILRRQEDFYPFLKDNREKIEKILTFRIPYYVGPLARGNSRFAWMTRKSEETITPWNFEEVVDKGASAQSFIERMTNFDKNLPNEKVLPKHSLLYEYFTVYNELTKVKYVTEGMRKPAFLSGEQKKAIVDLLFKTNRKVTVKQLKEDYFKKIECFDSVEISGVEDRFNASLGTYHDLLKIIKDKDFLDNEENEDILEDIVLTLTLFEDREMIEERLKTYAHLFDDKVMKQLKRRRYTGWGRLSRKLINGIRDKQSGKTILDFLKSDGFANRNFMQLIHDDSLTFKEDIQKAQVSGQGDSLHEHIANLAGSPAIKKGILQTVKVVDELVKVMGRHKPENIVIEMARENQTTQKGQKNSRERMKRIEEGIKELGSQILKEHPVENTQLQNEKLYLYYLQNGRDMYVDQELDINRLSDYDVDHIVPQSFLKDDSIDNKVLTRSDKARGKSDNVPSEEVVKKMKNYWRQLLNAKLITQRKFDNLTKAERGGLSELDKAGFIKRQLVETRQITKHVAQILDSRMNTKYDENDKLIREVKVITLKSKLVSDFRKDFQFYKVREINNYHHAHDAYLNAVVGTALIKKYPKLESEFVYGDYKVYDVRKMIAKSEQEIGKATAKYFFYSNIMNFFKTEITLANGEIRKRPLIETNGETGEIVWDKGRDFATVRKVLSMPQVNIVKKTEVQTGGFSKESILPKRNSDKLIARKKDWDPKKYGGFDSPTVAYSVLVVAKVEKGKSKKLKSVKELLGITIMERSSFEKNPIDFLEAKGYKEVKKDLIIKLPKYSLFELENGRKRMLASAGELQKGNELALPSKYVNFLYLASHYEKLKGSPEDNEQKQLFVEQHKHYLDEIIEQISEFSKRVILADANLDKVLSAYNKHRDKPIREQAENIIHLFTLTNLGAPAAFKYFDTTIDRKRYTSTKEVLDATLIHQSITGLYETRIDLSQLGGDGGGGSEAAAKPAPGGLDDEYRLYSPLVKPDQNIQFWLEQFPQAWAETAGMGLAKQVPPQVIQLKASATPVSVRQYPLSKEAQEGIRPHVQRLIQQGILVPVQSPWNTPLLPVRKPGTNDYRPVQDLREVNKRVQDIHPTVPNPYNLLCALPPQRSWYTVLDLKDAFFCLRLHPTSQPLFAFEWRDPGTGRTGQLTWTRLPQGFKNSPTIFNEALHRDLANFRIQHPQVTLLQYVDDLLLAGATKQDCLEGTKALLLELSDLGYRASAKKAQICRREVTYLGYSLRDGQRWLTEARKKTVVQIPAPTTAKQVREFLGKAGFCRLFIPGFATLAAPLYPLTKPKGEFSWAPEHQKAFDAIKKALLSAPALALPDVTKPFTLYVDERKGVARGVLTQTLGPWRRPVAYLSKKLDPVASGWPVCLKAIAAVAILVKDADKLTLGQNITVIAPHALENIVRQPPDRWMTNARMTHYQSLLLTERVTFAPPAALNPATLLPEETDEPVTHDCHQLLIEETGVRKDLTDIPLTGEVLTWFTDGSSYVVEGKRMAGAAVVDGTRTIWASSLPEGTSAQKAELMALTQALRLAEGKSINIYTDSRYAFATAHVHGAIYKQRGWLTSAGREIKNKEEILSLLEALHLPKRLAIIHCPGHQKAKDPISRGNQMADRVAKQAAQGVNLLPAGKRTADGSEFEKRTADGSEFESPKKKAKVE

SEQ ID NO: 50 - protein, 2088 aa, synthetic construct
MPAAKRVKLDGGDKKYSIGLDIGTNSVGWAVITDEYKVPSKKFKVLGNTDRHSIKKNLIGALLFDSGETAEATRLKRTARRRYTRRKNRICYLQEIFSNEMAKVDDSFFHRLEESFLVEEDKKHERHPIFGNIVDEVAYHEKYPTIYHLRKKLVDSTDKADLRLIYLALAHMIKFRGHFLIEGDLNPDNSDVDKLFIQLVQTYNQLFEENPINASGVDAKAILSARLSKSRRLENLIAQLPGEKKNGLFGNLIALSLGLTPNFKSNFDLAEDAKLQLSKDTYDDDLDNLLAQIGDQYADLFLAAKNLSDAILLSDILRVNTEITKAPLSASMIKRYDEHHQDLTLLKALVRQQLPEKYKEIFFDQSKNGYAGYIDGGASQEEFYKFIKPILEKMDGTEELLVKLNREDLLRKQRTFDNGSIPHQIHLGELHAILRRQEDFYPFLKDNREKIEKILTFRIPYYVGPLARGNSRFAWMTRKSEETITPWNFEEVVDKGASAQSFIERMTNFDKNLPNEKVLPKHSLLYEYFTVYNELTKVKYVTEGMRKPAFLSGEQKKAIVDLLFKTNRKVTVKQLKEDYFKKIECFDSVEISGVEDRFNASLGTYHDLLKIIKDKDFLDNEENEDILEDIVLTLTLFEDREMIEERLKTYAHLFDDKVMKQLKRRRYTGWGRLSRKLINGIRDKQSGKTILDFLKSDGFANRNFMQLIHDDSLTFKEDIQKAQVSGQGDSLHEHIANLAGSPAIKKGILQTVKVVDELVKVMGRHKPENIVIEMARENQTTQKGQKNSRERMKRIEEGIKELGSQILKEHPVENTQLQNEKLYLYYLQNGRDMYVDQELDINRLSDYDVDHIVPQSFLKDDSIDNKVLTRSDKARGKSDNVPSEEVVKKMKNYWRQLLNAKLITQRKFDNLTKAERGGLSELDKAGFIKRQLVETRQITKHVAQILDSRMNTKYDENDKLIREVKVITLKSKLVSDFRKDFQFYKVREINNYHHAHDAYLNAVVGTALIKKYPKLESEFVYGDYKVYDVRKMIAKSEQEIGKATAKYFFYSNIMNFFKTEITLANGEIRKRPLIETNGETGEIVWDKGRDFATVRKVLSMPQVNIVKKTEVQTGGFSKESILPKRNSDKLIARKKDWDPKKYGGFDSPTVAYSVLVVAKVEKGKSKKLKSVKELLGITIMERSSFEKNPIDFLEAKGYKEVKKDLIIKLPKYSLFELENGRKRMLASAGELQKGNELALPSKYVNFLYLASHYEKLKGSPEDNEQKQLFVEQHKHYLDEIIEQISEFSKRVILADANLDKVLSAYNKHRDKPIREQAENIIHLFTLTNLGAPAAFKYFDTTIDRKRYTSTKEVLDATLIHQSITGLYETRIDLSQLGGDGGPAPGGGEAAAKGGLDDEYRLYSPLVKPDQNIQFWLEQFPQAWAETAGMGLAKQVPPQVIQLKASATPVSVRQYPLSKEAQEGIRPHVQRLIQQGILVPVQSPWNTPLLPVRKPGTNDYRPVQDLREVNKRVQDIHPTVPNPYNLLCALPPQRSWYTVLDLKDAFFCLRLHPTSQPLFAFEWRDPGTGRTGQLTWTRLPQGFKNSPTIFNEALHRDLANFRIQHPQVTLLQYVDDLLLAGATKQDCLEGTKALLLELSDLGYRASAKKAQICRREVTYLGYSLRDGQRWLTEARKKTVVQIPAPTTAKQVREFLGKAGFCRLFIPGFATLAAPLYPLTKPKGEFSWAPEHQKAFDAIKKALLSAPALALPDVTKPFTLYVDERKGVARGVLTQTLGPWRRPVAYLSKKLDPVASGWPVCLKAIAAVAILVKDADKLTLGQNITVIAPHALENIVRQPPDRWMTNARMTHYQSLLLTERVTFAPPAALNPATLLPEETDEPVTHDCHQLLIEETGVRKDLTDIPLTGEVLTWFTDGSSYVVEGKRMAGAAVVDGTRTIWASSLPEGTSAQKAELMALTQALRLAEGKSINIYTDSRYAFATAHVHGAIYKQRGWLTSAGREIKNKEEILSLLEALHLPKRLAIIHCPGHQKAKDPISRGNQMADRVAKQAAQGVNLLPAGKRTADGSEFEKRTADGSEFESPKKKAKVE

SEQ ID NO: 51 - protein, 2092 aa, synthetic construct
MPAAKRVKLDGGDKKYSIGLDIGTNSVGWAVITDEYKVPSKKFKVLGNTDRHSIKKNLIGALLFDSGETAEATRLKRTARRRYTRRKNRICYLQEIFSNEMAKVDDSFFHRLEESFLVEEDKKHERHPIFGNIVDEVAYHEKYPTIYHLRKKLVDSTDKADLRLIYLALAHMIKFRGHFLIEGDLNPDNSDVDKLFIQLVQTYNQLFEENPINASGVDAKAILSARLSKSRRLENLIAQLPGEKKNGLFGNLIALSLGLTPNFKSNFDLAEDAKLQLSKDTYDDDLDNLLAQIGDQYADLFLAAKNLSDAILLSDILRVNTEITKAPLSASMIKRYDEHHQDLTLLKALVRQQLPEKYKEIFFDQSKNGYAGYIDGGASQEEFYKFIKPILEKMDGTEELLVKLNREDLLRKQRTFDNGSIPHQIHLGELHAILRRQEDFYPFLKDNREKIEKILTFRIPYYVGPLARGNSRFAWMTRKSEETITPWNFEEVVDKGASAQSFIERMTNFDKNLPNEKVLPKHSLLYEYFTVYNELTKVKYVTEGMRKPAFLSGEQKKAIVDLLFKTNRKVTVKQLKEDYFKKIECFDSVEISGVEDRFNASLGTYHDLLKIIKDKDFLDNEENEDILEDIVLTLTLFEDREMIEERLKTYAHLFDDKVMKQLKRRRYTGWGRLSRKLINGIRDKQSGKTILDFLKSDGFANRNFMQLIHDDSLTFKEDIQKAQVSGQGDSLHEHIANLAGSPAIKKGILQTVKVVDELVKVMGRHKPENIVIEMARENQTTQKGQKNSRERMKRIEEGIKELGSQILKEHPVENTQLQNEKLYLYYLQNGRDMYVDQELDINRLSDYDVDHIVPQSFLKDDSIDNKVLTRSDKARGKSDNVPSEEVVKKMKNYWRQLLNAKLITQRKFDNLTKAERGGLSELDKAGFIKRQLVETRQITKHVAQILDSRMNTKYDENDKLIREVKVITLKSKLVSDFRKDFQFYKVREINNYHHAHDAYLNAVVGTALIKKYPKLESEFVYGDYKVYDVRKMIAKSEQEIGKATAKYFFYSNIMNFFKTEITLANGEIRKRPLIETNGETGEIVWDKGRDFATVRKVLSMPQVNIVKKTEVQTGGFSKESILPKRNSDKLIARKKDWDPKKYGGFDSPTVAYSVLVVAKVEKGKSKKLKSVKELLGITIMERSSFEKNPIDFLEAKGYKEVKKDLIIKLPKYSLFELENGRKRMLASAGELQKGNELALPSKYVNFLYLASHYEKLKGSPEDNEQKQLFVEQHKHYLDEIIEQISEFSKRVILADANLDKVLSAYNKHRDKPIREQAENIIHLFTLTNLGAPAAFKYFDTTIDRKRYTSTKEVLDATLIHQSITGLYETRIDLSQLGGDGGGGGGSGGGGSGGGGSGGLDDEYRLYSPLVKPDQNIQFWLEQFPQAWAETAGMGLAKQVPPQVIQLKASATPVSVRQYPLSKEAQEGIRPHVQRLIQQGILVPVQSPWNTPLLPVRKPGTNDYRPVQDLREVNKRVQDIHPTVPNPYNLLCALPPQRSWYTVLDLKDAFFCLRLHPTSQPLFAFEWRDPGTGRTGQLTWTRLPQGFKNSPTIFNEALHRDLANFRIQHPQVTLLQYVDDLLLAGATKQDCLEGTKALLLELSDLGYRASAKKAQICRREVTYLGYSLRDGQRWLTEARKKTVVQIPAPTTAKQVREFLGKAGFCRLFIPGFATLAAPLYPLTKPKGEFSWAPEHQKAFDAIKKALLSAPALALPDVTKPFTLYVDERKGVARGVLTQTLGPWRRPVAYLSKKLDPVASGWPVCLKAIAAVAILVKDADKLTLGQNITVIAPHALENIVRQPPDRWMTNARMTHYQSLLLTERVTFAPPAALNPATLLPEETDEPVTHDCHQLLIEETGVRKDLTDIPLTGEVLTWFTDGSSYVVEGKRMAGAAVVDGTRTIWASSLPEGTSAQKAELMALTQALRLAEGKSINIYTDSRYAFATAHVHGAIYKQRGWLTSAGREIKNKEEILSLLEALHLPKRLAIIHCPGHQKAKDPISRGNQMADRVAKQAAQGVNLLPAGKRTADGSEFEKRTADGSEFESPKKKAKVE

SEQ ID NO: 52 - protein, 2092 aa, synthetic construct
MPAAKRVKLDGGDKKYSIGLDIGTNSVGWAVITDEYKVPSKKFKVLGNTDRHSIKKNLIGALLFDSGETAEATRLKRTARRRYTRRKNRICYLQEIFSNEMAKVDDSFFHRLEESFLVEEDKKHERHPIFGNIVDEVAYHEKYPTIYHLRKKLVDSTDKADLRLIYLALAHMIKFRGHFLIEGDLNPDNSDVDKLFIQLVQTYNQLFEENPINASGVDAKAILSARLSKSRRLENLIAQLPGEKKNGLFGNLIALSLGLTPNFKSNFDLAEDAKLQLSKDTYDDDLDNLLAQIGDQYADLFLAAKNLSDAILLSDILRVNTEITKAPLSASMIKRYDEHHQDLTLLKALVRQQLPEKYKEIFFDQSKNGYAGYIDGGASQEEFYKFIKPILEKMDGTEELLVKLNREDLLRKQRTFDNGSIPHQIHLGELHAILRRQEDFYPFLKDNREKIEKILTFRIPYYVGPLARGNSRFAWMTRKSEETITPWNFEEVVDKGASAQSFIERMTNFDKNLPNEKVLPKHSLLYEYFTVYNELTKVKYVTEGMRKPAFLSGEQKKAIVDLLFKTNRKVTVKQLKEDYFKKIECFDSVEISGVEDRFNASLGTYHDLLKIIKDKDFLDNEENEDILEDIVLTLTLFEDREMIEERLKTYAHLFDDKVMKQLKRRRYTGWGRLSRKLINGIRDKQSGKTILDFLKSDGFANRNFMQLIHDDSLTFKEDIQKAQVSGQGDSLHEHIANLAGSPAIKKGILQTVKVVDELVKVMGRHKPENIVIEMARENQTTQKGQKNSRERMKRIEEGIKELGSQILKEHPVENTQLQNEKLYLYYLQNGRDMYVDQELDINRLSDYDVDHIVPQSFLKDDSIDNKVLTRSDKARGKSDNVPSEEVVKKMKNYWRQLLNAKLITQRKFDNLTKAERGGLSELDKAGFIKRQLVETRQITKHVAQILDSRMNTKYDENDKLIREVKVITLKSKLVSDFRKDFQFYKVREINNYHHAHDAYLNAVVGTALIKKYPKLESEFVYGDYKVYDVRKMIAKSEQEIGKATAKYFFYSNIMNFFKTEITLANGEIRKRPLIETNGETGEIVWDKGRDFATVRKVLSMPQVNIVKKTEVQTGGFSKESILPKRNSDKLIARKKDWDPKKYGGFDSPTVAYSVLVVAKVEKGKSKKLKSVKELLGITIMERSSFEKNPIDFLEAKGYKEVKKDLIIKLPKYSLFELENGRKRMLASAGELQKGNELALPSKYVNFLYLASHYEKLKGSPEDNEQKQLFVEQHKHYLDEIIEQISEFSKRVILADANLDKVLSAYNKHRDKPIREQAENIIHLFTLTNLGAPAAFKYFDTTIDRKRYTSTKEVLDATLIHQSITGLYETRIDLSQLGGDGGGGSGGSGGSGGSGGSGGLDDEYRLYSPLVKPDQNIQFWLEQFPQAWAETAGMGLAKQVPPQVIQLKASATPVSVRQYPLSKEAQEGIRPHVQRLIQQGILVPVQSPWNTPLLPVRKPGTNDYRPVQDLREVNKRVQDIHPTVPNPYNLLCALPPQRSWYTVLDLKDAFFCLRLHPTSQPLFAFEWRDPGTGRTGQLTWTRLPQGFKNSPTIFNEALHRDLANFRIQHPQVTLLQYVDDLLLAGATKQDCLEGTKALLLELSDLGYRASAKKAQICRREVTYLGYSLRDGQRWLTEARKKTVVQIPAPTTAKQVREFLGKAGFCRLFIPGFATLAAPLYPLTKPKGEFSWAPEHQKAFDAIKKALLSAPALALPDVTKPFTLYVDERKGVARGVLTQTLGPWRRPVAYLSKKLDPVASGWPVCLKAIAAVAILVKDADKLTLGQNITVIAPHALENIVRQPPDRWMTNARMTHYQSLLLTERVTFAPPAALNPATLLPEETDEPVTHDCHQLLIEETGVRKDLTDIPLTGEVLTWFTDGSSYVVEGKRMAGAAVVDGTRTIWASSLPEGTSAQKAELMALTQALRLAEGKSINIYTDSRYAFATAHVHGAIYKQRGWLTSAGREIKNKEEILSLLEALHLPKRLAIIHCPGHQKAKDPISRGNQMADRVAKQAAQGVNLLPAGKRTADGSEFEKRTADGSEFESPKKKAKVE

SEQ ID NO: 53 - protein, 2088 aa, synthetic construct
MPAAKRVKLDGGDKKYSIGLDIGTNSVGWAVITDEYKVPSKKFKVLGNTDRHSIKKNLIGALLFDSGETAEATRLKRTARRRYTRRKNRICYLQEIFSNEMAKVDDSFFHRLEESFLVEEDKKHERHPIFGNIVDEVAYHEKYPTIYHLRKKLVDSTDKADLRLIYLALAHMIKFRGHFLIEGDLNPDNSDVDKLFIQLVQTYNQLFEENPINASGVDAKAILSARLSKSRRLENLIAQLPGEKKNGLFGNLIALSLGLTPNFKSNFDLAEDAKLQLSKDTYDDDLDNLLAQIGDQYADLFLAAKNLSDAILLSDILRVNTEITKAPLSASMIKRYDEHHQDLTLLKALVRQQLPEKYKEIFFDQSKNGYAGYIDGGASQEEFYKFIKPILEKMDGTEELLVKLNREDLLRKQRTFDNGSIPHQIHLGELHAILRRQEDFYPFLKDNREKIEKILTFRIPYYVGPLARGNSRFAWMTRKSEETITPWNFEEVVDKGASAQSFIERMTNFDKNLPNEKVLPKHSLLYEYFTVYNELTKVKYVTEGMRKPAFLSGEQKKAIVDLLFKTNRKVTVKQLKEDYFKKIECFDSVEISGVEDRFNASLGTYHDLLKIIKDKDFLDNEENEDILEDIVLTLTLFEDREMIEERLKTYAHLFDDKVMKQLKRRRYTGWGRLSRKLINGIRDKQSGKTILDFLKSDGFANRNFMQLIHDDSLTFKEDIQKAQVSGQGDSLHEHIANLAGSPAIKKGILQTVKVVDELVKVMGRHKPENIVIEMARENQTTQKGQKNSRERMKRIEEGIKELGSQILKEHPVENTQLQNEKLYLYYLQNGRDMYVDQELDINRLSDYDVDHIVPQSFLKDDSIDNKVLTRSDKARGKSDNVPSEEVVKKMKNYWRQLLNAKLITQRKFDNLTKAERGGLSELDKAGFIKRQLVETRQITKHVAQILDSRMNTKYDENDKLIREVKVITLKSKLVSDFRKDFQFYKVREINNYHHAHDAYLNAVVGTALIKKYPKLESEFVYGDYKVYDVRKMIAKSEQEIGKATAKYFFYSNIMNFFKTEITLANGEIRKRPLIETNGETGEIVWDKGRDFATVRKVLSMPQVNIVKKTEVQTGGFSKESILPKRNSDKLIARKKDWDPKKYGGFDSPTVAYSVLVVAKVEKGKSKKLKSVKELLGITIMERSSFEKNPIDFLEAKGYKEVKKDLIIKLPKYSLFELENGRKRMLASAGELQKGNELALPSKYVNFLYLASHYEKLKGSPEDNEQKQLFVEQHKHYLDEIIEQISEFSKRVILADANLDKVLSAYNKHRDKPIREQAENIIHLFTLTNLGAPAAFKYFDTTIDRKRYTSTKEVLDATLIHQSITGLYETRIDLSQLGGDGGEAAAKGGGGSSGGLDDEYRLYSPLVKPDQNIQFWLEQFPQAWAETAGMGLAKQVPPQVIQLKASATPVSVRQYPLSKEAQEGIRPHVQRLIQQGILVPVQSPWNTPLLPVRKPGTNDYRPVQDLREVNKRVQDIHPTVPNPYNLLCALPPQRSWYTVLDLKDAFFCLRLHPTSQPLFAFEWRDPGTGRTGQLTWTRLPQGFKNSPTIFNEALHRDLANFRIQHPQVTLLQYVDDLLLAGATKQDCLEGTKALLLELSDLGYRASAKKAQICRREVTYLGYSLRDGQRWLTEARKKTVVQIPAPTTAKQVREFLGKAGFCRLFIPGFATLAAPLYPLTKPKGEFSWAPEHQKAFDAIKKALLSAPALALPDVTKPFTLYVDERKGVARGVLTQTLGPWRRPVAYLSKKLDPVASGWPVCLKAIAAVAILVKDADKLTLGQNITVIAPHALENIVRQPPDRWMTNARMTHYQSLLLTERVTFAPPAALNPATLLPEETDEPVTHDCHQLLIEETGVRKDLTDIPLTGEVLTWFTDGSSYVVEGKRMAGAAVVDGTRTIWASSLPEGTSAQKAELMALTQALRLAEGKSINIYTDSRYAFATAHVHGAIYKQRGWLTSAGREIKNKEEILSLLEALHLPKRLAIIHCPGHQKAKDPISRGNQMADRVAKQAAQGVNLLPAGKRTADGSEFEKRTADGSEFESPKKKAKVE

SEQ ID NO: 54 - protein, 2090 aa, synthetic construct
MPAAKRVKLDGGDKKYSIGLDIGTNSVGWAVITDEYKVPSKKFKVLGNTDRHSIKKNLIGALLFDSGETAEATRLKRTARRRYTRRKNRICYLQEIFSNEMAKVDDSFFHRLEESFLVEEDKKHERHPIFGNIVDEVAYHEKYPTIYHLRKKLVDSTDKADLRLIYLALAHMIKFRGHFLIEGDLNPDNSDVDKLFIQLVQTYNQLFEENPINASGVDAKAILSARLSKSRRLENLIAQLPGEKKNGLFGNLIALSLGLTPNFKSNFDLAEDAKLQLSKDTYDDDLDNLLAQIGDQYADLFLAAKNLSDAILLSDILRVNTEITKAPLSASMIKRYDEHHQDLTLLKALVRQQLPEKYKEIFFDQSKNGYAGYIDGGASQEEFYKFIKPILEKMDGTEELLVKLNREDLLRKQRTFDNGSIPHQIHLGELHAILRRQEDFYPFLKDNREKIEKILTFRIPYYVGPLARGNSRFAWMTRKSEETITPWNFEEVVDKGASAQSFIERMTNFDKNLPNEKVLPKHSLLYEYFTVYNELTKVKYVTEGMRKPAFLSGEQKKAIVDLLFKTNRKVTVKQLKEDYFKKIECFDSVEISGVEDRFNASLGTYHDLLKIIKDKDFLDNEENEDILEDIVLTLTLFEDREMIEERLKTYAHLFDDKVMKQLKRRRYTGWGRLSRKLINGIRDKQSGKTILDFLKSDGFANRNFMQLIHDDSLTFKEDIQKAQVSGQGDSLHEHIANLAGSPAIKKGILQTVKVVDELVKVMGRHKPENIVIEMARENQTTQKGQKNSRERMKRIEEGIKELGSQILKEHPVENTQLQNEKLYLYYLQNGRDMYVDQELDINRLSDYDVDHIVPQSFLKDDSIDNKVLTRSDKARGKSDNVPSEEVVKKMKNYWRQLLNAKLITQRKFDNLTKAERGGLSELDKAGFIKRQLVETRQITKHVAQILDSRMNTKYDENDKLIREVKVITLKSKLVSDFRKDFQFYKVREINNYHHAHDAYLNAVVGTALIKKYPKLESEFVYGDYKVYDVRKMIAKSEQEIGKATAKYFFYSNIMNFFKTEITLANGEIRKRPLIETNGETGEIVWDKGRDFATVRKVLSMPQVNIVKKTEVQTGGFSKESILPKRNSDKLIARKKDWDPKKYGGFDSPTVAYSVLVVAKVEKGKSKKLKSVKELLGITIMERSSFEKNPIDFLEAKGYKEVKKDLIIKLPKYSLFELENGRKRMLASAGELQKGNELALPSKYVNFLYLASHYEKLKGSPEDNEQKQLFVEQHKHYLDEIIEQISEFSKRVILADANLDKVLSAYNKHRDKPIREQAENIIHLFTLTNLGAPAAFKYFDTTIDRKRYTSTKEVLDATLIHQSITGLYETRIDLSQLGGDGGPAPAPAPAPAPAPGGLDDEYRLYSPLVKPDQNIQFWLEQFPQAWAETAGMGLAKQVPPQVIQLKASATPVSVRQYPLSKEAQEGIRPHVQRLIQQGILVPVQSPWNTPLLPVRKPGTNDYRPVQDLREVNKRVQDIHPTVPNPYNLLCALPPQRSWYTVLDLKDAFFCLRLHPTSQPLFAFEWRDPGTGRTGQLTWTRLPQGFKNSPTIFNEALHRDLANFRIQHPQVTLLQYVDDLLLAGATKQDCLEGTKALLLELSDLGYRASAKKAQICRREVTYLGYSLRDGQRWLTEARKKTVVQIPAPTTAKQVREFLGKAGFCRLFIPGFATLAAPLYPLTKPKGEFSWAPEHQKAFDAIKKALLSAPALALPDVTKPFTLYVDERKGVARGVLTQTLGPWRRPVAYLSKKLDPVASGWPVCLKAIAAVAILVKDADKLTLGQNITVIAPHALENIVRQPPDRWMTNARMTHYQSLLLTERVTFAPPAALNPATLLPEETDEPVTHDCHQLLIEETGVRKDLTDIPLTGEVLTWFTDGSSYVVEGKRMAGAAVVDGTRTIWASSLPEGTSAQKAELMALTQALRLAEGKSINIYTDSRYAFATAHVHGAIYKQRGWLTSAGREIKNKEEILSLLEALHLPKRLAIIHCPGHQKAKDPISRGNQMADRVAKQAAQGVNLLPAGKRTADGSEFEKRTADGSEFESPKKKAKVE

SEQ ID NO: 55 - protein, 2087 aa, synthetic construct
MPAAKRVKLDGGDKKYSIGLDIGTNSVGWAVITDEYKVPSKKFKVLGNTDRHSIKKNLIGALLFDSGETAEATRLKRTARRRYTRRKNRICYLQEIFSNEMAKVDDSFFHRLEESFLVEEDKKHERHPIFGNIVDEVAYHEKYPTIYHLRKKLVDSTDKADLRLIYLALAHMIKFRGHFLIEGDLNPDNSDVDKLFIQLVQTYNQLFEENPINASGVDAKAILSARLSKSRRLENLIAQLPGEKKNGLFGNLIALSLGLTPNFKSNFDLAEDAKLQLSKDTYDDDLDNLLAQIGDQYADLFLAAKNLSDAILLSDILRVNTEITKAPLSASMIKRYDEHHQDLTLLKALVRQQLPEKYKEIFFDQSKNGYAGYIDGGASQEEFYKFIKPILEKMDGTEELLVKLNREDLLRKQRTFDNGSIPHQIHLGELHAILRRQEDFYPFLKDNREKIEKILTFRIPYYVGPLARGNSRFAWMTRKSEETITPWNFEEVVDKGASAQSFIERMTNFDKNLPNEKVLPKHSLLYEYFTVYNELTKVKYVTEGMRKPAFLSGEQKKAIVDLLFKTNRKVTVKQLKEDYFKKIECFDSVEISGVEDRFNASLGTYHDLLKIIKDKDFLDNEENEDILEDIVLTLTLFEDREMIEERLKTYAHLFDDKVMKQLKRRRYTGWGRLSRKLINGIRDKQSGKTILDFLKSDGFANRNFMQLIHDDSLTFKEDIQKAQVSGQGDSLHEHIANLAGSPAIKKGILQTVKVVDELVKVMGRHKPENIVIEMARENQTTQKGQKNSRERMKRIEEGIKELGSQILKEHPVENTQLQNEKLYLYYLQNGRDMYVDQELDINRLSDYDVDHIVPQSFLKDDSIDNKVLTRSDKARGKSDNVPSEEVVKKMKNYWRQLLNAKLITQRKFDNLTKAERGGLSELDKAGFIKRQLVETRQITKHVAQILDSRMNTKYDENDKLIREVKVITLKSKLVSDFRKDFQFYKVREINNYHHAHDAYLNAVVGTALIKKYPKLESEFVYGDYKVYDVRKMIAKSEQEIGKATAKYFFYSNIMNFFKTEITLANGEIRKRPLIETNGETGEIVWDKGRDFATVRKVLSMPQVNIVKKTEVQTGGFSKESILPKRNSDKLIARKKDWDPKKYGGFDSPTVAYSVLVVAKVEKGKSKKLKSVKELLGITIMERSSFEKNPIDFLEAKGYKEVKKDLIIKLPKYSLFELENGRKRMLASAGELQKGNELALPSKYVNFLYLASHYEKLKGSPEDNEQKQLFVEQHKHYLDEIIEQISEFSKRVILADANLDKVLSAYNKHRDKPIREQAENIIHLFTLTNLGAPAAFKYFDTTIDRKRYTSTKEVLDATLIHQSITGLYETRIDLSQLGGDGGGGGGSGGGGSGGLDDEYRLYSPLVKPDQNIQFWLEQFPQAWAETAGMGLAKQVPPQVIQLKASATPVSVRQYPLSKEAQEGIRPHVQRLIQQGILVPVQSPWNTPLLPVRKPGTNDYRPVQDLREVNKRVQDIHPTVPNPYNLLCALPPQRSWYTVLDLKDAFFCLRLHPTSQPLFAFEWRDPGTGRTGQLTWTRLPQGFKNSPTIFNEALHRDLANFRIQHPQVTLLQYVDDLLLAGATKQDCLEGTKALLLELSDLGYRASAKKAQICRREVTYLGYSLRDGQRWLTEARKKTVVQIPAPTTAKQVREFLGKAGFCRLFIPGFATLAAPLYPLTKPKGEFSWAPEHQKAFDAIKKALLSAPALALPDVTKPFTLYVDERKGVARGVLTQTLGPWRRPVAYLSKKLDPVASGWPVCLKAIAAVAILVKDADKLTLGQNITVIAPHALENIVRQPPDRWMTNARMTHYQSLLLTERVTFAPPAALNPATLLPEETDEPVTHDCHQLLIEETGVRKDLTDIPLTGEVLTWFTDGSSYVVEGKRMAGAAVVDGTRTIWASSLPEGTSAQKAELMALTQALRLAEGKSINIYTDSRYAFATAHVHGAIYKQRGWLTSAGREIKNKEEILSLLEALHLPKRLAIIHCPGHQKAKDPISRGNQMADRVAKQAAQGVNLLPAGKRTADGSEFEKRTADGSEFESPKKKAKVE

SEQ ID NO: 56 - protein, 2092 aa, synthetic construct
MPAAKRVKLDGGDKKYSIGLDIGTNSVGWAVITDEYKVPSKKFKVLGNTDRHSIKKNLIGALLFDSGETAEATRLKRTARRRYTRRKNRICYLQEIFSNEMAKVDDSFFHRLEESFLVEEDKKHERHPIFGNIVDEVAYHEKYPTIYHLRKKLVDSTDKADLRLIYLALAHMIKFRGHFLIEGDLNPDNSDVDKLFIQLVQTYNQLFEENPINASGVDAKAILSARLSKSRRLENLIAQLPGEKKNGLFGNLIALSLGLTPNFKSNFDLAEDAKLQLSKDTYDDDLDNLLAQIGDQYADLFLAAKNLSDAILLSDILRVNTEITKAPLSASMIKRYDEHHQDLTLLKALVRQQLPEKYKEIFFDQSKNGYAGYIDGGASQEEFYKFIKPILEKMDGTEELLVKLNREDLLRKQRTFDNGSIPHQIHLGELHAILRRQEDFYPFLKDNREKIEKILTFRIPYYVGPLARGNSRFAWMTRKSEETITPWNFEEVVDKGASAQSFIERMTNFDKNLPNEKVLPKHSLLYEYFTVYNELTKVKYVTEGMRKPAFLSGEQKKAIVDLLFKTNRKVTVKQLKEDYFKKIECFDSVEISGVEDRFNASLGTYHDLLKIIKDKDFLDNEENEDILEDIVLTLTLFEDREMIEERLKTYAHLFDDKVMKQLKRRRYTGWGRLSRKLINGIRDKQSGKTILDFLKSDGFANRNFMQLIHDDSLTFKEDIQKAQVSGQGDSLHEHIANLAGSPAIKKGILQTVKVVDELVKVMGRHKPENIVIEMARENQTTQKGQKNSRERMKRIEEGIKELGSQILKEHPVENTQLQNEKLYLYYLQNGRDMYVDQELDINRLSDYDVDHIVPQSFLKDDSIDNKVLTRSDKARGKSDNVPSEEVVKKMKNYWRQLLNAKLITQRKFDNLTKAERGGLSELDKAGFIKRQLVETRQITKHVAQILDSRMNTKYDENDKLIREVKVITLKSKLVSDFRKDFQFYKVREINNYHHAHDAYLNAVVGTALIKKYPKLESEFVYGDYKVYDVRKMIAKSEQEIGKATAKYFFYSNIMNFFKTEITLANGEIRKRPLIETNGETGEIVWDKGRDFATVRKVLSMPQVNIVKKTEVQTGGFSKESILPKRNSDKLIARKKDWDPKKYGGFDSPTVAYSVLVVAKVEKGKSKKLKSVKELLGITIMERSSFEKNPIDFLEAKGYKEVKKDLIIKLPKYSLFELENGRKRMLASAGELQKGNELALPSKYVNFLYLASHYEKLKGSPEDNEQKQLFVEQHKHYLDEIIEQISEFSKRVILADANLDKVLSAYNKHRDKPIREQAENIIHLFTLTNLGAPAAFKYFDTTIDRKRYTSTKEVLDATLIHQSITGLYETRIDLSQLGGDGGEAAAKGGGGSEAAAKGGLDDEYRLYSPLVKPDQNIQFWLEQFPQAWAETAGMGLAKQVPPQVIQLKASATPVSVRQYPLSKEAQEGIRPHVQRLIQQGILVPVQSPWNTPLLPVRKPGTNDYRPVQDLREVNKRVQDIHPTVPNPYNLLCALPPQRSWYTVLDLKDAFFCLRLHPTSQPLFAFEWRDPGTGRTGQLTWTRLPQGFKNSPTIFNEALHRDLANFRIQHPQVTLLQYVDDLLLAGATKQDCLEGTKALLLELSDLGYRASAKKAQICRREVTYLGYSLRDGQRWLTEARKKTVVQIPAPTTAKQVREFLGKAGFCRLFIPGFATLAAPLYPLTKPKGEFSWAPEHQKAFDAIKKALLSAPALALPDVTKPFTLYVDERKGVARGVLTQTLGPWRRPVAYLSKKLDPVASGWPVCLKAIAAVAILVKDADKLTLGQNITVIAPHALENIVRQPPDRWMTNARMTHYQSLLLTERVTFAPPAALNPATLLPEETDEPVTHDCHQLLIEETGVRKDLTDIPLTGEVLTWFTDGSSYVVEGKRMAGAAVVDGTRTIWASSLPEGTSAQKAELMALTQALRLAEGKSINIYTDSRYAFATAHVHGAIYKQRGWLTSAGREIKNKEEILSLLEALHLPKRLAIIHCPGHQKAKDPISRGNQMADRVAKQAAQGVNLLPAGKRTADGSEFEKRTADGSEFESPKKKAKVE

SEQ ID NO: 57 - protein, 2085 aa, synthetic construct
MPAAKRVKLDGGDKKYSIGLDIGTNSVGWAVITDEYKVPSKKFKVLGNTDRHSIKKNLIGALLFDSGETAEATRLKRTARRRYTRRKNRICYLQEIFSNEMAKVDDSFFHRLEESFLVEEDKKHERHPIFGNIVDEVAYHEKYPTIYHLRKKLVDSTDKADLRLIYLALAHMIKFRGHFLIEGDLNPDNSDVDKLFIQLVQTYNQLFEENPINASGVDAKAILSARLSKSRRLENLIAQLPGEKKNGLFGNLIALSLGLTPNFKSNFDLAEDAKLQLSKDTYDDDLDNLLAQIGDQYADLFLAAKNLSDAILLSDILRVNTEITKAPLSASMIKRYDEHHQDLTLLKALVRQQLPEKYKEIFFDQSKNGYAGYIDGGASQEEFYKFIKPILEKMDGTEELLVKLNREDLLRKQRTFDNGSIPHQIHLGELHAILRRQEDFYPFLKDNREKIEKILTFRIPYYVGPLARGNSRFAWMTRKSEETITPWNFEEVVDKGASAQSFIERMTNFDKNLPNEKVLPKHSLLYEYFTVYNELTKVKYVTEGMRKPAFLSGEQKKAIVDLLFKTNRKVTVKQLKEDYFKKIECFDSVEISGVEDRFNASLGTYHDLLKIIKDKDFLDNEENEDILEDIVLTLTLFEDREMIEERLKTYAHLFDDKVMKQLKRRRYTGWGRLSRKLINGIRDKQSGKTILDFLKSDGFANRNFMQLIHDDSLTFKEDIQKAQVSGQGDSLHEHIANLAGSPAIKKGILQTVKVVDELVKVMGRHKPENIVIEMARENQTTQKGQKNSRERMKRIEEGIKELGSQILKEHPVENTQLQNEKLYLYYLQNGRDMYVDQELDINRLSDYDVDHIVPQSFLKDDSIDNKVLTRSDKARGKSDNVPSEEVVKKMKNYWRQLLNAKLITQRKFDNLTKAERGGLSELDKAGFIKRQLVETRQITKHVAQILDSRMNTKYDENDKLIREVKVITLKSKLVSDFRKDFQFYKVREINNYHHAHDAYLNAVVGTALIKKYPKLESEFVYGDYKVYDVRKMIAKSEQEIGKATAKYFFYSNIMNFFKTEITLANGEIRKRPLIETNGETGEIVWDKGRDFATVRKVLSMPQVNIVKKTEVQTGGFSKESILPKRNSDKLIARKKDWDPKKYGGFDSPTVAYSVLVVAKVEKGKSKKLKSVKELLGITIMERSSFEKNPIDFLEAKGYKEVKKDLIIKLPKYSLFELENGRKRMLASAGELQKGNELALPSKYVNFLYLASHYEKLKGSPEDNEQKQLFVEQHKHYLDEIIEQISEFSKRVILADANLDKVLSAYNKHRDKPIREQAENIIHLFTLTNLGAPAAFKYFDTTIDRKRYTSTKEVLDATLIHQSITGLYETRIDLSQLGGDGGGGGGGGGGGGLDDEYRLYSPLVKPDQNIQFWLEQFPQAWAETAGMGLAKQVPPQVIQLKASATPVSVRQYPLSKEAQEGIRPHVQRLIQQGILVPVQSPWNTPLLPVRKPGTNDYRPVQDLREVNKRVQDIHPTVPNPYNLLCALPPQRSWYTVLDLKDAFFCLRLHPTSQPLFAFEWRDPGTGRTGQLTWTRLPQGFKNSPTIFNEALHRDLANFRIQHPQVTLLQYVDDLLLAGATKQDCLEGTKALLLELSDLGYRASAKKAQICRREVTYLGYSLRDGQRWLTEARKKTVVQIPAPTTAKQVREFLGKAGFCRLFIPGFATLAAPLYPLTKPKGEFSWAPEHQKAFDAIKKALLSAPALALPDVTKPFTLYVDERKGVARGVLTQTLGPWRRPVAYLSKKLDPVASGWPVCLKAIAAVAILVKDADKLTLGQNITVIAPHALENIVRQPPDRWMTNARMTHYQSLLLTERVTFAPPAALNPATLLPEETDEPVTHDCHQLLIEETGVRKDLTDIPLTGEVLTWFTDGSSYVVEGKRMAGAAVVDGTRTIWASSLPEGTSAQKAELMALTQALRLAEGKSINIYTDSRYAFATAHVHGAIYKQRGWLTSAGREIKNKEEILSLLEALHLPKRLAIIHCPGHQKAKDPISRGNQMADRVAKQAAQGVNLLPAGKRTADGSEFEKRTADGSEFESPKKKAKVE

SEQ ID NO: 58 - protein, 2086 aa, synthetic construct
MPAAKRVKLDGGDKKYSIGLDIGTNSVGWAVITDEYKVPSKKFKVLGNTDRHSIKKNLIGALLFDSGETAEATRLKRTARRRYTRRKNRICYLQEIFSNEMAKVDDSFFHRLEESFLVEEDKKHERHPIFGNIVDEVAYHEKYPTIYHLRKKLVDSTDKADLRLIYLALAHMIKFRGHFLIEGDLNPDNSDVDKLFIQLVQTYNQLFEENPINASGVDAKAILSARLSKSRRLENLIAQLPGEKKNGLFGNLIALSLGLTPNFKSNFDLAEDAKLQLSKDTYDDDLDNLLAQIGDQYADLFLAAKNLSDAILLSDILRVNTEITKAPLSASMIKRYDEHHQDLTLLKALVRQQLPEKYKEIFFDQSKNGYAGYIDGGASQEEFYKFIKPILEKMDGTEELLVKLNREDLLRKQRTFDNGSIPHQIHLGELHAILRRQEDFYPFLKDNREKIEKILTFRIPYYVGPLARGNSRFAWMTRKSEETITPWNFEEVVDKGASAQSFIERMTNFDKNLPNEKVLPKHSLLYEYFTVYNELTKVKYVTEGMRKPAFLSGEQKKAIVDLLFKTNRKVTVKQLKEDYFKKIECFDSVEISGVEDRFNASLGTYHDLLKIIKDKDFLDNEENEDILEDIVLTLTLFEDREMIEERLKTYAHLFDDKVMKQLKRRRYTGWGRLSRKLINGIRDKQSGKTILDFLKSDGFANRNFMQLIHDDSLTFKEDIQKAQVSGQGDSLHEHIANLAGSPAIKKGILQTVKVVDELVKVMGRHKPENIVIEMARENQTTQKGQKNSRERMKRIEEGIKELGSQILKEHPVENTQLQNEKLYLYYLQNGRDMYVDQELDINRLSDYDVDHIVPQSFLKDDSIDNKVLTRSDKARGKSDNVPSEEVVKKMKNYWRQLLNAKLITQRKFDNLTKAERGGLSELDKAGFIKRQLVETRQITKHVAQILDSRMNTKYDENDKLIREVKVITLKSKLVSDFRKDFQFYKVREINNYHHAHDAYLNAVVGTALIKKYPKLESEFVYGDYKVYDVRKMIAKSEQEIGKATAKYFFYSNIMNFFKTEITLANGEIRKRPLIETNGETGEIVWDKGRDFATVRKVLSMPQVNIVKKTEVQTGGFSKESILPKRNSDKLIARKKDWDPKKYGGFDSPTVAYSVLVVAKVEKGKSKKLKSVKELLGITIMERSSFEKNPIDFLEAKGYKEVKKDLIIKLPKYSLFELENGRKRMLASAGELQKGNELALPSKYVNFLYLASHYEKLKGSPEDNEQKQLFVEQHKHYLDEIIEQISEFSKRVILADANLDKVLSAYNKHRDKPIREQAENIIHLFTLTNLGAPAAFKYFDTTIDRKRYTSTKEVLDATLIHQSITGLYETRIDLSQLGGDGGGGSPAPGGGGGLDDEYRLYSPLVKPDQNIQFWLEQFPQAWAETAGMGLAKQVPPQVIQLKASATPVSVRQYPLSKEAQEGIRPHVQRLIQQGILVPVQSPWNTPLLPVRKPGTNDYRPVQDLREVNKRVQDIHPTVPNPYNLLCALPPQRSWYTVLDLKDAFFCLRLHPTSQPLFAFEWRDPGTGRTGQLTWTRLPQGFKNSPTIFNEALHRDLANFRIQHPQVTLLQYVDDLLLAGATKQDCLEGTKALLLELSDLGYRASAKKAQICRREVTYLGYSLRDGQRWLTEARKKTVVQIPAPTTAKQVREFLGKAGFCRLFIPGFATLAAPLYPLTKPKGEFSWAPEHQKAFDAIKKALLSAPALALPDVTKPFTLYVDERKGVARGVLTQTLGPWRRPVAYLSKKLDPVASGWPVCLKAIAAVAILVKDADKLTLGQNITVIAPHALENIVRQPPDRWMTNARMTHYQSLLLTERVTFAPPAALNPATLLPEETDEPVTHDCHQLLIEETGVRKDLTDIPLTGEVLTWFTDGSSYVVEGKRMAGAAVVDGTRTIWASSLPEGTSAQKAELMALTQALRLAEGKSINIYTDSRYAFATAHVHGAIYKQRGWLTSAGREIKNKEEILSLLEALHLPKRLAIIHCPGHQKAKDPISRGNQMADRVAKQAAQGVNLLPAGKRTADGSEFEKRTADGSEFESPKKKAKVE

SEQ ID NO: 59 - protein, 2083 aa, synthetic construct
MPAAKRVKLDGGDKKYSIGLDIGTNSVGWAVITDEYKVPSKKFKVLGNTDRHSIKKNLIGALLFDSGETAEATRLKRTARRRYTRRKNRICYLQEIFSNEMAKVDDSFFHRLEESFLVEEDKKHERHPIFGNIVDEVAYHEKYPTIYHLRKKLVDSTDKADLRLIYLALAHMIKFRGHFLIEGDLNPDNSDVDKLFIQLVQTYNQLFEENPINASGVDAKAILSARLSKSRRLENLIAQLPGEKKNGLFGNLIALSLGLTPNFKSNFDLAEDAKLQLSKDTYDDDLDNLLAQIGDQYADLFLAAKNLSDAILLSDILRVNTEITKAPLSASMIKRYDEHHQDLTLLKALVRQQLPEKYKEIFFDQSKNGYAGYIDGGASQEEFYKFIKPILEKMDGTEELLVKLNREDLLRKQRTFDNGSIPHQIHLGELHAILRRQEDFYPFLKDNREKIEKILTFRIPYYVGPLARGNSRFAWMTRKSEETITPWNFEEVVDKGASAQSFIERMTNFDKNLPNEKVLPKHSLLYEYFTVYNELTKVKYVTEGMRKPAFLSGEQKKAIVDLLFKTNRKVTVKQLKEDYFKKIECFDSVEISGVEDRFNASLGTYHDLLKIIKDKDFLDNEENEDILEDIVLTLTLFEDREMIEERLKTYAHLFDDKVMKQLKRRRYTGWGRLSRKLINGIRDKQSGKTILDFLKSDGFANRNFMQLIHDDSLTFKEDIQKAQVSGQGDSLHEHIANLAGSPAIKKGILQTVKVVDELVKVMGRHKPENIVIEMARENQTTQKGQKNSRERMKRIEEGIKELGSQILKEHPVENTQLQNEKLYLYYLQNGRDMYVDQELDINRLSDYDVDHIVPQSFLKDDSIDNKVLTRSDKARGKSDNVPSEEVVKKMKNYWRQLLNAKLITQRKFDNLTKAERGGLSELDKAGFIKRQLVETRQITKHVAQILDSRMNTKYDENDKLIREVKVITLKSKLVSDFRKDFQFYKVREINNYHHAHDAYLNAVVGTALIKKYPKLESEFVYGDYKVYDVRKMIAKSEQEIGKATAKYFFYSNIMNFFKTEITLANGEIRKRPLIETNGETGEIVWDKGRDFATVRKVLSMPQVNIVKKTEVQTGGFSKESILPKRNSDKLIARKKDWDPKKYGGFDSPTVAYSVLVVAKVEKGKSKKLKSVKELLGITIMERSSFEKNPIDFLEAKGYKEVKKDLIIKLPKYSLFELENGRKRMLASAGELQKGNELALPSKYVNFLYLASHYEKLKGSPEDNEQKQLFVEQHKHYLDEIIEQISEFSKRVILADANLDKVLSAYNKHRDKPIREQAENIIHLFTLTNLGAPAAFKYFDTTIDRKRYTSTKEVLDATLIHQSITGLYETRIDLSQLGGDGGGGGGGGGGLDDEYRLYSPLVKPDQNIQFWLEQFPQAWAETAGMGLAKQVPPQVIQLKASATPVSVRQYPLSKEAQEGIRPHVQRLIQQGILVPVQSPWNTPLLPVRKPGTNDYRPVQDLREVNKRVQDIHPTVPNPYNLLCALPPQRSWYTVLDLKDAFFCLRLHPTSQPLFAFEWRDPGTGRTGQLTWTRLPQGFKNSPTIFNEALHRDLANFRIQHPQVTLLQYVDDLLLAGATKQDCLEGTKALLLELSDLGYRASAKKAQICRREVTYLGYSLRDGQRWLTEARKKTVVQIPAPTTAKQVREFLGKAGFCRLFIPGFATLAAPLYPLTKPKGEFSWAPEHQKAFDAIKKALLSAPALALPDVTKPFTLYVDERKGVARGVLTQTLGPWRRPVAYLSKKLDPVASGWPVCLKAIAAVAILVKDADKLTLGQNITVIAPHALENIVRQPPDRWMTNARMTHYQSLLLTERVTFAPPAALNPATLLPEETDEPVTHDCHQLLIEETGVRKDLTDIPLTGEVLTWFTDGSSYVVEGKRMAGAAVVDGTRTIWASSLPEGTSAQKAELMALTQALRLAEGKSINIYTDSRYAFATAHVHGAIYKQRGWLTSAGREIKNKEEILSLLEALHLPKRLAIIHCPGHQKAKDPISRGNQMADRVAKQAAQGVNLLPAGKRTADGSEFEKRTADGSEFESPKKKAKVE

SEQ ID NO: 60 - protein, 2086 aa, synthetic construct
MPAAKRVKLDGGDKKYSIGLDIGTNSVGWAVITDEYKVPSKKFKVLGNTDRHSIKKNLIGALLFDSGETAEATRLKRTARRRYTRRKNRICYLQEIFSNEMAKVDDSFFHRLEESFLVEEDKKHERHPIFGNIVDEVAYHEKYPTIYHLRKKLVDSTDKADLRLIYLALAHMIKFRGHFLIEGDLNPDNSDVDKLFIQLVQTYNQLFEENPINASGVDAKAILSARLSKSRRLENLIAQLPGEKKNGLFGNLIALSLGLTPNFKSNFDLAEDAKLQLSKDTYDDDLDNLLAQIGDQYADLFLAAKNLSDAILLSDILRVNTEITKAPLSASMIKRYDEHHQDLTLLKALVRQQLPEKYKEIFFDQSKNGYAGYIDGGASQEEFYKFIKPILEKMDGTEELLVKLNREDLLRKQRTFDNGSIPHQIHLGELHAILRRQEDFYPFLKDNREKIEKILTFRIPYYVGPLARGNSRFAWMTRKSEETITPWNFEEVVDKGASAQSFIERMTNFDKNLPNEKVLPKHSLLYEYFTVYNELTKVKYVTEGMRKPAFLSGEQKKAIVDLLFKTNRKVTVKQLKEDYFKKIECFDSVEISGVEDRFNASLGTYHDLLKIIKDKDFLDNEENEDILEDIVLTLTLFEDREMIEERLKTYAHLFDDKVMKQLKRRRYTGWGRLSRKLINGIRDKQSGKTILDFLKSDGFANRNFMQLIHDDSLTFKEDIQKAQVSGQGDSLHEHIANLAGSPAIKKGILQTVKVVDELVKVMGRHKPENIVIEMARENQTTQKGQKNSRERMKRIEEGIKELGSQILKEHPVENTQLQNEKLYLYYLQNGRDMYVDQELDINRLSDYDVDHIVPQSFLKDDSIDNKVLTRSDKARGKSDNVPSEEVVKKMKNYWRQLLNAKLITQRKFDNLTKAERGGLSELDKAGFIKRQLVETRQITKHVAQILDSRMNTKYDENDKLIREVKVITLKSKLVSDFRKDFQFYKVREINNYHHAHDAYLNAVVGTALIKKYPKLESEFVYGDYKVYDVRKMIAKSEQEIGKATAKYFFYSNIMNFFKTEITLANGEIRKRPLIETNGETGEIVWDKGRDFATVRKVLSMPQVNIVKKTEVQTGGFSKESILPKRNSDKLIARKKDWDPKKYGGFDSPTVAYSVLVVAKVEKGKSKKLKSVKELLGITIMERSSFEKNPIDFLEAKGYKEVKKDLIIKLPKYSLFELENGRKRMLASAGELQKGNELALPSKYVNFLYLASHYEKLKGSPEDNEQKQLFVEQHKHYLDEIIEQISEFSKRVILADANLDKVLSAYNKHRDKPIREQAENIIHLFTLTNLGAPAAFKYFDTTIDRKRYTSTKEVLDATLIHQSITGLYETRIDLSQLGGDGGPAPGGSGSSGGLDDEYRLYSPLVKPDQNIQFWLEQFPQAWAETAGMGLAKQVPPQVIQLKASATPVSVRQYPLSKEAQEGIRPHVQRLIQQGILVPVQSPWNTPLLPVRKPGTNDYRPVQDLREVNKRVQDIHPTVPNPYNLLCALPPQRSWYTVLDLKDAFFCLRLHPTSQPLFAFEWRDPGTGRTGQLTWTRLPQGFKNSPTIFNEALHRDLANFRIQHPQVTLLQYVDDLLLAGATKQDCLEGTKALLLELSDLGYRASAKKAQICRREVTYLGYSLRDGQRWLTEARKKTVVQIPAPTTAKQVREFLGKAGFCRLFIPGFATLAAPLYPLTKPKGEFSWAPEHQKAFDAIKKALLSAPALALPDVTKPFTLYVDERKGVARGVLTQTLGPWRRPVAYLSKKLDPVASGWPVCLKAIAAVAILVKDADKLTLGQNITVIAPHALENIVRQPPDRWMTNARMTHYQSLLLTERVTFAPPAALNPATLLPEETDEPVTHDCHQLLIEETGVRKDLTDIPLTGEVLTWFTDGSSYVVEGKRMAGAAVVDGTRTIWASSLPEGTSAQKAELMALTQALRLAEGKSINIYTDSRYAFATAHVHGAIYKQRGWLTSAGREIKNKEEILSLLEALHLPKRLAIIHCPGHQKAKDPISRGNQMADRVAKQAAQGVNLLPAGKRTADGSEFEKRTADGSEFESPKKKAKVE

SEQ ID NO: 61 - protein, 2083 aa, synthetic construct
MPAAKRVKLDGGDKKYSIGLDIGTNSVGWAVITDEYKVPSKKFKVLGNTDRHSIKKNLIGALLFDSGETAEATRLKRTARRRYTRRKNRICYLQEIFSNEMAKVDDSFFHRLEESFLVEEDKKHERHPIFGNIVDEVAYHEKYPTIYHLRKKLVDSTDKADLRLIYLALAHMIKFRGHFLIEGDLNPDNSDVDKLFIQLVQTYNQLFEENPINASGVDAKAILSARLSKSRRLENLIAQLPGEKKNGLFGNLIALSLGLTPNFKSNFDLAEDAKLQLSKDTYDDDLDNLLAQIGDQYADLFLAAKNLSDAILLSDILRVNTEITKAPLSASMIKRYDEHHQDLTLLKALVRQQLPEKYKEIFFDQSKNGYAGYIDGGASQEEFYKFIKPILEKMDGTEELLVKLNREDLLRKQRTFDNGSIPHQIHLGELHAILRRQEDFYPFLKDNREKIEKILTFRIPYYVGPLARGNSRFAWMTRKSEETITPWNFEEVVDKGASAQSFIERMTNFDKNLPNEKVLPKHSLLYEYFTVYNELTKVKYVTEGMRKPAFLSGEQKKAIVDLLFKTNRKVTVKQLKEDYFKKIECFDSVEISGVEDRFNASLGTYHDLLKIIKDKDFLDNEENEDILEDIVLTLTLFEDREMIEERLKTYAHLFDDKVMKQLKRRRYTGWGRLSRKLINGIRDKQSGKTILDFLKSDGFANRNFMQLIHDDSLTFKEDIQKAQVSGQGDSLHEHIANLAGSPAIKKGILQTVKVVDELVKVMGRHKPENIVIEMARENQTTQKGQKNSRERMKRIEEGIKELGSQILKEHPVENTQLQNEKLYLYYLQNGRDMYVDQELDINRLSDYDVDHIVPQSFLKDDSIDNKVLTRSDKARGKSDNVPSEEVVKKMKNYWRQLLNAKLITQRKFDNLTKAERGGLSELDKAGFIKRQLVETRQITKHVAQILDSRMNTKYDENDKLIREVKVITLKSKLVSDFRKDFQFYKVREINNYHHAHDAYLNAVVGTALIKKYPKLESEFVYGDYKVYDVRKMIAKSEQEIGKATAKYFFYSNIMNFFKTEITLANGEIRKRPLIETNGETGEIVWDKGRDFATVRKVLSMPQVNIVKKTEVQTGGFSKESILPKRNSDKLIARKKDWDPKKYGGFDSPTVAYSVLVVAKVEKGKSKKLKSVKELLGITIMERSSFEKNPIDFLEAKGYKEVKKDLIIKLPKYSLFELENGRKRMLASAGELQKGNELALPSKYVNFLYLASHYEKLKGSPEDNEQKQLFVEQHKHYLDEIIEQISEFSKRVILADANLDKVLSAYNKHRDKPIREQAENIIHLFTLTNLGAPAAFKYFDTTIDRKRYTSTKEVLDATLIHQSITGLYETRIDLSQLGGDGGPAPGSSGGLDDEYRLYSPLVKPDQNIQFWLEQFPQAWAETAGMGLAKQVPPQVIQLKASATPVSVRQYPLSKEAQEGIRPHVQRLIQQGILVPVQSPWNTPLLPVRKPGTNDYRPVQDLREVNKRVQDIHPTVPNPYNLLCALPPQRSWYTVLDLKDAFFCLRLHPTSQPLFAFEWRDPGTGRTGQLTWTRLPQGFKNSPTIFNEALHRDLANFRIQHPQVTLLQYVDDLLLAGATKQDCLEGTKALLLELSDLGYRASAKKAQICRREVTYLGYSLRDGQRWLTEARKKTVVQIPAPTTAKQVREFLGKAGFCRLFIPGFATLAAPLYPLTKPKGEFSWAPEHQKAFDAIKKALLSAPALALPDVTKPFTLYVDERKGVARGVLTQTLGPWRRPVAYLSKKLDPVASGWPVCLKAIAAVAILVKDADKLTLGQNITVIAPHALENIVRQPPDRWMTNARMTHYQSLLLTERVTFAPPAALNPATLLPEETDEPVTHDCHQLLIEETGVRKDLTDIPLTGEVLTWFTDGSSYVVEGKRMAGAAVVDGTRTIWASSLPEGTSAQKAELMALTQALRLAEGKSINIYTDSRYAFATAHVHGAIYKQRGWLTSAGREIKNKEEILSLLEALHLPKRLAIIHCPGHQKAKDPISRGNQMADRVAKQAAQGVNLLPAGKRTADGSEFEKRTADGSEFESPKKKAKVE

SEQ ID NO: 62 - protein, 2088 aa, synthetic construct
MPAAKRVKLDGGDKKYSIGLDIGTNSVGWAVITDEYKVPSKKFKVLGNTDRHSIKKNLIGALLFDSGETAEATRLKRTARRRYTRRKNRICYLQEIFSNEMAKVDDSFFHRLEESFLVEEDKKHERHPIFGNIVDEVAYHEKYPTIYHLRKKLVDSTDKADLRLIYLALAHMIKFRGHFLIEGDLNPDNSDVDKLFIQLVQTYNQLFEENPINASGVDAKAILSARLSKSRRLENLIAQLPGEKKNGLFGNLIALSLGLTPNFKSNFDLAEDAKLQLSKDTYDDDLDNLLAQIGDQYADLFLAAKNLSDAILLSDILRVNTEITKAPLSASMIKRYDEHHQDLTLLKALVRQQLPEKYKEIFFDQSKNGYAGYIDGGASQEEFYKFIKPILEKMDGTEELLVKLNREDLLRKQRTFDNGSIPHQIHLGELHAILRRQEDFYPFLKDNREKIEKILTFRIPYYVGPLARGNSRFAWMTRKSEETITPWNFEEVVDKGASAQSFIERMTNFDKNLPNEKVLPKHSLLYEYFTVYNELTKVKYVTEGMRKPAFLSGEQKKAIVDLLFKTNRKVTVKQLKEDYFKKIECFDSVEISGVEDRFNASLGTYHDLLKIIKDKDFLDNEENEDILEDIVLTLTLFEDREMIEERLKTYAHLFDDKVMKQLKRRRYTGWGRLSRKLINGIRDKQSGKTILDFLKSDGFANRNFMQLIHDDSLTFKEDIQKAQVSGQGDSLHEHIANLAGSPAIKKGILQTVKVVDELVKVMGRHKPENIVIEMARENQTTQKGQKNSRERMKRIEEGIKELGSQILKEHPVENTQLQNEKLYLYYLQNGRDMYVDQELDINRLSDYDVDHIVPQSFLKDDSIDNKVLTRSDKARGKSDNVPSEEVVKKMKNYWRQLLNAKLITQRKFDNLTKAERGGLSELDKAGFIKRQLVETRQITKHVAQILDSRMNTKYDENDKLIREVKVITLKSKLVSDFRKDFQFYKVREINNYHHAHDAYLNAVVGTALIKKYPKLESEFVYGDYKVYDVRKMIAKSEQEIGKATAKYFFYSNIMNFFKTEITLANGEIRKRPLIETNGETGEIVWDKGRDFATVRKVLSMPQVNIVKKTEVQTGGFSKESILPKRNSDKLIARKKDWDPKKYGGFDSPTVAYSVLVVAKVEKGKSKKLKSVKELLGITIMERSSFEKNPIDFLEAKGYKEVKKDLIIKLPKYSLFELENGRKRMLASAGELQKGNELALPSKYVNFLYLASHYEKLKGSPEDNEQKQLFVEQHKHYLDEIIEQISEFSKRVILADANLDKVLSAYNKHRDKPIREQAENIIHLFTLTNLGAPAAFKYFDTTIDRKRYTSTKEVLDATLIHQSITGLYETRIDLSQLGGDGGPAPAPAPAPAPGGLDDEYRLYSPLVKPDQNIQFWLEQFPQAWAETAGMGLAKQVPPQVIQLKASATPVSVRQYPLSKEAQEGIRPHVQRLIQQGILVPVQSPWNTPLLPVRKPGTNDYRPVQDLREVNKRVQDIHPTVPNPYNLLCALPPQRSWYTVLDLKDAFFCLRLHPTSQPLFAFEWRDPGTGRTGQLTWTRLPQGFKNSPTIFNEALHRDLANFRIQHPQVTLLQYVDDLLLAGATKQDCLEGTKALLLELSDLGYRASAKKAQICRREVTYLGYSLRDGQRWLTEARKKTVVQIPAPTTAKQVREFLGKAGFCRLFIPGFATLAAPLYPLTKPKGEFSWAPEHQKAFDAIKKALLSAPALALPDVTKPFTLYVDERKGVARGVLTQTLGPWRRPVAYLSKKLDPVASGWPVCLKAIAAVAILVKDADKLTLGQNITVIAPHALENIVRQPPDRWMTNARMTHYQSLLLTERVTFAPPAALNPATLLPEETDEPVTHDCHQLLIEETGVRKDLTDIPLTGEVLTWFTDGSSYVVEGKRMAGAAVVDGTRTIWASSLPEGTSAQKAELMALTQALRLAEGKSINIYTDSRYAFATAHVHGAIYKQRGWLTSAGREIKNKEEILSLLEALHLPKRLAIIHCPGHQKAKDPISRGNQMADRVAKQAAQGVNLLPAGKRTADGSEFEKRTADGSEFESPKKKAKVE

SEQ ID NO: 63 - protein, 2088 aa, synthetic construct
MPAAKRVKLDGGDKKYSIGLDIGTNSVGWAVITDEYKVPSKKFKVLGNTDRHSIKKNLIGALLFDSGETAEATRLKRTARRRYTRRKNRICYLQEIFSNEMAKVDDSFFHRLEESFLVEEDKKHERHPIFGNIVDEVAYHEKYPTIYHLRKKLVDSTDKADLRLIYLALAHMIKFRGHFLIEGDLNPDNSDVDKLFIQLVQTYNQLFEENPINASGVDAKAILSARLSKSRRLENLIAQLPGEKKNGLFGNLIALSLGLTPNFKSNFDLAEDAKLQLSKDTYDDDLDNLLAQIGDQYADLFLAAKNLSDAILLSDILRVNTEITKAPLSASMIKRYDEHHQDLTLLKALVRQQLPEKYKEIFFDQSKNGYAGYIDGGASQEEFYKFIKPILEKMDGTEELLVKLNREDLLRKQRTFDNGSIPHQIHLGELHAILRRQEDFYPFLKDNREKIEKILTFRIPYYVGPLARGNSRFAWMTRKSEETITPWNFEEVVDKGASAQSFIERMTNFDKNLPNEKVLPKHSLLYEYFTVYNELTKVKYVTEGMRKPAFLSGEQKKAIVDLLFKTNRKVTVKQLKEDYFKKIECFDSVEISGVEDRFNASLGTYHDLLKIIKDKDFLDNEENEDILEDIVLTLTLFEDREMIEERLKTYAHLFDDKVMKQLKRRRYTGWGRLSRKLINGIRDKQSGKTILDFLKSDGFANRNFMQLIHDDSLTFKEDIQKAQVSGQGDSLHEHIANLAGSPAIKKGILQTVKVVDELVKVMGRHKPENIVIEMARENQTTQKGQKNSRERMKRIEEGIKELGSQILKEHPVENTQLQNEKLYLYYLQNGRDMYVDQELDINRLSDYDVDHIVPQSFLKDDSIDNKVLTRSDKARGKSDNVPSEEVVKKMKNYWRQLLNAKLITQRKFDNLTKAERGGLSELDKAGFIKRQLVETRQITKHVAQILDSRMNTKYDENDKLIREVKVITLKSKLVSDFRKDFQFYKVREINNYHHAHDAYLNAVVGTALIKKYPKLESEFVYGDYKVYDVRKMIAKSEQEIGKATAKYFFYSNIMNFFKTEITLANGEIRKRPLIETNGETGEIVWDKGRDFATVRKVLSMPQVNIVKKTEVQTGGFSKESILPKRNSDKLIARKKDWDPKKYGGFDSPTVAYSVLVVAKVEKGKSKKLKSVKELLGITIMERSSFEKNPIDFLEAKGYKEVKKDLIIKLPKYSLFELENGRKRMLASAGELQKGNELALPSKYVNFLYLASHYEKLKGSPEDNEQKQLFVEQHKHYLDEIIEQISEFSKRVILADANLDKVLSAYNKHRDKPIREQAENIIHLFTLTNLGAPAAFKYFDTTIDRKRYTSTKEVLDATLIHQSITGLYETRIDLSQLGGDGGGGGEAAAKPAPGGLDDEYRLYSPLVKPDQNIQFWLEQFPQAWAETAGMGLAKQVPPQVIQLKASATPVSVRQYPLSKEAQEGIRPHVQRLIQQGILVPVQSPWNTPLLPVRKPGTNDYRPVQDLREVNKRVQDIHPTVPNPYNLLCALPPQRSWYTVLDLKDAFFCLRLHPTSQPLFAFEWRDPGTGRTGQLTWTRLPQGFKNSPTIFNEALHRDLANFRIQHPQVTLLQYVDDLLLAGATKQDCLEGTKALLLELSDLGYRASAKKAQICRREVTYLGYSLRDGQRWLTEARKKTVVQIPAPTTAKQVREFLGKAGFCRLFIPGFATLAAPLYPLTKPKGEFSWAPEHQKAFDAIKKALLSAPALALPDVTKPFTLYVDERKGVARGVLTQTLGPWRRPVAYLSKKLDPVASGWPVCLKAIAAVAILVKDADKLTLGQNITVIAPHALENIVRQPPDRWMTNARMTHYQSLLLTERVTFAPPAALNPATLLPEETDEPVTHDCHQLLIEETGVRKDLTDIPLTGEVLTWFTDGSSYVVEGKRMAGAAVVDGTRTIWASSLPEGTSAQKAELMALTQALRLAEGKSINIYTDSRYAFATAHVHGAIYKQRGWLTSAGREIKNKEEILSLLEALHLPKRLAIIHCPGHQKAKDPISRGNQMADRVAKQAAQGVNLLPAGKRTADGSEFEKRTADGSEFESPKKKAKVE

SEQ ID NO: 64 - protein, 2086 aa, synthetic construct
MPAAKRVKLDGGDKKYSIGLDIGTNSVGWAVITDEYKVPSKKFKVLGNTDRHSIKKNLIGALLFDSGETAEATRLKRTARRRYTRRKNRICYLQEIFSNEMAKVDDSFFHRLEESFLVEEDKKHERHPIFGNIVDEVAYHEKYPTIYHLRKKLVDSTDKADLRLIYLALAHMIKFRGHFLIEGDLNPDNSDVDKLFIQLVQTYNQLFEENPINASGVDAKAILSARLSKSRRLENLIAQLPGEKKNGLFGNLIALSLGLTPNFKSNFDLAEDAKLQLSKDTYDDDLDNLLAQIGDQYADLFLAAKNLSDAILLSDILRVNTEITKAPLSASMIKRYDEHHQDLTLLKALVRQQLPEKYKEIFFDQSKNGYAGYIDGGASQEEFYKFIKPILEKMDGTEELLVKLNREDLLRKQRTFDNGSIPHQIHLGELHAILRRQEDFYPFLKDNREKIEKILTFRIPYYVGPLARGNSRFAWMTRKSEETITPWNFEEVVDKGASAQSFIERMTNFDKNLPNEKVLPKHSLLYEYFTVYNELTKVKYVTEGMRKPAFLSGEQKKAIVDLLFKTNRKVTVKQLKEDYFKKIECFDSVEISGVEDRFNASLGTYHDLLKIIKDKDFLDNEENEDILEDIVLTLTLFEDREMIEERLKTYAHLFDDKVMKQLKRRRYTGWGRLSRKLINGIRDKQSGKTILDFLKSDGFANRNFMQLIHDDSLTFKEDIQKAQVSGQGDSLHEHIANLAGSPAIKKGILQTVKVVDELVKVMGRHKPENIVIEMARENQTTQKGQKNSRERMKRIEEGIKELGSQILKEHPVENTQLQNEKLYLYYLQNGRDMYVDQELDINRLSDYDVDHIVPQSFLKDDSIDNKVLTRSDKARGKSDNVPSEEVVKKMKNYWRQLLNAKLITQRKFDNLTKAERGGLSELDKAGFIKRQLVETRQITKHVAQILDSRMNTKYDENDKLIREVKVITLKSKLVSDFRKDFQFYKVREINNYHHAHDAYLNAVVGTALIKKYPKLESEFVYGDYKVYDVRKMIAKSEQEIGKATAKYFFYSNIMNFFKTEITLANGEIRKRPLIETNGETGEIVWDKGRDFATVRKVLSMPQVNIVKKTEVQTGGFSKESILPKRNSDKLIARKKDWDPKKYGGFDSPTVAYSVLVVAKVEKGKSKKLKSVKELLGITIMERSSFEKNPIDFLEAKGYKEVKKDLIIKLPKYSLFELENGRKRMLASAGELQKGNELALPSKYVNFLYLASHYEKLKGSPEDNEQKQLFVEQHKHYLDEIIEQISEFSKRVILADANLDKVLSAYNKHRDKPIREQAENIIHLFTLTNLGAPAAFKYFDTTIDRKRYTSTKEVLDATLIHQSITGLYETRIDLSQLGGDGGGSSGGSPAPGGLDDEYRLYSPLVKPDQNIQFWLEQFPQAWAETAGMGLAKQVPPQVIQLKASATPVSVRQYPLSKEAQEGIRPHVQRLIQQGILVPVQSPWNTPLLPVRKPGTNDYRPVQDLREVNKRVQDIHPTVPNPYNLLCALPPQRSWYTVLDLKDAFFCLRLHPTSQPLFAFEWRDPGTGRTGQLTWTRLPQGFKNSPTIFNEALHRDLANFRIQHPQVTLLQYVDDLLLAGATKQDCLEGTKALLLELSDLGYRASAKKAQICRREVTYLGYSLRDGQRWLTEARKKTVVQIPAPTTAKQVREFLGKAGFCRLFIPGFATLAAPLYPLTKPKGEFSWAPEHQKAFDAIKKALLSAPALALPDVTKPFTLYVDERKGVARGVLTQTLGPWRRPVAYLSKKLDPVASGWPVCLKAIAAVAILVKDADKLTLGQNITVIAPHALENIVRQPPDRWMTNARMTHYQSLLLTERVTFAPPAALNPATLLPEETDEPVTHDCHQLLIEETGVRKDLTDIPLTGEVLTWFTDGSSYVVEGKRMAGAAVVDGTRTIWASSLPEGTSAQKAELMALTQALRLAEGKSINIYTDSRYAFATAHVHGAIYKQRGWLTSAGREIKNKEEILSLLEALHLPKRLAIIHCPGHQKAKDPISRGNQMADRVAKQAAQGVNLLPAGKRTADGSEFEKRTADGSEFESPKKKAKVE

SEQ ID NO: 65 - protein, 2088 aa, synthetic construct
MPAAKRVKLDGGDKKYSIGLDIGTNSVGWAVITDEYKVPSKKFKVLGNTDRHSIKKNLIGALLFDSGETAEATRLKRTARRRYTRRKNRICYLQEIFSNEMAKVDDSFFHRLEESFLVEEDKKHERHPIFGNIVDEVAYHEKYPTIYHLRKKLVDSTDKADLRLIYLALAHMIKFRGHFLIEGDLNPDNSDVDKLFIQLVQTYNQLFEENPINASGVDAKAILSARLSKSRRLENLIAQLPGEKKNGLFGNLIALSLGLTPNFKSNFDLAEDAKLQLSKDTYDDDLDNLLAQIGDQYADLFLAAKNLSDAILLSDILRVNTEITKAPLSASMIKRYDEHHQDLTLLKALVRQQLPEKYKEIFFDQSKNGYAGYIDGGASQEEFYKFIKPILEKMDGTEELLVKLNREDLLRKQRTFDNGSIPHQIHLGELHAILRRQEDFYPFLKDNREKIEKILTFRIPYYVGPLARGNSRFAWMTRKSEETITPWNFEEVVDKGASAQSFIERMTNFDKNLPNEKVLPKHSLLYEYFTVYNELTKVKYVTEGMRKPAFLSGEQKKAIVDLLFKTNRKVTVKQLKEDYFKKIECFDSVEISGVEDRFNASLGTYHDLLKIIKDKDFLDNEENEDILEDIVLTLTLFEDREMIEERLKTYAHLFDDKVMKQLKRRRYTGWGRLSRKLINGIRDKQSGKTILDFLKSDGFANRNFMQLIHDDSLTFKEDIQKAQVSGQGDSLHEHIANLAGSPAIKKGILQTVKVVDELVKVMGRHKPENIVIEMARENQTTQKGQKNSRERMKRIEEGIKELGSQILKEHPVENTQLQNEKLYLYYLQNGRDMYVDQELDINRLSDYDVDHIVPQSFLKDDSIDNKVLTRSDKARGKSDNVPSEEVVKKMKNYWRQLLNAKLITQRKFDNLTKAERGGLSELDKAGFIKRQLVETRQITKHVAQILDSRMNTKYDENDKLIREVKVITLKSKLVSDFRKDFQFYKVREINNYHHAHDAYLNAVVGTALIKKYPKLESEFVYGDYKVYDVRKMIAKSEQEIGKATAKYFFYSNIMNFFKTEITLANGEIRKRPLIETNGETGEIVWDKGRDFATVRKVLSMPQVNIVKKTEVQTGGFSKESILPKRNSDKLIARKKDWDPKKYGGFDSPTVAYSVLVVAKVEKGKSKKLKSVKELLGITIMERSSFEKNPIDFLEAKGYKEVKKDLIIKLPKYSLFELENGRKRMLASAGELQKGNELALPSKYVNFLYLASHYEKLKGSPEDNEQKQLFVEQHKHYLDEIIEQISEFSKRVILADANLDKVLSAYNKHRDKPIREQAENIIHLFTLTNLGAPAAFKYFDTTIDRKRYTSTKEVLDATLIHQSITGLYETRIDLSQLGGDGGGGGEAAAKGGSGGLDDEYRLYSPLVKPDQNIQFWLEQFPQAWAETAGMGLAKQVPPQVIQLKASATPVSVRQYPLSKEAQEGIRPHVQRLIQQGILVPVQSPWNTPLLPVRKPGTNDYRPVQDLREVNKRVQDIHPTVPNPYNLLCALPPQRSWYTVLDLKDAFFCLRLHPTSQPLFAFEWRDPGTGRTGQLTWTRLPQGFKNSPTIFNEALHRDLANFRIQHPQVTLLQYVDDLLLAGATKQDCLEGTKALLLELSDLGYRASAKKAQICRREVTYLGYSLRDGQRWLTEARKKTVVQIPAPTTAKQVREFLGKAGFCRLFIPGFATLAAPLYPLTKPKGEFSWAPEHQKAFDAIKKALLSAPALALPDVTKPFTLYVDERKGVARGVLTQTLGPWRRPVAYLSKKLDPVASGWPVCLKAIAAVAILVKDADKLTLGQNITVIAPHALENIVRQPPDRWMTNARMTHYQSLLLTERVTFAPPAALNPATLLPEETDEPVTHDCHQLLIEETGVRKDLTDIPLTGEVLTWFTDGSSYVVEGKRMAGAAVVDGTRTIWASSLPEGTSAQKAELMALTQALRLAEGKSINIYTDSRYAFATAHVHGAIYKQRGWLTSAGREIKNKEEILSLLEALHLPKRLAIIHCPGHQKAKDPISRGNQMADRVAKQAAQGVNLLPAGKRTADGSEFEKRTADGSEFESPKKKAKVE

SEQ ID NO: 66 - protein, 2081 aa, synthetic construct
MPAAKRVKLDGGDKKYSIGLDIGTNSVGWAVITDEYKVPSKKFKVLGNTDRHSIKKNLIGALLFDSGETAEATRLKRTARRRYTRRKNRICYLQEIFSNEMAKVDDSFFHRLEESFLVEEDKKHERHPIFGNIVDEVAYHEKYPTIYHLRKKLVDSTDKADLRLIYLALAHMIKFRGHFLIEGDLNPDNSDVDKLFIQLVQTYNQLFEENPINASGVDAKAILSARLSKSRRLENLIAQLPGEKKNGLFGNLIALSLGLTPNFKSNFDLAEDAKLQLSKDTYDDDLDNLLAQIGDQYADLFLAAKNLSDAILLSDILRVNTEITKAPLSASMIKRYDEHHQDLTLLKALVRQQLPEKYKEIFFDQSKNGYAGYIDGGASQEEFYKFIKPILEKMDGTEELLVKLNREDLLRKQRTFDNGSIPHQIHLGELHAILRRQEDFYPFLKDNREKIEKILTFRIPYYVGPLARGNSRFAWMTRKSEETITPWNFEEVVDKGASAQSFIERMTNFDKNLPNEKVLPKHSLLYEYFTVYNELTKVKYVTEGMRKPAFLSGEQKKAIVDLLFKTNRKVTVKQLKEDYFKKIECFDSVEISGVEDRFNASLGTYHDLLKIIKDKDFLDNEENEDILEDIVLTLTLFEDREMIEERLKTYAHLFDDKVMKQLKRRRYTGWGRLSRKLINGIRDKQSGKTILDFLKSDGFANRNFMQLIHDDSLTFKEDIQKAQVSGQGDSLHEHIANLAGSPAIKKGILQTVKVVDELVKVMGRHKPENIVIEMARENQTTQKGQKNSRERMKRIEEGIKELGSQILKEHPVENTQLQNEKLYLYYLQNGRDMYVDQELDINRLSDYDVDHIVPQSFLKDDSIDNKVLTRSDKARGKSDNVPSEEVVKKMKNYWRQLLNAKLITQRKFDNLTKAERGGLSELDKAGFIKRQLVETRQITKHVAQILDSRMNTKYDENDKLIREVKVITLKSKLVSDFRKDFQFYKVREINNYHHAHDAYLNAVVGTALIKKYPKLESEFVYGDYKVYDVRKMIAKSEQEIGKATAKYFFYSNIMNFFKTEITLANGEIRKRPLIETNGETGEIVWDKGRDFATVRKVLSMPQVNIVKKTEVQTGGFSKESILPKRNSDKLIARKKDWDPKKYGGFDSPTVAYSVLVVAKVEKGKSKKLKSVKELLGITIMERSSFEKNPIDFLEAKGYKEVKKDLIIKLPKYSLFELENGRKRMLASAGELQKGNELALPSKYVNFLYLASHYEKLKGSPEDNEQKQLFVEQHKHYLDEIIEQISEFSKRVILADANLDKVLSAYNKHRDKPIREQAENIIHLFTLTNLGAPAAFKYFDTTIDRKRYTSTKEVLDATLIHQSITGLYETRIDLSQLGGDGGGGGGGGLDDEYRLYSPLVKPDQNIQFWLEQFPQAWAETAGMGLAKQVPPQVIQLKASATPVSVRQYPLSKEAQEGIRPHVQRLIQQGILVPVQSPWNTPLLPVRKPGTNDYRPVQDLREVNKRVQDIHPTVPNPYNLLCALPPQRSWYTVLDLKDAFFCLRLHPTSQPLFAFEWRDPGTGRTGQLTWTRLPQGFKNSPTIFNEALHRDLANFRIQHPQVTLLQYVDDLLLAGATKQDCLEGTKALLLELSDLGYRASAKKAQICRREVTYLGYSLRDGQRWLTEARKKTVVQIPAPTTAKQVREFLGKAGFCRLFIPGFATLAAPLYPLTKPKGEFSWAPEHQKAFDAIKKALLSAPALALPDVTKPFTLYVDERKGVARGVLTQTLGPWRRPVAYLSKKLDPVASGWPVCLKAIAAVAILVKDADKLTLGQNITVIAPHALENIVRQPPDRWMTNARMTHYQSLLLTERVTFAPPAALNPATLLPEETDEPVTHDCHQLLIEETGVRKDLTDIPLTGEVLTWFTDGSSYVVEGKRMAGAAVVDGTRTIWASSLPEGTSAQKAELMALTQALRLAEGKSINIYTDSRYAFATAHVHGAIYKQRGWLTSAGREIKNKEEILSLLEALHLPKRLAIIHCPGHQKAKDPISRGNQMADRVAKQAAQGVNLLPAGKRTADGSEFEKRTADGSEFESPKKKAKVE

SEQ ID NO: 67 - protein, 2089 aa, synthetic construct
MPAAKRVKLDGGDKKYSIGLDIGTNSVGWAVITDEYKVPSKKFKVLGNTDRHSIKKNLIGALLFDSGETAEATRLKRTARRRYTRRKNRICYLQEIFSNEMAKVDDSFFHRLEESFLVEEDKKHERHPIFGNIVDEVAYHEKYPTIYHLRKKLVDSTDKADLRLIYLALAHMIKFRGHFLIEGDLNPDNSDVDKLFIQLVQTYNQLFEENPINASGVDAKAILSARLSKSRRLENLIAQLPGEKKNGLFGNLIALSLGLTPNFKSNFDLAEDAKLQLSKDTYDDDLDNLLAQIGDQYADLFLAAKNLSDAILLSDILRVNTEITKAPLSASMIKRYDEHHQDLTLLKALVRQQLPEKYKEIFFDQSKNGYAGYIDGGASQEEFYKFIKPILEKMDGTEELLVKLNREDLLRKQRTFDNGSIPHQIHLGELHAILRRQEDFYPFLKDNREKIEKILTFRIPYYVGPLARGNSRFAWMTRKSEETITPWNFEEVVDKGASAQSFIERMTNFDKNLPNEKVLPKHSLLYEYFTVYNELTKVKYVTEGMRKPAFLSGEQKKAIVDLLFKTNRKVTVKQLKEDYFKKIECFDSVEISGVEDRFNASLGTYHDLLKIIKDKDFLDNEENEDILEDIVLTLTLFEDREMIEERLKTYAHLFDDKVMKQLKRRRYTGWGRLSRKLINGIRDKQSGKTILDFLKSDGFANRNFMQLIHDDSLTFKEDIQKAQVSGQGDSLHEHIANLAGSPAIKKGILQTVKVVDELVKVMGRHKPENIVIEMARENQTTQKGQKNSRERMKRIEEGIKELGSQILKEHPVENTQLQNEKLYLYYLQNGRDMYVDQELDINRLSDYDVDHIVPQSFLKDDSIDNKVLTRSDKARGKSDNVPSEEVVKKMKNYWRQLLNAKLITQRKFDNLTKAERGGLSELDKAGFIKRQLVETRQITKHVAQILDSRMNTKYDENDKLIREVKVITLKSKLVSDFRKDFQFYKVREINNYHHAHDAYLNAVVGTALIKKYPKLESEFVYGDYKVYDVRKMIAKSEQEIGKATAKYFFYSNIMNFFKTEITLANGEIRKRPLIETNGETGEIVWDKGRDFATVRKVLSMPQVNIVKKTEVQTGGFSKESILPKRNSDKLIARKKDWDPKKYGGFDSPTVAYSVLVVAKVEKGKSKKLKSVKELLGITIMERSSFEKNPIDFLEAKGYKEVKKDLIIKLPKYSLFELENGRKRMLASAGELQKGNELALPSKYVNFLYLASHYEKLKGSPEDNEQKQLFVEQHKHYLDEIIEQISEFSKRVILADANLDKVLSAYNKHRDKPIREQAENIIHLFTLTNLGAPAAFKYFDTTIDRKRYTSTKEVLDATLIHQSITGLYETRIDLSQLGGDGGGGSGGSGGSGGSGGLDDEYRLYSPLVKPDQNIQFWLEQFPQAWAETAGMGLAKQVPPQVIQLKASATPVSVRQYPLSKEAQEGIRPHVQRLIQQGILVPVQSPWNTPLLPVRKPGTNDYRPVQDLREVNKRVQDIHPTVPNPYNLLCALPPQRSWYTVLDLKDAFFCLRLHPTSQPLFAFEWRDPGTGRTGQLTWTRLPQGFKNSPTIFNEALHRDLANFRIQHPQVTLLQYVDDLLLAGATKQDCLEGTKALLLELSDLGYRASAKKAQICRREVTYLGYSLRDGQRWLTEARKKTVVQIPAPTTAKQVREFLGKAGFCRLFIPGFATLAAPLYPLTKPKGEFSWAPEHQKAFDAIKKALLSAPALALPDVTKPFTLYVDERKGVARGVLTQTLGPWRRPVAYLSKKLDPVASGWPVCLKAIAAVAILVKDADKLTLGQNITVIAPHALENIVRQPPDRWMTNARMTHYQSLLLTERVTFAPPAALNPATLLPEETDEPVTHDCHQLLIEETGVRKDLTDIPLTGEVLTWFTDGSSYVVEGKRMAGAAVVDGTRTIWASSLPEGTSAQKAELMALTQALRLAEGKSINIYTDSRYAFATAHVHGAIYKQRGWLTSAGREIKNKEEILSLLEALHLPKRLAIIHCPGHQKAKDPISRGNQMADRVAKQAAQGVNLLPAGKRTADGSEFEKRTADGSEFESPKKKAKVE

SEQ ID NO: 68 - protein, 2088 aa, synthetic construct
MPAAKRVKLDGGDKKYSIGLDIGTNSVGWAVITDEYKVPSKKFKVLGNTDRHSIKKNLIGALLFDSGETAEATRLKRTARRRYTRRKNRICYLQEIFSNEMAKVDDSFFHRLEESFLVEEDKKHERHPIFGNIVDEVAYHEKYPTIYHLRKKLVDSTDKADLRLIYLALAHMIKFRGHFLIEGDLNPDNSDVDKLFIQLVQTYNQLFEENPINASGVDAKAILSARLSKSRRLENLIAQLPGEKKNGLFGNLIALSLGLTPNFKSNFDLAEDAKLQLSKDTYDDDLDNLLAQIGDQYADLFLAAKNLSDAILLSDILRVNTEITKAPLSASMIKRYDEHHQDLTLLKALVRQQLPEKYKEIFFDQSKNGYAGYIDGGASQEEFYKFIKPILEKMDGTEELLVKLNREDLLRKQRTFDNGSIPHQIHLGELHAILRRQEDFYPFLKDNREKIEKILTFRIPYYVGPLARGNSRFAWMTRKSEETITPWNFEEVVDKGASAQSFIERMTNFDKNLPNEKVLPKHSLLYEYFTVYNELTKVKYVTEGMRKPAFLSGEQKKAIVDLLFKTNRKVTVKQLKEDYFKKIECFDSVEISGVEDRFNASLGTYHDLLKIIKDKDFLDNEENEDILEDIVLTLTLFEDREMIEERLKTYAHLFDDKVMKQLKRRRYTGWGRLSRKLINGIRDKQSGKTILDFLKSDGFANRNFMQLIHDDSLTFKEDIQKAQVSGQGDSLHEHIANLAGSPAIKKGILQTVKVVDELVKVMGRHKPENIVIEMARENQTTQKGQKNSRERMKRIEEGIKELGSQILKEHPVENTQLQNEKLYLYYLQNGRDMYVDQELDINRLSDYDVDHIVPQSFLKDDSIDNKVLTRSDKARGKSDNVPSEEVVKKMKNYWRQLLNAKLITQRKFDNLTKAERGGLSELDKAGFIKRQLVETRQITKHVAQILDSRMNTKYDENDKLIREVKVITLKSKLVSDFRKDFQFYKVREINNYHHAHDAYLNAVVGTALIKKYPKLESEFVYGDYKVYDVRKMIAKSEQEIGKATAKYFFYSNIMNFFKTEITLANGEIRKRPLIETNGETGEIVWDKGRDFATVRKVLSMPQVNIVKKTEVQTGGFSKESILPKRNSDKLIARKKDWDPKKYGGFDSPTVAYSVLVVAKVEKGKSKKLKSVKELLGITIMERSSFEKNPIDFLEAKGYKEVKKDLIIKLPKYSLFELENGRKRMLASAGELQKGNELALPSKYVNFLYLASHYEKLKGSPEDNEQKQLFVEQHKHYLDEIIEQISEFSKRVILADANLDKVLSAYNKHRDKPIREQAENIIHLFTLTNLGAPAAFKYFDTTIDRKRYTSTKEVLDATLIHQSITGLYETRIDLSQLGGDGGGGGGGSEAAAKGGLDDEYRLYSPLVKPDQNIQFWLEQFPQAWAETAGMGLAKQVPPQVIQLKASATPVSVRQYPLSKEAQEGIRPHVQRLIQQGILVPVQSPWNTPLLPVRKPGTNDYRPVQDLREVNKRVQDIHPTVPNPYNLLCALPPQRSWYTVLDLKDAFFCLRLHPTSQPLFAFEWRDPGTGRTGQLTWTRLPQGFKNSPTIFNEALHRDLANFRIQHPQVTLLQYVDDLLLAGATKQDCLEGTKALLLELSDLGYRASAKKAQICRREVTYLGYSLRDGQRWLTEARKKTVVQIPAPTTAKQVREFLGKAGFCRLFIPGFATLAAPLYPLTKPKGEFSWAPEHQKAFDAIKKALLSAPALALPDVTKPFTLYVDERKGVARGVLTQTLGPWRRPVAYLSKKLDPVASGWPVCLKAIAAVAILVKDADKLTLGQNITVIAPHALENIVRQPPDRWMTNARMTHYQSLLLTERVTFAPPAALNPATLLPEETDEPVTHDCHQLLIEETGVRKDLTDIPLTGEVLTWFTDGSSYVVEGKRMAGAAVVDGTRTIWASSLPEGTSAQKAELMALTQALRLAEGKSINIYTDSRYAFATAHVHGAIYKQRGWLTSAGREIKNKEEILSLLEALHLPKRLAIIHCPGHQKAKDPISRGNQMADRVAKQAAQGVNLLPAGKRTADGSEFEKRTADGSEFESPKKKAKVE

SEQ ID NO: 69 - protein, 2086 aa, synthetic construct
MPAAKRVKLDGGDKKYSIGLDIGTNSVGWAVITDEYKVPSKKFKVLGNTDRHSIKKNLIGALLFDSGETAEATRLKRTARRRYTRRKNRICYLQEIFSNEMAKVDDSFFHRLEESFLVEEDKKHERHPIFGNIVDEVAYHEKYPTIYHLRKKLVDSTDKADLRLIYLALAHMIKFRGHFLIEGDLNPDNSDVDKLFIQLVQTYNQLFEENPINASGVDAKAILSARLSKSRRLENLIAQLPGEKKNGLFGNLIALSLGLTPNFKSNFDLAEDAKLQLSKDTYDDDLDNLLAQIGDQYADLFLAAKNLSDAILLSDILRVNTEITKAPLSASMIKRYDEHHQDLTLLKALVRQQLPEKYKEIFFDQSKNGYAGYIDGGASQEEFYKFIKPILEKMDGTEELLVKLNREDLLRKQRTFDNGSIPHQIHLGELHAILRRQEDFYPFLKDNREKIEKILTFRIPYYVGPLARGNSRFAWMTRKSEETITPWNFEEVVDKGASAQSFIERMTNFDKNLPNEKVLPKHSLLYEYFTVYNELTKVKYVTEGMRKPAFLSGEQKKAIVDLLFKTNRKVTVKQLKEDYFKKIECFDSVEISGVEDRFNASLGTYHDLLKIIKDKDFLDNEENEDILEDIVLTLTLFEDREMIEERLKTYAHLFDDKVMKQLKRRRYTGWGRLSRKLINGIRDKQSGKTILDFLKSDGFANRNFMQLIHDDSLTFKEDIQKAQVSGQGDSLHEHIANLAGSPAIKKGILQTVKVVDELVKVMGRHKPENIVIEMARENQTTQKGQKNSRERMKRIEEGIKELGSQILKEHPVENTQLQNEKLYLYYLQNGRDMYVDQELDINRLSDYDVDHIVPQSFLKDDSIDNKVLTRSDKARGKSDNVPSEEVVKKMKNYWRQLLNAKLITQRKFDNLTKAERGGLSELDKAGFIKRQLVETRQITKHVAQILDSRMNTKYDENDKLIREVKVITLKSKLVSDFRKDFQFYKVREINNYHHAHDAYLNAVVGTALIKKYPKLESEFVYGDYKVYDVRKMIAKSEQEIGKATAKYFFYSNIMNFFKTEITLANGEIRKRPLIETNGETGEIVWDKGRDFATVRKVLSMPQVNIVKKTEVQTGGFSKESILPKRNSDKLIARKKDWDPKKYGGFDSPTVAYSVLVVAKVEKGKSKKLKSVKELLGITIMERSSFEKNPIDFLEAKGYKEVKKDLIIKLPKYSLFELENGRKRMLASAGELQKGNELALPSKYVNFLYLASHYEKLKGSPEDNEQKQLFVEQHKHYLDEIIEQISEFSKRVILADANLDKVLSAYNKHRDKPIREQAENIIHLFTLTNLGAPAAFKYFDTTIDRKRYTSTKEVLDATLIHQSITGLYETRIDLSQLGGDGGGSSPAPGGSGGLDDEYRLYSPLVKPDQNIQFWLEQFPQAWAETAGMGLAKQVPPQVIQLKASATPVSVRQYPLSKEAQEGIRPHVQRLIQQGILVPVQSPWNTPLLPVRKPGTNDYRPVQDLREVNKRVQDIHPTVPNPYNLLCALPPQRSWYTVLDLKDAFFCLRLHPTSQPLFAFEWRDPGTGRTGQLTWTRLPQGFKNSPTIFNEALHRDLANFRIQHPQVTLLQYVDDLLLAGATKQDCLEGTKALLLELSDLGYRASAKKAQICRREVTYLGYSLRDGQRWLTEARKKTVVQIPAPTTAKQVREFLGKAGFCRLFIPGFATLAAPLYPLTKPKGEFSWAPEHQKAFDAIKKALLSAPALALPDVTKPFTLYVDERKGVARGVLTQTLGPWRRPVAYLSKKLDPVASGWPVCLKAIAAVAILVKDADKLTLGQNITVIAPHALENIVRQPPDRWMTNARMTHYQSLLLTERVTFAPPAALNPATLLPEETDEPVTHDCHQLLIEETGVRKDLTDIPLTGEVLTWFTDGSSYVVEGKRMAGAAVVDGTRTIWASSLPEGTSAQKAELMALTQALRLAEGKSINIYTDSRYAFATAHVHGAIYKQRGWLTSAGREIKNKEEILSLLEALHLPKRLAIIHCPGHQKAKDPISRGNQMADRVAKQAAQGVNLLPAGKRTADGSEFEKRTADGSEFESPKKKAKVE

SEQ ID NO: 70 - protein, 2082 aa, synthetic construct
MPAAKRVKLDGGDKKYSIGLDIGTNSVGWAVITDEYKVPSKKFKVLGNTDRHSIKKNLIGALLFDSGETAEATRLKRTARRRYTRRKNRICYLQEIFSNEMAKVDDSFFHRLEESFLVEEDKKHERHPIFGNIVDEVAYHEKYPTIYHLRKKLVDSTDKADLRLIYLALAHMIKFRGHFLIEGDLNPDNSDVDKLFIQLVQTYNQLFEENPINASGVDAKAILSARLSKSRRLENLIAQLPGEKKNGLFGNLIALSLGLTPNFKSNFDLAEDAKLQLSKDTYDDDLDNLLAQIGDQYADLFLAAKNLSDAILLSDILRVNTEITKAPLSASMIKRYDEHHQDLTLLKALVRQQLPEKYKEIFFDQSKNGYAGYIDGGASQEEFYKFIKPILEKMDGTEELLVKLNREDLLRKQRTFDNGSIPHQIHLGELHAILRRQEDFYPFLKDNREKIEKILTFRIPYYVGPLARGNSRFAWMTRKSEETITPWNFEEVVDKGASAQSFIERMTNFDKNLPNEKVLPKHSLLYEYFTVYNELTKVKYVTEGMRKPAFLSGEQKKAIVDLLFKTNRKVTVKQLKEDYFKKIECFDSVEISGVEDRFNASLGTYHDLLKIIKDKDFLDNEENEDILEDIVLTLTLFEDREMIEERLKTYAHLFDDKVMKQLKRRRYTGWGRLSRKLINGIRDKQSGKTILDFLKSDGFANRNFMQLIHDDSLTFKEDIQKAQVSGQGDSLHEHIANLAGSPAIKKGILQTVKVVDELVKVMGRHKPENIVIEMARENQTTQKGQKNSRERMKRIEEGIKELGSQILKEHPVENTQLQNEKLYLYYLQNGRDMYVDQELDINRLSDYDVDHIVPQSFLKDDSIDNKVLTRSDKARGKSDNVPSEEVVKKMKNYWRQLLNAKLITQRKFDNLTKAERGGLSELDKAGFIKRQLVETRQITKHVAQILDSRMNTKYDENDKLIREVKVITLKSKLVSDFRKDFQFYKVREINNYHHAHDAYLNAVVGTALIKKYPKLESEFVYGDYKVYDVRKMIAKSEQEIGKATAKYFFYSNIMNFFKTEITLANGEIRKRPLIETNGETGEIVWDKGRDFATVRKVLSMPQVNIVKKTEVQTGGFSKESILPKRNSDKLIARKKDWDPKKYGGFDSPTVAYSVLVVAKVEKGKSKKLKSVKELLGITIMERSSFEKNPIDFLEAKGYKEVKKDLIIKLPKYSLFELENGRKRMLASAGELQKGNELALPSKYVNFLYLASHYEKLKGSPEDNEQKQLFVEQHKHYLDEIIEQISEFSKRVILADANLDKVLSAYNKHRDKPIREQAENIIHLFTLTNLGAPAAFKYFDTTIDRKRYTSTKEVLDATLIHQSITGLYETRIDLSQLGGDGGGGGGGGGLDDEYRLYSPLVKPDQNIQFWLEQFPQAWAETAGMGLAKQVPPQVIQLKASATPVSVRQYPLSKEAQEGIRPHVQRLIQQGILVPVQSPWNTPLLPVRKPGTNDYRPVQDLREVNKRVQDIHPTVPNPYNLLCALPPQRSWYTVLDLKDAFFCLRLHPTSQPLFAFEWRDPGTGRTGQLTWTRLPQGFKNSPTIFNEALHRDLANFRIQHPQVTLLQYVDDLLLAGATKQDCLEGTKALLLELSDLGYRASAKKAQICRREVTYLGYSLRDGQRWLTEARKKTVVQIPAPTTAKQVREFLGKAGFCRLFIPGFATLAAPLYPLTKPKGEFSWAPEHQKAFDAIKKALLSAPALALPDVTKPFTLYVDERKGVARGVLTQTLGPWRRPVAYLSKKLDPVASGWPVCLKAIAAVAILVKDADKLTLGQNITVIAPHALENIVRQPPDRWMTNARMTHYQSLLLTERVTFAPPAALNPATLLPEETDEPVTHDCHQLLIEETGVRKDLTDIPLTGEVLTWFTDGSSYVVEGKRMAGAAVVDGTRTIWASSLPEGTSAQKAELMALTQALRLAEGKSINIYTDSRYAFATAHVHGAIYKQRGWLTSAGREIKNKEEILSLLEALHLPKRLAIIHCPGHQKAKDPISRGNQMADRVAKQAAQGVNLLPAGKRTADGSEFEKRTADGSEFESPKKKAKVE

SEQ ID NO: 71 - protein, 2088 aa, synthetic construct
MPAAKRVKLDGGDKKYSIGLDIGTNSVGWAVITDEYKVPSKKFKVLGNTDRHSIKKNLIGALLFDSGETAEATRLKRTARRRYTRRKNRICYLQEIFSNEMAKVDDSFFHRLEESFLVEEDKKHERHPIFGNIVDEVAYHEKYPTIYHLRKKLVDSTDKADLRLIYLALAHMIKFRGHFLIEGDLNPDNSDVDKLFIQLVQTYNQLFEENPINASGVDAKAILSARLSKSRRLENLIAQLPGEKKNGLFGNLIALSLGLTPNFKSNFDLAEDAKLQLSKDTYDDDLDNLLAQIGDQYADLFLAAKNLSDAILLSDILRVNTEITKAPLSASMIKRYDEHHQDLTLLKALVRQQLPEKYKEIFFDQSKNGYAGYIDGGASQEEFYKFIKPILEKMDGTEELLVKLNREDLLRKQRTFDNGSIPHQIHLGELHAILRRQEDFYPFLKDNREKIEKILTFRIPYYVGPLARGNSRFAWMTRKSEETITPWNFEEVVDKGASAQSFIERMTNFDKNLPNEKVLPKHSLLYEYFTVYNELTKVKYVTEGMRKPAFLSGEQKKAIVDLLFKTNRKVTVKQLKEDYFKKIECFDSVEISGVEDRFNASLGTYHDLLKIIKDKDFLDNEENEDILEDIVLTLTLFEDREMIEERLKTYAHLFDDKVMKQLKRRRYTGWGRLSRKLINGIRDKQSGKTILDFLKSDGFANRNFMQLIHDDSLTFKEDIQKAQVSGQGDSLHEHIANLAGSPAIKKGILQTVKVVDELVKVMGRHKPENIVIEMARENQTTQKGQKNSRERMKRIEEGIKELGSQILKEHPVENTQLQNEKLYLYYLQNGRDMYVDQELDINRLSDYDVDHIVPQSFLKDDSIDNKVLTRSDKARGKSDNVPSEEVVKKMKNYWRQLLNAKLITQRKFDNLTKAERGGLSELDKAGFIKRQLVETRQITKHVAQILDSRMNTKYDENDKLIREVKVITLKSKLVSDFRKDFQFYKVREINNYHHAHDAYLNAVVGTALIKKYPKLESEFVYGDYKVYDVRKMIAKSEQEIGKATAKYFFYSNIMNFFKTEITLANGEIRKRPLIETNGETGEIVWDKGRDFATVRKVLSMPQVNIVKKTEVQTGGFSKESILPKRNSDKLIARKKDWDPKKYGGFDSPTVAYSVLVVAKVEKGKSKKLKSVKELLGITIMERSSFEKNPIDFLEAKGYKEVKKDLIIKLPKYSLFELENGRKRMLASAGELQKGNELALPSKYVNFLYLASHYEKLKGSPEDNEQKQLFVEQHKHYLDEIIEQISEFSKRVILADANLDKVLSAYNKHRDKPIREQAENIIHLFTLTNLGAPAAFKYFDTTIDRKRYTSTKEVLDATLIHQSITGLYETRIDLSQLGGDGGEAAAKGGSGSSGGLDDEYRLYSPLVKPDQNIQFWLEQFPQAWAETAGMGLAKQVPPQVIQLKASATPVSVRQYPLSKEAQEGIRPHVQRLIQQGILVPVQSPWNTPLLPVRKPGTNDYRPVQDLREVNKRVQDIHPTVPNPYNLLCALPPQRSWYTVLDLKDAFFCLRLHPTSQPLFAFEWRDPGTGRTGQLTWTRLPQGFKNSPTIFNEALHRDLANFRIQHPQVTLLQYVDDLLLAGATKQDCLEGTKALLLELSDLGYRASAKKAQICRREVTYLGYSLRDGQRWLTEARKKTVVQIPAPTTAKQVREFLGKAGFCRLFIPGFATLAAPLYPLTKPKGEFSWAPEHQKAFDAIKKALLSAPALALPDVTKPFTLYVDERKGVARGVLTQTLGPWRRPVAYLSKKLDPVASGWPVCLKAIAAVAILVKDADKLTLGQNITVIAPHALENIVRQPPDRWMTNARMTHYQSLLLTERVTFAPPAALNPATLLPEETDEPVTHDCHQLLIEETGVRKDLTDIPLTGEVLTWFTDGSSYVVEGKRMAGAAVVDGTRTIWASSLPEGTSAQKAELMALTQALRLAEGKSINIYTDSRYAFATAHVHGAIYKQRGWLTSAGREIKNKEEILSLLEALHLPKRLAIIHCPGHQKAKDPISRGNQMADRVAKQAAQGVNLLPAGKRTADGSEFEKRTADGSEFESPKKKAKVE

SEQ ID NO: 72 - protein, 2088 aa, synthetic construct
MPAAKRVKLDGGDKKYSIGLDIGTNSVGWAVITDEYKVPSKKFKVLGNTDRHSIKKNLIGALLFDSGETAEATRLKRTARRRYTRRKNRICYLQEIFSNEMAKVDDSFFHRLEESFLVEEDKKHERHPIFGNIVDEVAYHEKYPTIYHLRKKLVDSTDKADLRLIYLALAHMIKFRGHFLIEGDLNPDNSDVDKLFIQLVQTYNQLFEENPINASGVDAKAILSARLSKSRRLENLIAQLPGEKKNGLFGNLIALSLGLTPNFKSNFDLAEDAKLQLSKDTYDDDLDNLLAQIGDQYADLFLAAKNLSDAILLSDILRVNTEITKAPLSASMIKRYDEHHQDLTLLKALVRQQLPEKYKEIFFDQSKNGYAGYIDGGASQEEFYKFIKPILEKMDGTEELLVKLNREDLLRKQRTFDNGSIPHQIHLGELHAILRRQEDFYPFLKDNREKIEKILTFRIPYYVGPLARGNSRFAWMTRKSEETITPWNFEEVVDKGASAQSFIERMTNFDKNLPNEKVLPKHSLLYEYFTVYNELTKVKYVTEGMRKPAFLSGEQKKAIVDLLFKTNRKVTVKQLKEDYFKKIECFDSVEISGVEDRFNASLGTYHDLLKIIKDKDFLDNEENEDILEDIVLTLTLFEDREMIEERLKTYAHLFDDKVMKQLKRRRYTGWGRLSRKLINGIRDKQSGKTILDFLKSDGFANRNFMQLIHDDSLTFKEDIQKAQVSGQGDSLHEHIANLAGSPAIKKGILQTVKVVDELVKVMGRHKPENIVIEMARENQTTQKGQKNSRERMKRIEEGIKELGSQILKEHPVENTQLQNEKLYLYYLQNGRDMYVDQELDINRLSDYDVDHIVPQSFLKDDSIDNKVLTRSDKARGKSDNVPSEEVVKKMKNYWRQLLNAKLITQRKFDNLTKAERGGLSELDKAGFIKRQLVETRQITKHVAQILDSRMNTKYDENDKLIREVKVITLKSKLVSDFRKDFQFYKVREINNYHHAHDAYLNAVVGTALIKKYPKLESEFVYGDYKVYDVRKMIAKSEQEIGKATAKYFFYSNIMNFFKTEITLANGEIRKRPLIETNGETGEIVWDKGRDFATVRKVLSMPQVNIVKKTEVQTGGFSKESILPKRNSDKLIARKKDWDPKKYGGFDSPTVAYSVLVVAKVEKGKSKKLKSVKELLGITIMERSSFEKNPIDFLEAKGYKEVKKDLIIKLPKYSLFELENGRKRMLASAGELQKGNELALPSKYVNFLYLASHYEKLKGSPEDNEQKQLFVEQHKHYLDEIIEQISEFSKRVILADANLDKVLSAYNKHRDKPIREQAENIIHLFTLTNLGAPAAFKYFDTTIDRKRYTSTKEVLDATLIHQSITGLYETRIDLSQLGGDGGEAAAKGGSGGGGGLDDEYRLYSPLVKPDQNIQFWLEQFPQAWAETAGMGLAKQVPPQVIQLKASATPVSVRQYPLSKEAQEGIRPHVQRLIQQGILVPVQSPWNTPLLPVRKPGTNDYRPVQDLREVNKRVQDIHPTVPNPYNLLCALPPQRSWYTVLDLKDAFFCLRLHPTSQPLFAFEWRDPGTGRTGQLTWTRLPQGFKNSPTIFNEALHRDLANFRIQHPQVTLLQYVDDLLLAGATKQDCLEGTKALLLELSDLGYRASAKKAQICRREVTYLGYSLRDGQRWLTEARKKTVVQIPAPTTAKQVREFLGKAGFCRLFIPGFATLAAPLYPLTKPKGEFSWAPEHQKAFDAIKKALLSAPALALPDVTKPFTLYVDERKGVARGVLTQTLGPWRRPVAYLSKKLDPVASGWPVCLKAIAAVAILVKDADKLTLGQNITVIAPHALENIVRQPPDRWMTNARMTHYQSLLLTERVTFAPPAALNPATLLPEETDEPVTHDCHQLLIEETGVRKDLTDIPLTGEVLTWFTDGSSYVVEGKRMAGAAVVDGTRTIWASSLPEGTSAQKAELMALTQALRLAEGKSINIYTDSRYAFATAHVHGAIYKQRGWLTSAGREIKNKEEILSLLEALHLPKRLAIIHCPGHQKAKDPISRGNQMADRVAKQAAQGVNLLPAGKRTADGSEFEKRTADGSEFESPKKKAKVE

SEQ ID NO: 73 - protein, 2086 aa, synthetic construct
MPAAKRVKLDGGDKKYSIGLDIGTNSVGWAVITDEYKVPSKKFKVLGNTDRHSIKKNLIGALLFDSGETAEATRLKRTARRRYTRRKNRICYLQEIFSNEMAKVDDSFFHRLEESFLVEEDKKHERHPIFGNIVDEVAYHEKYPTIYHLRKKLVDSTDKADLRLIYLALAHMIKFRGHFLIEGDLNPDNSDVDKLFIQLVQTYNQLFEENPINASGVDAKAILSARLSKSRRLENLIAQLPGEKKNGLFGNLIALSLGLTPNFKSNFDLAEDAKLQLSKDTYDDDLDNLLAQIGDQYADLFLAAKNLSDAILLSDILRVNTEITKAPLSASMIKRYDEHHQDLTLLKALVRQQLPEKYKEIFFDQSKNGYAGYIDGGASQEEFYKFIKPILEKMDGTEELLVKLNREDLLRKQRTFDNGSIPHQIHLGELHAILRRQEDFYPFLKDNREKIEKILTFRIPYYVGPLARGNSRFAWMTRKSEETITPWNFEEVVDKGASAQSFIERMTNFDKNLPNEKVLPKHSLLYEYFTVYNELTKVKYVTEGMRKPAFLSGEQKKAIVDLLFKTNRKVTVKQLKEDYFKKIECFDSVEISGVEDRFNASLGTYHDLLKIIKDKDFLDNEENEDILEDIVLTLTLFEDREMIEERLKTYAHLFDDKVMKQLKRRRYTGWGRLSRKLINGIRDKQSGKTILDFLKSDGFANRNFMQLIHDDSLTFKEDIQKAQVSGQGDSLHEHIANLAGSPAIKKGILQTVKVVDELVKVMGRHKPENIVIEMARENQTTQKGQKNSRERMKRIEEGIKELGSQILKEHPVENTQLQNEKLYLYYLQNGRDMYVDQELDINRLSDYDVDHIVPQSFLKDDSIDNKVLTRSDKARGKSDNVPSEEVVKKMKNYWRQLLNAKLITQRKFDNLTKAERGGLSELDKAGFIKRQLVETRQITKHVAQILDSRMNTKYDENDKLIREVKVITLKSKLVSDFRKDFQFYKVREINNYHHAHDAYLNAVVGTALIKKYPKLESEFVYGDYKVYDVRKMIAKSEQEIGKATAKYFFYSNIMNFFKTEITLANGEIRKRPLIETNGETGEIVWDKGRDFATVRKVLSMPQVNIVKKTEVQTGGFSKESILPKRNSDKLIARKKDWDPKKYGGFDSPTVAYSVLVVAKVEKGKSKKLKSVKELLGITIMERSSFEKNPIDFLEAKGYKEVKKDLIIKLPKYSLFELENGRKRMLASAGELQKGNELALPSKYVNFLYLASHYEKLKGSPEDNEQKQLFVEQHKHYLDEIIEQISEFSKRVILADANLDKVLSAYNKHRDKPIREQAENIIHLFTLTNLGAPAAFKYFDTTIDRKRYTSTKEVLDATLIHQSITGLYETRIDLSQLGGDGGGSSPAPGGGGGLDDEYRLYSPLVKPDQNIQFWLEQFPQAWAETAGMGLAKQVPPQVIQLKASATPVSVRQYPLSKEAQEGIRPHVQRLIQQGILVPVQSPWNTPLLPVRKPGTNDYRPVQDLREVNKRVQDIHPTVPNPYNLLCALPPQRSWYTVLDLKDAFFCLRLHPTSQPLFAFEWRDPGTGRTGQLTWTRLPQGFKNSPTIFNEALHRDLANFRIQHPQVTLLQYVDDLLLAGATKQDCLEGTKALLLELSDLGYRASAKKAQICRREVTYLGYSLRDGQRWLTEARKKTVVQIPAPTTAKQVREFLGKAGFCRLFIPGFATLAAPLYPLTKPKGEFSWAPEHQKAFDAIKKALLSAPALALPDVTKPFTLYVDERKGVARGVLTQTLGPWRRPVAYLSKKLDPVASGWPVCLKAIAAVAILVKDADKLTLGQNITVIAPHALENIVRQPPDRWMTNARMTHYQSLLLTERVTFAPPAALNPATLLPEETDEPVTHDCHQLLIEETGVRKDLTDIPLTGEVLTWFTDGSSYVVEGKRMAGAAVVDGTRTIWASSLPEGTSAQKAELMALTQALRLAEGKSINIYTDSRYAFATAHVHGAIYKQRGWLTSAGREIKNKEEILSLLEALHLPKRLAIIHCPGHQKAKDPISRGNQMADRVAKQAAQGVNLLPAGKRTADGSEFEKRTADGSEFESPKKKAKVE

SEQ ID NO: 74 - protein, 2089 aa, synthetic construct
MPAAKRVKLDGGDKKYSIGLDIGTNSVGWAVITDEYKVPSKKFKVLGNTDRHSIKKNLIGALLFDSGETAEATRLKRTARRRYTRRKNRICYLQEIFSNEMAKVDDSFFHRLEESFLVEEDKKHERHPIFGNIVDEVAYHEKYPTIYHLRKKLVDSTDKADLRLIYLALAHMIKFRGHFLIEGDLNPDNSDVDKLFIQLVQTYNQLFEENPINASGVDAKAILSARLSKSRRLENLIAQLPGEKKNGLFGNLIALSLGLTPNFKSNFDLAEDAKLQLSKDTYDDDLDNLLAQIGDQYADLFLAAKNLSDAILLSDILRVNTEITKAPLSASMIKRYDEHHQDLTLLKALVRQQLPEKYKEIFFDQSKNGYAGYIDGGASQEEFYKFIKPILEKMDGTEELLVKLNREDLLRKQRTFDNGSIPHQIHLGELHAILRRQEDFYPFLKDNREKIEKILTFRIPYYVGPLARGNSRFAWMTRKSEETITPWNFEEVVDKGASAQSFIERMTNFDKNLPNEKVLPKHSLLYEYFTVYNELTKVKYVTEGMRKPAFLSGEQKKAIVDLLFKTNRKVTVKQLKEDYFKKIECFDSVEISGVEDRFNASLGTYHDLLKIIKDKDFLDNEENEDILEDIVLTLTLFEDREMIEERLKTYAHLFDDKVMKQLKRRRYTGWGRLSRKLINGIRDKQSGKTILDFLKSDGFANRNFMQLIHDDSLTFKEDIQKAQVSGQGDSLHEHIANLAGSPAIKKGILQTVKVVDELVKVMGRHKPENIVIEMARENQTTQKGQKNSRERMKRIEEGIKELGSQILKEHPVENTQLQNEKLYLYYLQNGRDMYVDQELDINRLSDYDVDHIVPQSFLKDDSIDNKVLTRSDKARGKSDNVPSEEVVKKMKNYWRQLLNAKLITQRKFDNLTKAERGGLSELDKAGFIKRQLVETRQITKHVAQILDSRMNTKYDENDKLIREVKVITLKSKLVSDFRKDFQFYKVREINNYHHAHDAYLNAVVGTALIKKYPKLESEFVYGDYKVYDVRKMIAKSEQEIGKATAKYFFYSNIMNFFKTEITLANGEIRKRPLIETNGETGEIVWDKGRDFATVRKVLSMPQVNIVKKTEVQTGGFSKESILPKRNSDKLIARKKDWDPKKYGGFDSPTVAYSVLVVAKVEKGKSKKLKSVKELLGITIMERSSFEKNPIDFLEAKGYKEVKKDLIIKLPKYSLFELENGRKRMLASAGELQKGNELALPSKYVNFLYLASHYEKLKGSPEDNEQKQLFVEQHKHYLDEIIEQISEFSKRVILADANLDKVLSAYNKHRDKPIREQAENIIHLFTLTNLGAPAAFKYFDTTIDRKRYTSTKEVLDATLIHQSITGLYETRIDLSQLGGDGGGSAGSAAGSGEFGGLDDEYRLYSPLVKPDQNIQFWLEQFPQAWAETAGMGLAKQVPPQVIQLKASATPVSVRQYPLSKEAQEGIRPHVQRLIQQGILVPVQSPWNTPLLPVRKPGTNDYRPVQDLREVNKRVQDIHPTVPNPYNLLCALPPQRSWYTVLDLKDAFFCLRLHPTSQPLFAFEWRDPGTGRTGQLTWTRLPQGFKNSPTIFNEALHRDLANFRIQHPQVTLLQYVDDLLLAGATKQDCLEGTKALLLELSDLGYRASAKKAQICRREVTYLGYSLRDGQRWLTEARKKTVVQIPAPTTAKQVREFLGKAGFCRLFIPGFATLAAPLYPLTKPKGEFSWAPEHQKAFDAIKKALLSAPALALPDVTKPFTLYVDERKGVARGVLTQTLGPWRRPVAYLSKKLDPVASGWPVCLKAIAAVAILVKDADKLTLGQNITVIAPHALENIVRQPPDRWMTNARMTHYQSLLLTERVTFAPPAALNPATLLPEETDEPVTHDCHQLLIEETGVRKDLTDIPLTGEVLTWFTDGSSYVVEGKRMAGAAVVDGTRTIWASSLPEGTSAQKAELMALTQALRLAEGKSINIYTDSRYAFATAHVHGAIYKQRGWLTSAGREIKNKEEILSLLEALHLPKRLAIIHCPGHQKAKDPISRGNQMADRVAKQAAQGVNLLPAGKRTADGSEFEKRTADGSEFESPKKKAKVE

SEQ ID NO: 75 - protein, 2092 aa, synthetic construct
MPAAKRVKLDGGDKKYSIGLDIGTNSVGWAVITDEYKVPSKKFKVLGNTDRHSIKKNLIGALLFDSGETAEATRLKRTARRRYTRRKNRICYLQEIFSNEMAKVDDSFFHRLEESFLVEEDKKHERHPIFGNIVDEVAYHEKYPTIYHLRKKLVDSTDKADLRLIYLALAHMIKFRGHFLIEGDLNPDNSDVDKLFIQLVQTYNQLFEENPINASGVDAKAILSARLSKSRRLENLIAQLPGEKKNGLFGNLIALSLGLTPNFKSNFDLAEDAKLQLSKDTYDDDLDNLLAQIGDQYADLFLAAKNLSDAILLSDILRVNTEITKAPLSASMIKRYDEHHQDLTLLKALVRQQLPEKYKEIFFDQSKNGYAGYIDGGASQEEFYKFIKPILEKMDGTEELLVKLNREDLLRKQRTFDNGSIPHQIHLGELHAILRRQEDFYPFLKDNREKIEKILTFRIPYYVGPLARGNSRFAWMTRKSEETITPWNFEEVVDKGASAQSFIERMTNFDKNLPNEKVLPKHSLLYEYFTVYNELTKVKYVTEGMRKPAFLSGEQKKAIVDLLFKTNRKVTVKQLKEDYFKKIECFDSVEISGVEDRFNASLGTYHDLLKIIKDKDFLDNEENEDILEDIVLTLTLFEDREMIEERLKTYAHLFDDKVMKQLKRRRYTGWGRLSRKLINGIRDKQSGKTILDFLKSDGFANRNFMQLIHDDSLTFKEDIQKAQVSGQGDSLHEHIANLAGSPAIKKGILQTVKVVDELVKVMGRHKPENIVIEMARENQTTQKGQKNSRERMKRIEEGIKELGSQILKEHPVENTQLQNEKLYLYYLQNGRDMYVDQELDINRLSDYDVDHIVPQSFLKDDSIDNKVLTRSDKARGKSDNVPSEEVVKKMKNYWRQLLNAKLITQRKFDNLTKAERGGLSELDKAGFIKRQLVETRQITKHVAQILDSRMNTKYDENDKLIREVKVITLKSKLVSDFRKDFQFYKVREINNYHHAHDAYLNAVVGTALIKKYPKLESEFVYGDYKVYDVRKMIAKSEQEIGKATAKYFFYSNIMNFFKTEITLANGEIRKRPLIETNGETGEIVWDKGRDFATVRKVLSMPQVNIVKKTEVQTGGFSKESILPKRNSDKLIARKKDWDPKKYGGFDSPTVAYSVLVVAKVEKGKSKKLKSVKELLGITIMERSSFEKNPIDFLEAKGYKEVKKDLIIKLPKYSLFELENGRKRMLASAGELQKGNELALPSKYVNFLYLASHYEKLKGSPEDNEQKQLFVEQHKHYLDEIIEQISEFSKRVILADANLDKVLSAYNKHRDKPIREQAENIIHLFTLTNLGAPAAFKYFDTTIDRKRYTSTKEVLDATLIHQSITGLYETRIDLSQLGGDGGGGGGSEAAAKGGGGSGGLDDEYRLYSPLVKPDQNIQFWLEQFPQAWAETAGMGLAKQVPPQVIQLKASATPVSVRQYPLSKEAQEGIRPHVQRLIQQGILVPVQSPWNTPLLPVRKPGTNDYRPVQDLREVNKRVQDIHPTVPNPYNLLCALPPQRSWYTVLDLKDAFFCLRLHPTSQPLFAFEWRDPGTGRTGQLTWTRLPQGFKNSPTIFNEALHRDLANFRIQHPQVTLLQYVDDLLLAGATKQDCLEGTKALLLELSDLGYRASAKKAQICRREVTYLGYSLRDGQRWLTEARKKTVVQIPAPTTAKQVREFLGKAGFCRLFIPGFATLAAPLYPLTKPKGEFSWAPEHQKAFDAIKKALLSAPALALPDVTKPFTLYVDERKGVARGVLTQTLGPWRRPVAYLSKKLDPVASGWPVCLKAIAAVAILVKDADKLTLGQNITVIAPHALENIVRQPPDRWMTNARMTHYQSLLLTERVTFAPPAALNPATLLPEETDEPVTHDCHQLLIEETGVRKDLTDIPLTGEVLTWFTDGSSYVVEGKRMAGAAVVDGTRTIWASSLPEGTSAQKAELMALTQALRLAEGKSINIYTDSRYAFATAHVHGAIYKQRGWLTSAGREIKNKEEILSLLEALHLPKRLAIIHCPGHQKAKDPISRGNQMADRVAKQAAQGVNLLPAGKRTADGSEFEKRTADGSEFESPKKKAKVE

SEQ ID NO: 76 - protein, 2083 aa, synthetic construct
MPAAKRVKLDGGDKKYSIGLDIGTNSVGWAVITDEYKVPSKKFKVLGNTDRHSIKKNLIGALLFDSGETAEATRLKRTARRRYTRRKNRICYLQEIFSNEMAKVDDSFFHRLEESFLVEEDKKHERHPIFGNIVDEVAYHEKYPTIYHLRKKLVDSTDKADLRLIYLALAHMIKFRGHFLIEGDLNPDNSDVDKLFIQLVQTYNQLFEENPINASGVDAKAILSARLSKSRRLENLIAQLPGEKKNGLFGNLIALSLGLTPNFKSNFDLAEDAKLQLSKDTYDDDLDNLLAQIGDQYADLFLAAKNLSDAILLSDILRVNTEITKAPLSASMIKRYDEHHQDLTLLKALVRQQLPEKYKEIFFDQSKNGYAGYIDGGASQEEFYKFIKPILEKMDGTEELLVKLNREDLLRKQRTFDNGSIPHQIHLGELHAILRRQEDFYPFLKDNREKIEKILTFRIPYYVGPLARGNSRFAWMTRKSEETITPWNFEEVVDKGASAQSFIERMTNFDKNLPNEKVLPKHSLLYEYFTVYNELTKVKYVTEGMRKPAFLSGEQKKAIVDLLFKTNRKVTVKQLKEDYFKKIECFDSVEISGVEDRFNASLGTYHDLLKIIKDKDFLDNEENEDILEDIVLTLTLFEDREMIEERLKTYAHLFDDKVMKQLKRRRYTGWGRLSRKLINGIRDKQSGKTILDFLKSDGFANRNFMQLIHDDSLTFKEDIQKAQVSGQGDSLHEHIANLAGSPAIKKGILQTVKVVDELVKVMGRHKPENIVIEMARENQTTQKGQKNSRERMKRIEEGIKELGSQILKEHPVENTQLQNEKLYLYYLQNGRDMYVDQELDINRLSDYDVDHIVPQSFLKDDSIDNKVLTRSDKARGKSDNVPSEEVVKKMKNYWRQLLNAKLITQRKFDNLTKAERGGLSELDKAGFIKRQLVETRQITKHVAQILDSRMNTKYDENDKLIREVKVITLKSKLVSDFRKDFQFYKVREINNYHHAHDAYLNAVVGTALIKKYPKLESEFVYGDYKVYDVRKMIAKSEQEIGKATAKYFFYSNIMNFFKTEITLANGEIRKRPLIETNGETGEIVWDKGRDFATVRKVLSMPQVNIVKKTEVQTGGFSKESILPKRNSDKLIARKKDWDPKKYGGFDSPTVAYSVLVVAKVEKGKSKKLKSVKELLGITIMERSSFEKNPIDFLEAKGYKEVKKDLIIKLPKYSLFELENGRKRMLASAGELQKGNELALPSKYVNFLYLASHYEKLKGSPEDNEQKQLFVEQHKHYLDEIIEQISEFSKRVILADANLDKVLSAYNKHRDKPIREQAENIIHLFTLTNLGAPAAFKYFDTTIDRKRYTSTKEVLDATLIHQSITGLYETRIDLSQLGGDGGGGGPAPGGLDDEYRLYSPLVKPDQNIQFWLEQFPQAWAETAGMGLAKQVPPQVIQLKASATPVSVRQYPLSKEAQEGIRPHVQRLIQQGILVPVQSPWNTPLLPVRKPGTNDYRPVQDLREVNKRVQDIHPTVPNPYNLLCALPPQRSWYTVLDLKDAFFCLRLHPTSQPLFAFEWRDPGTGRTGQLTWTRLPQGFKNSPTIFNEALHRDLANFRIQHPQVTLLQYVDDLLLAGATKQDCLEGTKALLLELSDLGYRASAKKAQICRREVTYLGYSLRDGQRWLTEARKKTVVQIPAPTTAKQVREFLGKAGFCRLFIPGFATLAAPLYPLTKPKGEFSWAPEHQKAFDAIKKALLSAPALALPDVTKPFTLYVDERKGVARGVLTQTLGPWRRPVAYLSKKLDPVASGWPVCLKAIAAVAILVKDADKLTLGQNITVIAPHALENIVRQPPDRWMTNARMTHYQSLLLTERVTFAPPAALNPATLLPEETDEPVTHDCHQLLIEETGVRKDLTDIPLTGEVLTWFTDGSSYVVEGKRMAGAAVVDGTRTIWASSLPEGTSAQKAELMALTQALRLAEGKSINIYTDSRYAFATAHVHGAIYKQRGWLTSAGREIKNKEEILSLLEALHLPKRLAIIHCPGHQKAKDPISRGNQMADRVAKQAAQGVNLLPAGKRTADGSEFEKRTADGSEFESPKKKAKVE

SEQ ID NO: 77 - protein, 2084 aa, synthetic construct
MPAAKRVKLDGGDKKYSIGLDIGTNSVGWAVITDEYKVPSKKFKVLGNTDRHSIKKNLIGALLFDSGETAEATRLKRTARRRYTRRKNRICYLQEIFSNEMAKVDDSFFHRLEESFLVEEDKKHERHPIFGNIVDEVAYHEKYPTIYHLRKKLVDSTDKADLRLIYLALAHMIKFRGHFLIEGDLNPDNSDVDKLFIQLVQTYNQLFEENPINASGVDAKAILSARLSKSRRLENLIAQLPGEKKNGLFGNLIALSLGLTPNFKSNFDLAEDAKLQLSKDTYDDDLDNLLAQIGDQYADLFLAAKNLSDAILLSDILRVNTEITKAPLSASMIKRYDEHHQDLTLLKALVRQQLPEKYKEIFFDQSKNGYAGYIDGGASQEEFYKFIKPILEKMDGTEELLVKLNREDLLRKQRTFDNGSIPHQIHLGELHAILRRQEDFYPFLKDNREKIEKILTFRIPYYVGPLARGNSRFAWMTRKSEETITPWNFEEVVDKGASAQSFIERMTNFDKNLPNEKVLPKHSLLYEYFTVYNELTKVKYVTEGMRKPAFLSGEQKKAIVDLLFKTNRKVTVKQLKEDYFKKIECFDSVEISGVEDRFNASLGTYHDLLKIIKDKDFLDNEENEDILEDIVLTLTLFEDREMIEERLKTYAHLFDDKVMKQLKRRRYTGWGRLSRKLINGIRDKQSGKTILDFLKSDGFANRNFMQLIHDDSLTFKEDIQKAQVSGQGDSLHEHIANLAGSPAIKKGILQTVKVVDELVKVMGRHKPENIVIEMARENQTTQKGQKNSRERMKRIEEGIKELGSQILKEHPVENTQLQNEKLYLYYLQNGRDMYVDQELDINRLSDYDVDHIVPQSFLKDDSIDNKVLTRSDKARGKSDNVPSEEVVKKMKNYWRQLLNAKLITQRKFDNLTKAERGGLSELDKAGFIKRQLVETRQITKHVAQILDSRMNTKYDENDKLIREVKVITLKSKLVSDFRKDFQFYKVREINNYHHAHDAYLNAVVGTALIKKYPKLESEFVYGDYKVYDVRKMIAKSEQEIGKATAKYFFYSNIMNFFKTEITLANGEIRKRPLIETNGETGEIVWDKGRDFATVRKVLSMPQVNIVKKTEVQTGGFSKESILPKRNSDKLIARKKDWDPKKYGGFDSPTVAYSVLVVAKVEKGKSKKLKSVKELLGITIMERSSFEKNPIDFLEAKGYKEVKKDLIIKLPKYSLFELENGRKRMLASAGELQKGNELALPSKYVNFLYLASHYEKLKGSPEDNEQKQLFVEQHKHYLDEIIEQISEFSKRVILADANLDKVLSAYNKHRDKPIREQAENIIHLFTLTNLGAPAAFKYFDTTIDRKRYTSTKEVLDATLIHQSITGLYETRIDLSQLGGDGGGGGGGGGGGLDDEYRLYSPLVKPDQNIQFWLEQFPQAWAETAGMGLAKQVPPQVIQLKASATPVSVRQYPLSKEAQEGIRPHVQRLIQQGILVPVQSPWNTPLLPVRKPGTNDYRPVQDLREVNKRVQDIHPTVPNPYNLLCALPPQRSWYTVLDLKDAFFCLRLHPTSQPLFAFEWRDPGTGRTGQLTWTRLPQGFKNSPTIFNEALHRDLANFRIQHPQVTLLQYVDDLLLAGATKQDCLEGTKALLLELSDLGYRASAKKAQICRREVTYLGYSLRDGQRWLTEARKKTVVQIPAPTTAKQVREFLGKAGFCRLFIPGFATLAAPLYPLTKPKGEFSWAPEHQKAFDAIKKALLSAPALALPDVTKPFTLYVDERKGVARGVLTQTLGPWRRPVAYLSKKLDPVASGWPVCLKAIAAVAILVKDADKLTLGQNITVIAPHALENIVRQPPDRWMTNARMTHYQSLLLTERVTFAPPAALNPATLLPEETDEPVTHDCHQLLIEETGVRKDLTDIPLTGEVLTWFTDGSSYVVEGKRMAGAAVVDGTRTIWASSLPEGTSAQKAELMALTQALRLAEGKSINIYTDSRYAFATAHVHGAIYKQRGWLTSAGREIKNKEEILSLLEALHLPKRLAIIHCPGHQKAKDPISRGNQMADRVAKQAAQGVNLLPAGKRTADGSEFEKRTADGSEFESPKKKAKVE

SEQ ID NO: 78 - protein, 2083 aa, synthetic construct
MPAAKRVKLDGGDKKYSIGLDIGTNSVGWAVITDEYKVPSKKFKVLGNTDRHSIKKNLIGALLFDSGETAEATRLKRTARRRYTRRKNRICYLQEIFSNEMAKVDDSFFHRLEESFLVEEDKKHERHPIFGNIVDEVAYHEKYPTIYHLRKKLVDSTDKADLRLIYLALAHMIKFRGHFLIEGDLNPDNSDVDKLFIQLVQTYNQLFEENPINASGVDAKAILSARLSKSRRLENLIAQLPGEKKNGLFGNLIALSLGLTPNFKSNFDLAEDAKLQLSKDTYDDDLDNLLAQIGDQYADLFLAAKNLSDAILLSDILRVNTEITKAPLSASMIKRYDEHHQDLTLLKALVRQQLPEKYKEIFFDQSKNGYAGYIDGGASQEEFYKFIKPILEKMDGTEELLVKLNREDLLRKQRTFDNGSIPHQIHLGELHAILRRQEDFYPFLKDNREKIEKILTFRIPYYVGPLARGNSRFAWMTRKSEETITPWNFEEVVDKGASAQSFIERMTNFDKNLPNEKVLPKHSLLYEYFTVYNELTKVKYVTEGMRKPAFLSGEQKKAIVDLLFKTNRKVTVKQLKEDYFKKIECFDSVEISGVEDRFNASLGTYHDLLKIIKDKDFLDNEENEDILEDIVLTLTLFEDREMIEERLKTYAHLFDDKVMKQLKRRRYTGWGRLSRKLINGIRDKQSGKTILDFLKSDGFANRNFMQLIHDDSLTFKEDIQKAQVSGQGDSLHEHIANLAGSPAIKKGILQTVKVVDELVKVMGRHKPENIVIEMARENQTTQKGQKNSRERMKRIEEGIKELGSQILKEHPVENTQLQNEKLYLYYLQNGRDMYVDQELDINRLSDYDVDHIVPQSFLKDDSIDNKVLTRSDKARGKSDNVPSEEVVKKMKNYWRQLLNAKLITQRKFDNLTKAERGGLSELDKAGFIKRQLVETRQITKHVAQILDSRMNTKYDENDKLIREVKVITLKSKLVSDFRKDFQFYKVREINNYHHAHDAYLNAVVGTALIKKYPKLESEFVYGDYKVYDVRKMIAKSEQEIGKATAKYFFYSNIMNFFKTEITLANGEIRKRPLIETNGETGEIVWDKGRDFATVRKVLSMPQVNIVKKTEVQTGGFSKESILPKRNSDKLIARKKDWDPKKYGGFDSPTVAYSVLVVAKVEKGKSKKLKSVKELLGITIMERSSFEKNPIDFLEAKGYKEVKKDLIIKLPKYSLFELENGRKRMLASAGELQKGNELALPSKYVNFLYLASHYEKLKGSPEDNEQKQLFVEQHKHYLDEIIEQISEFSKRVILADANLDKVLSAYNKHRDKPIREQAENIIHLFTLTNLGAPAAFKYFDTTIDRKRYTSTKEVLDATLIHQSITGLYETRIDLSQLGGDGGGGSPAPGGLDDEYRLYSPLVKPDQNIQFWLEQFPQAWAETAGMGLAKQVPPQVIQLKASATPVSVRQYPLSKEAQEGIRPHVQRLIQQGILVPVQSPWNTPLLPVRKPGTNDYRPVQDLREVNKRVQDIHPTVPNPYNLLCALPPQRSWYTVLDLKDAFFCLRLHPTSQPLFAFEWRDPGTGRTGQLTWTRLPQGFKNSPTIFNEALHRDLANFRIQHPQVTLLQYVDDLLLAGATKQDCLEGTKALLLELSDLGYRASAKKAQICRREVTYLGYSLRDGQRWLTEARKKTVVQIPAPTTAKQVREFLGKAGFCRLFIPGFATLAAPLYPLTKPKGEFSWAPEHQKAFDAIKKALLSAPALALPDVTKPFTLYVDERKGVARGVLTQTLGPWRRPVAYLSKKLDPVASGWPVCLKAIAAVAILVKDADKLTLGQNITVIAPHALENIVRQPPDRWMTNARMTHYQSLLLTERVTFAPPAALNPATLLPEETDEPVTHDCHQLLIEETGVRKDLTDIPLTGEVLTWFTDGSSYVVEGKRMAGAAVVDGTRTIWASSLPEGTSAQKAELMALTQALRLAEGKSINIYTDSRYAFATAHVHGAIYKQRGWLTSAGREIKNKEEILSLLEALHLPKRLAIIHCPGHQKAKDPISRGNQMADRVAKQAAQGVNLLPAGKRTADGSEFEKRTADGSEFESPKKKAKVE

SEQ ID NO: 79 - protein, 2083 aa, synthetic construct
MPAAKRVKLDGGDKKYSIGLDIGTNSVGWAVITDEYKVPSKKFKVLGNTDRHSIKKNLIGALLFDSGETAEATRLKRTARRRYTRRKNRICYLQEIFSNEMAKVDDSFFHRLEESFLVEEDKKHERHPIFGNIVDEVAYHEKYPTIYHLRKKLVDSTDKADLRLIYLALAHMIKFRGHFLIEGDLNPDNSDVDKLFIQLVQTYNQLFEENPINASGVDAKAILSARLSKSRRLENLIAQLPGEKKNGLFGNLIALSLGLTPNFKSNFDLAEDAKLQLSKDTYDDDLDNLLAQIGDQYADLFLAAKNLSDAILLSDILRVNTEITKAPLSASMIKRYDEHHQDLTLLKALVRQQLPEKYKEIFFDQSKNGYAGYIDGGASQEEFYKFIKPILEKMDGTEELLVKLNREDLLRKQRTFDNGSIPHQIHLGELHAILRRQEDFYPFLKDNREKIEKILTFRIPYYVGPLARGNSRFAWMTRKSEETITPWNFEEVVDKGASAQSFIERMTNFDKNLPNEKVLPKHSLLYEYFTVYNELTKVKYVTEGMRKPAFLSGEQKKAIVDLLFKTNRKVTVKQLKEDYFKKIECFDSVEISGVEDRFNASLGTYHDLLKIIKDKDFLDNEENEDILEDIVLTLTLFEDREMIEERLKTYAHLFDDKVMKQLKRRRYTGWGRLSRKLINGIRDKQSGKTILDFLKSDGFANRNFMQLIHDDSLTFKEDIQKAQVSGQGDSLHEHIANLAGSPAIKKGILQTVKVVDELVKVMGRHKPENIVIEMARENQTTQKGQKNSRERMKRIEEGIKELGSQILKEHPVENTQLQNEKLYLYYLQNGRDMYVDQELDINRLSDYDVDHIVPQSFLKDDSIDNKVLTRSDKARGKSDNVPSEEVVKKMKNYWRQLLNAKLITQRKFDNLTKAERGGLSELDKAGFIKRQLVETRQITKHVAQILDSRMNTKYDENDKLIREVKVITLKSKLVSDFRKDFQFYKVREINNYHHAHDAYLNAVVGTALIKKYPKLESEFVYGDYKVYDVRKMIAKSEQEIGKATAKYFFYSNIMNFFKTEITLANGEIRKRPLIETNGETGEIVWDKGRDFATVRKVLSMPQVNIVKKTEVQTGGFSKESILPKRNSDKLIARKKDWDPKKYGGFDSPTVAYSVLVVAKVEKGKSKKLKSVKELLGITIMERSSFEKNPIDFLEAKGYKEVKKDLIIKLPKYSLFELENGRKRMLASAGELQKGNELALPSKYVNFLYLASHYEKLKGSPEDNEQKQLFVEQHKHYLDEIIEQISEFSKRVILADANLDKVLSAYNKHRDKPIREQAENIIHLFTLTNLGAPAAFKYFDTTIDRKRYTSTKEVLDATLIHQSITGLYETRIDLSQLGGDGGPAPGGGGGLDDEYRLYSPLVKPDQNIQFWLEQFPQAWAETAGMGLAKQVPPQVIQLKASATPVSVRQYPLSKEAQEGIRPHVQRLIQQGILVPVQSPWNTPLLPVRKPGTNDYRPVQDLREVNKRVQDIHPTVPNPYNLLCALPPQRSWYTVLDLKDAFFCLRLHPTSQPLFAFEWRDPGTGRTGQLTWTRLPQGFKNSPTIFNEALHRDLANFRIQHPQVTLLQYVDDLLLAGATKQDCLEGTKALLLELSDLGYRASAKKAQICRREVTYLGYSLRDGQRWLTEARKKTVVQIPAPTTAKQVREFLGKAGFCRLFIPGFATLAAPLYPLTKPKGEFSWAPEHQKAFDAIKKALLSAPALALPDVTKPFTLYVDERKGVARGVLTQTLGPWRRPVAYLSKKLDPVASGWPVCLKAIAAVAILVKDADKLTLGQNITVIAPHALENIVRQPPDRWMTNARMTHYQSLLLTERVTFAPPAALNPATLLPEETDEPVTHDCHQLLIEETGVRKDLTDIPLTGEVLTWFTDGSSYVVEGKRMAGAAVVDGTRTIWASSLPEGTSAQKAELMALTQALRLAEGKSINIYTDSRYAFATAHVHGAIYKQRGWLTSAGREIKNKEEILSLLEALHLPKRLAIIHCPGHQKAKDPISRGNQMADRVAKQAAQGVNLLPAGKRTADGSEFEKRTADGSEFESPKKKAKVE

SEQ ID NO: 80 - protein, 2088 aa, synthetic construct
MPAAKRVKLDGGDKKYSIGLDIGTNSVGWAVITDEYKVPSKKFKVLGNTDRHSIKKNLIGALLFDSGETAEATRLKRTARRRYTRRKNRICYLQEIFSNEMAKVDDSFFHRLEESFLVEEDKKHERHPIFGNIVDEVAYHEKYPTIYHLRKKLVDSTDKADLRLIYLALAHMIKFRGHFLIEGDLNPDNSDVDKLFIQLVQTYNQLFEENPINASGVDAKAILSARLSKSRRLENLIAQLPGEKKNGLFGNLIALSLGLTPNFKSNFDLAEDAKLQLSKDTYDDDLDNLLAQIGDQYADLFLAAKNLSDAILLSDILRVNTEITKAPLSASMIKRYDEHHQDLTLLKALVRQQLPEKYKEIFFDQSKNGYAGYIDGGASQEEFYKFIKPILEKMDGTEELLVKLNREDLLRKQRTFDNGSIPHQIHLGELHAILRRQEDFYPFLKDNREKIEKILTFRIPYYVGPLARGNSRFAWMTRKSEETITPWNFEEVVDKGASAQSFIERMTNFDKNLPNEKVLPKHSLLYEYFTVYNELTKVKYVTEGMRKPAFLSGEQKKAIVDLLFKTNRKVTVKQLKEDYFKKIECFDSVEISGVEDRFNASLGTYHDLLKIIKDKDFLDNEENEDILEDIVLTLTLFEDREMIEERLKTYAHLFDDKVMKQLKRRRYTGWGRLSRKLINGIRDKQSGKTILDFLKSDGFANRNFMQLIHDDSLTFKEDIQKAQVSGQGDSLHEHIANLAGSPAIKKGILQTVKVVDELVKVMGRHKPENIVIEMARENQTTQKGQKNSRERMKRIEEGIKELGSQILKEHPVENTQLQNEKLYLYYLQNGRDMYVDQELDINRLSDYDVDHIVPQSFLKDDSIDNKVLTRSDKARGKSDNVPSEEVVKKMKNYWRQLLNAKLITQRKFDNLTKAERGGLSELDKAGFIKRQLVETRQITKHVAQILDSRMNTKYDENDKLIREVKVITLKSKLVSDFRKDFQFYKVREINNYHHAHDAYLNAVVGTALIKKYPKLESEFVYGDYKVYDVRKMIAKSEQEIGKATAKYFFYSNIMNFFKTEITLANGEIRKRPLIETNGETGEIVWDKGRDFATVRKVLSMPQVNIVKKTEVQTGGFSKESILPKRNSDKLIARKKDWDPKKYGGFDSPTVAYSVLVVAKVEKGKSKKLKSVKELLGITIMERSSFEKNPIDFLEAKGYKEVKKDLIIKLPKYSLFELENGRKRMLASAGELQKGNELALPSKYVNFLYLASHYEKLKGSPEDNEQKQLFVEQHKHYLDEIIEQISEFSKRVILADANLDKVLSAYNKHRDKPIREQAENIIHLFTLTNLGAPAAFKYFDTTIDRKRYTSTKEVLDATLIHQSITGLYETRIDLSQLGGDGGGGSGSSEAAAKGGLDDEYRLYSPLVKPDQNIQFWLEQFPQAWAETAGMGLAKQVPPQVIQLKASATPVSVRQYPLSKEAQEGIRPHVQRLIQQGILVPVQSPWNTPLLPVRKPGTNDYRPVQDLREVNKRVQDIHPTVPNPYNLLCALPPQRSWYTVLDLKDAFFCLRLHPTSQPLFAFEWRDPGTGRTGQLTWTRLPQGFKNSPTIFNEALHRDLANFRIQHPQVTLLQYVDDLLLAGATKQDCLEGTKALLLELSDLGYRASAKKAQICRREVTYLGYSLRDGQRWLTEARKKTVVQIPAPTTAKQVREFLGKAGFCRLFIPGFATLAAPLYPLTKPKGEFSWAPEHQKAFDAIKKALLSAPALALPDVTKPFTLYVDERKGVARGVLTQTLGPWRRPVAYLSKKLDPVASGWPVCLKAIAAVAILVKDADKLTLGQNITVIAPHALENIVRQPPDRWMTNARMTHYQSLLLTERVTFAPPAALNPATLLPEETDEPVTHDCHQLLIEETGVRKDLTDIPLTGEVLTWFTDGSSYVVEGKRMAGAAVVDGTRTIWASSLPEGTSAQKAELMALTQALRLAEGKSINIYTDSRYAFATAHVHGAIYKQRGWLTSAGREIKNKEEILSLLEALHLPKRLAIIHCPGHQKAKDPISRGNQMADRVAKQAAQGVNLLPAGKRTADGSEFEKRTADGSEFESPKKKAKVE

SEQ ID NO: 81 - protein, 2083 aa, synthetic construct
MPAAKRVKLDGGDKKYSIGLDIGTNSVGWAVITDEYKVPSKKFKVLGNTDRHSIKKNLIGALLFDSGETAEATRLKRTARRRYTRRKNRICYLQEIFSNEMAKVDDSFFHRLEESFLVEEDKKHERHPIFGNIVDEVAYHEKYPTIYHLRKKLVDSTDKADLRLIYLALAHMIKFRGHFLIEGDLNPDNSDVDKLFIQLVQTYNQLFEENPINASGVDAKAILSARLSKSRRLENLIAQLPGEKKNGLFGNLIALSLGLTPNFKSNFDLAEDAKLQLSKDTYDDDLDNLLAQIGDQYADLFLAAKNLSDAILLSDILRVNTEITKAPLSASMIKRYDEHHQDLTLLKALVRQQLPEKYKEIFFDQSKNGYAGYIDGGASQEEFYKFIKPILEKMDGTEELLVKLNREDLLRKQRTFDNGSIPHQIHLGELHAILRRQEDFYPFLKDNREKIEKILTFRIPYYVGPLARGNSRFAWMTRKSEETITPWNFEEVVDKGASAQSFIERMTNFDKNLPNEKVLPKHSLLYEYFTVYNELTKVKYVTEGMRKPAFLSGEQKKAIVDLLFKTNRKVTVKQLKEDYFKKIECFDSVEISGVEDRFNASLGTYHDLLKIIKDKDFLDNEENEDILEDIVLTLTLFEDREMIEERLKTYAHLFDDKVMKQLKRRRYTGWGRLSRKLINGIRDKQSGKTILDFLKSDGFANRNFMQLIHDDSLTFKEDIQKAQVSGQGDSLHEHIANLAGSPAIKKGILQTVKVVDELVKVMGRHKPENIVIEMARENQTTQKGQKNSRERMKRIEEGIKELGSQILKEHPVENTQLQNEKLYLYYLQNGRDMYVDQELDINRLSDYDVDHIVPQSFLKDDSIDNKVLTRSDKARGKSDNVPSEEVVKKMKNYWRQLLNAKLITQRKFDNLTKAERGGLSELDKAGFIKRQLVETRQITKHVAQILDSRMNTKYDENDKLIREVKVITLKSKLVSDFRKDFQFYKVREINNYHHAHDAYLNAVVGTALIKKYPKLESEFVYGDYKVYDVRKMIAKSEQEIGKATAKYFFYSNIMNFFKTEITLANGEIRKRPLIETNGETGEIVWDKGRDFATVRKVLSMPQVNIVKKTEVQTGGFSKESILPKRNSDKLIARKKDWDPKKYGGFDSPTVAYSVLVVAKVEKGKSKKLKSVKELLGITIMERSSFEKNPIDFLEAKGYKEVKKDLIIKLPKYSLFELENGRKRMLASAGELQKGNELALPSKYVNFLYLASHYEKLKGSPEDNEQKQLFVEQHKHYLDEIIEQISEFSKRVILADANLDKVLSAYNKHRDKPIREQAENIIHLFTLTNLGAPAAFKYFDTTIDRKRYTSTKEVLDATLIHQSITGLYETRIDLSQLGGDGGGSSGGGGGLDDEYRLYSPLVKPDQNIQFWLEQFPQAWAETAGMGLAKQVPPQVIQLKASATPVSVRQYPLSKEAQEGIRPHVQRLIQQGILVPVQSPWNTPLLPVRKPGTNDYRPVQDLREVNKRVQDIHPTVPNPYNLLCALPPQRSWYTVLDLKDAFFCLRLHPTSQPLFAFEWRDPGTGRTGQLTWTRLPQGFKNSPTIFNEALHRDLANFRIQHPQVTLLQYVDDLLLAGATKQDCLEGTKALLLELSDLGYRASAKKAQICRREVTYLGYSLRDGQRWLTEARKKTVVQIPAPTTAKQVREFLGKAGFCRLFIPGFATLAAPLYPLTKPKGEFSWAPEHQKAFDAIKKALLSAPALALPDVTKPFTLYVDERKGVARGVLTQTLGPWRRPVAYLSKKLDPVASGWPVCLKAIAAVAILVKDADKLTLGQNITVIAPHALENIVRQPPDRWMTNARMTHYQSLLLTERVTFAPPAALNPATLLPEETDEPVTHDCHQLLIEETGVRKDLTDIPLTGEVLTWFTDGSSYVVEGKRMAGAAVVDGTRTIWASSLPEGTSAQKAELMALTQALRLAEGKSINIYTDSRYAFATAHVHGAIYKQRGWLTSAGREIKNKEEILSLLEALHLPKRLAIIHCPGHQKAKDPISRGNQMADRVAKQAAQGVNLLPAGKRTADGSEFEKRTADGSEFESPKKKAKVE

SEQ ID NO: 82 - protein, 2086 aa, synthetic construct
MPAAKRVKLDGGDKKYSIGLDIGTNSVGWAVITDEYKVPSKKFKVLGNTDRHSIKKNLIGALLFDSGETAEATRLKRTARRRYTRRKNRICYLQEIFSNEMAKVDDSFFHRLEESFLVEEDKKHERHPIFGNIVDEVAYHEKYPTIYHLRKKLVDSTDKADLRLIYLALAHMIKFRGHFLIEGDLNPDNSDVDKLFIQLVQTYNQLFEENPINASGVDAKAILSARLSKSRRLENLIAQLPGEKKNGLFGNLIALSLGLTPNFKSNFDLAEDAKLQLSKDTYDDDLDNLLAQIGDQYADLFLAAKNLSDAILLSDILRVNTEITKAPLSASMIKRYDEHHQDLTLLKALVRQQLPEKYKEIFFDQSKNGYAGYIDGGASQEEFYKFIKPILEKMDGTEELLVKLNREDLLRKQRTFDNGSIPHQIHLGELHAILRRQEDFYPFLKDNREKIEKILTFRIPYYVGPLARGNSRFAWMTRKSEETITPWNFEEVVDKGASAQSFIERMTNFDKNLPNEKVLPKHSLLYEYFTVYNELTKVKYVTEGMRKPAFLSGEQKKAIVDLLFKTNRKVTVKQLKEDYFKKIECFDSVEISGVEDRFNASLGTYHDLLKIIKDKDFLDNEENEDILEDIVLTLTLFEDREMIEERLKTYAHLFDDKVMKQLKRRRYTGWGRLSRKLINGIRDKQSGKTILDFLKSDGFANRNFMQLIHDDSLTFKEDIQKAQVSGQGDSLHEHIANLAGSPAIKKGILQTVKVVDELVKVMGRHKPENIVIEMARENQTTQKGQKNSRERMKRIEEGIKELGSQILKEHPVENTQLQNEKLYLYYLQNGRDMYVDQELDINRLSDYDVDHIVPQSFLKDDSIDNKVLTRSDKARGKSDNVPSEEVVKKMKNYWRQLLNAKLITQRKFDNLTKAERGGLSELDKAGFIKRQLVETRQITKHVAQILDSRMNTKYDENDKLIREVKVITLKSKLVSDFRKDFQFYKVREINNYHHAHDAYLNAVVGTALIKKYPKLESEFVYGDYKVYDVRKMIAKSEQEIGKATAKYFFYSNIMNFFKTEITLANGEIRKRPLIETNGETGEIVWDKGRDFATVRKVLSMPQVNIVKKTEVQTGGFSKESILPKRNSDKLIARKKDWDPKKYGGFDSPTVAYSVLVVAKVEKGKSKKLKSVKELLGITIMERSSFEKNPIDFLEAKGYKEVKKDLIIKLPKYSLFELENGRKRMLASAGELQKGNELALPSKYVNFLYLASHYEKLKGSPEDNEQKQLFVEQHKHYLDEIIEQISEFSKRVILADANLDKVLSAYNKHRDKPIREQAENIIHLFTLTNLGAPAAFKYFDTTIDRKRYTSTKEVLDATLIHQSITGLYETRIDLSQLGGDGGPAPGSSGGSGGLDDEYRLYSPLVKPDQNIQFWLEQFPQAWAETAGMGLAKQVPPQVIQLKASATPVSVRQYPLSKEAQEGIRPHVQRLIQQGILVPVQSPWNTPLLPVRKPGTNDYRPVQDLREVNKRVQDIHPTVPNPYNLLCALPPQRSWYTVLDLKDAFFCLRLHPTSQPLFAFEWRDPGTGRTGQLTWTRLPQGFKNSPTIFNEALHRDLANFRIQHPQVTLLQYVDDLLLAGATKQDCLEGTKALLLELSDLGYRASAKKAQICRREVTYLGYSLRDGQRWLTEARKKTVVQIPAPTTAKQVREFLGKAGFCRLFIPGFATLAAPLYPLTKPKGEFSWAPEHQKAFDAIKKALLSAPALALPDVTKPFTLYVDERKGVARGVLTQTLGPWRRPVAYLSKKLDPVASGWPVCLKAIAAVAILVKDADKLTLGQNITVIAPHALENIVRQPPDRWMTNARMTHYQSLLLTERVTFAPPAALNPATLLPEETDEPVTHDCHQLLIEETGVRKDLTDIPLTGEVLTWFTDGSSYVVEGKRMAGAAVVDGTRTIWASSLPEGTSAQKAELMALTQALRLAEGKSINIYTDSRYAFATAHVHGAIYKQRGWLTSAGREIKNKEEILSLLEALHLPKRLAIIHCPGHQKAKDPISRGNQMADRVAKQAAQGVNLLPAGKRTADGSEFEKRTADGSEFESPKKKAKVE

SEQ ID NO: 83 - protein, 2088 aa, synthetic construct
MPAAKRVKLDGGDKKYSIGLDIGTNSVGWAVITDEYKVPSKKFKVLGNTDRHSIKKNLIGALLFDSGETAEATRLKRTARRRYTRRKNRICYLQEIFSNEMAKVDDSFFHRLEESFLVEEDKKHERHPIFGNIVDEVAYHEKYPTIYHLRKKLVDSTDKADLRLIYLALAHMIKFRGHFLIEGDLNPDNSDVDKLFIQLVQTYNQLFEENPINASGVDAKAILSARLSKSRRLENLIAQLPGEKKNGLFGNLIALSLGLTPNFKSNFDLAEDAKLQLSKDTYDDDLDNLLAQIGDQYADLFLAAKNLSDAILLSDILRVNTEITKAPLSASMIKRYDEHHQDLTLLKALVRQQLPEKYKEIFFDQSKNGYAGYIDGGASQEEFYKFIKPILEKMDGTEELLVKLNREDLLRKQRTFDNGSIPHQIHLGELHAILRRQEDFYPFLKDNREKIEKILTFRIPYYVGPLARGNSRFAWMTRKSEETITPWNFEEVVDKGASAQSFIERMTNFDKNLPNEKVLPKHSLLYEYFTVYNELTKVKYVTEGMRKPAFLSGEQKKAIVDLLFKTNRKVTVKQLKEDYFKKIECFDSVEISGVEDRFNASLGTYHDLLKIIKDKDFLDNEENEDILEDIVLTLTLFEDREMIEERLKTYAHLFDDKVMKQLKRRRYTGWGRLSRKLINGIRDKQSGKTILDFLKSDGFANRNFMQLIHDDSLTFKEDIQKAQVSGQGDSLHEHIANLAGSPAIKKGILQTVKVVDELVKVMGRHKPENIVIEMARENQTTQKGQKNSRERMKRIEEGIKELGSQILKEHPVENTQLQNEKLYLYYLQNGRDMYVDQELDINRLSDYDVDHIVPQSFLKDDSIDNKVLTRSDKARGKSDNVPSEEVVKKMKNYWRQLLNAKLITQRKFDNLTKAERGGLSELDKAGFIKRQLVETRQITKHVAQILDSRMNTKYDENDKLIREVKVITLKSKLVSDFRKDFQFYKVREINNYHHAHDAYLNAVVGTALIKKYPKLESEFVYGDYKVYDVRKMIAKSEQEIGKATAKYFFYSNIMNFFKTEITLANGEIRKRPLIETNGETGEIVWDKGRDFATVRKVLSMPQVNIVKKTEVQTGGFSKESILPKRNSDKLIARKKDWDPKKYGGFDSPTVAYSVLVVAKVEKGKSKKLKSVKELLGITIMERSSFEKNPIDFLEAKGYKEVKKDLIIKLPKYSLFELENGRKRMLASAGELQKGNELALPSKYVNFLYLASHYEKLKGSPEDNEQKQLFVEQHKHYLDEIIEQISEFSKRVILADANLDKVLSAYNKHRDKPIREQAENIIHLFTLTNLGAPAAFKYFDTTIDRKRYTSTKEVLDATLIHQSITGLYETRIDLSQLGGDGGEAAAKGSSGGSGGLDDEYRLYSPLVKPDQNIQFWLEQFPQAWAETAGMGLAKQVPPQVIQLKASATPVSVRQYPLSKEAQEGIRPHVQRLIQQGILVPVQSPWNTPLLPVRKPGTNDYRPVQDLREVNKRVQDIHPTVPNPYNLLCALPPQRSWYTVLDLKDAFFCLRLHPTSQPLFAFEWRDPGTGRTGQLTWTRLPQGFKNSPTIFNEALHRDLANFRIQHPQVTLLQYVDDLLLAGATKQDCLEGTKALLLELSDLGYRASAKKAQICRREVTYLGYSLRDGQRWLTEARKKTVVQIPAPTTAKQVREFLGKAGFCRLFIPGFATLAAPLYPLTKPKGEFSWAPEHQKAFDAIKKALLSAPALALPDVTKPFTLYVDERKGVARGVLTQTLGPWRRPVAYLSKKLDPVASGWPVCLKAIAAVAILVKDADKLTLGQNITVIAPHALENIVRQPPDRWMTNARMTHYQSLLLTERVTFAPPAALNPATLLPEETDEPVTHDCHQLLIEETGVRKDLTDIPLTGEVLTWFTDGSSYVVEGKRMAGAAVVDGTRTIWASSLPEGTSAQKAELMALTQALRLAEGKSINIYTDSRYAFATAHVHGAIYKQRGWLTSAGREIKNKEEILSLLEALHLPKRLAIIHCPGHQKAKDPISRGNQMADRVAKQAAQGVNLLPAGKRTADGSEFEKRTADGSEFESPKKKAKVE

SEQ ID NO: 84 - protein, 2082 aa, synthetic construct
MPAAKRVKLDGGDKKYSIGLDIGTNSVGWAVITDEYKVPSKKFKVLGNTDRHSIKKNLIGALLFDSGETAEATRLKRTARRRYTRRKNRICYLQEIFSNEMAKVDDSFFHRLEESFLVEEDKKHERHPIFGNIVDEVAYHEKYPTIYHLRKKLVDSTDKADLRLIYLALAHMIKFRGHFLIEGDLNPDNSDVDKLFIQLVQTYNQLFEENPINASGVDAKAILSARLSKSRRLENLIAQLPGEKKNGLFGNLIALSLGLTPNFKSNFDLAEDAKLQLSKDTYDDDLDNLLAQIGDQYADLFLAAKNLSDAILLSDILRVNTEITKAPLSASMIKRYDEHHQDLTLLKALVRQQLPEKYKEIFFDQSKNGYAGYIDGGASQEEFYKFIKPILEKMDGTEELLVKLNREDLLRKQRTFDNGSIPHQIHLGELHAILRRQEDFYPFLKDNREKIEKILTFRIPYYVGPLARGNSRFAWMTRKSEETITPWNFEEVVDKGASAQSFIERMTNFDKNLPNEKVLPKHSLLYEYFTVYNELTKVKYVTEGMRKPAFLSGEQKKAIVDLLFKTNRKVTVKQLKEDYFKKIECFDSVEISGVEDRFNASLGTYHDLLKIIKDKDFLDNEENEDILEDIVLTLTLFEDREMIEERLKTYAHLFDDKVMKQLKRRRYTGWGRLSRKLINGIRDKQSGKTILDFLKSDGFANRNFMQLIHDDSLTFKEDIQKAQVSGQGDSLHEHIANLAGSPAIKKGILQTVKVVDELVKVMGRHKPENIVIEMARENQTTQKGQKNSRERMKRIEEGIKELGSQILKEHPVENTQLQNEKLYLYYLQNGRDMYVDQELDINRLSDYDVDHIVPQSFLKDDSIDNKVLTRSDKARGKSDNVPSEEVVKKMKNYWRQLLNAKLITQRKFDNLTKAERGGLSELDKAGFIKRQLVETRQITKHVAQILDSRMNTKYDENDKLIREVKVITLKSKLVSDFRKDFQFYKVREINNYHHAHDAYLNAVVGTALIKKYPKLESEFVYGDYKVYDVRKMIAKSEQEIGKATAKYFFYSNIMNFFKTEITLANGEIRKRPLIETNGETGEIVWDKGRDFATVRKVLSMPQVNIVKKTEVQTGGFSKESILPKRNSDKLIARKKDWDPKKYGGFDSPTVAYSVLVVAKVEKGKSKKLKSVKELLGITIMERSSFEKNPIDFLEAKGYKEVKKDLIIKLPKYSLFELENGRKRMLASAGELQKGNELALPSKYVNFLYLASHYEKLKGSPEDNEQKQLFVEQHKHYLDEIIEQISEFSKRVILADANLDKVLSAYNKHRDKPIREQAENIIHLFTLTNLGAPAAFKYFDTTIDRKRYTSTKEVLDATLIHQSITGLYETRIDLSQLGGDGGGGGGSGGLDDEYRLYSPLVKPDQNIQFWLEQFPQAWAETAGMGLAKQVPPQVIQLKASATPVSVRQYPLSKEAQEGIRPHVQRLIQQGILVPVQSPWNTPLLPVRKPGTNDYRPVQDLREVNKRVQDIHPTVPNPYNLLCALPPQRSWYTVLDLKDAFFCLRLHPTSQPLFAFEWRDPGTGRTGQLTWTRLPQGFKNSPTIFNEALHRDLANFRIQHPQVTLLQYVDDLLLAGATKQDCLEGTKALLLELSDLGYRASAKKAQICRREVTYLGYSLRDGQRWLTEARKKTVVQIPAPTTAKQVREFLGKAGFCRLFIPGFATLAAPLYPLTKPKGEFSWAPEHQKAFDAIKKALLSAPALALPDVTKPFTLYVDERKGVARGVLTQTLGPWRRPVAYLSKKLDPVASGWPVCLKAIAAVAILVKDADKLTLGQNITVIAPHALENIVRQPPDRWMTNARMTHYQSLLLTERVTFAPPAALNPATLLPEETDEPVTHDCHQLLIEETGVRKDLTDIPLTGEVLTWFTDGSSYVVEGKRMAGAAVVDGTRTIWASSLPEGTSAQKAELMALTQALRLAEGKSINIYTDSRYAFATAHVHGAIYKQRGWLTSAGREIKNKEEILSLLEALHLPKRLAIIHCPGHQKAKDPISRGNQMADRVAKQAAQGVNLLPAGKRTADGSEFEKRTADGSEFESPKKKAKVE

SEQ ID NO: 85 - protein, 2086 aa, synthetic construct
MPAAKRVKLDGGDKKYSIGLDIGTNSVGWAVITDEYKVPSKKFKVLGNTDRHSIKKNLIGALLFDSGETAEATRLKRTARRRYTRRKNRICYLQEIFSNEMAKVDDSFFHRLEESFLVEEDKKHERHPIFGNIVDEVAYHEKYPTIYHLRKKLVDSTDKADLRLIYLALAHMIKFRGHFLIEGDLNPDNSDVDKLFIQLVQTYNQLFEENPINASGVDAKAILSARLSKSRRLENLIAQLPGEKKNGLFGNLIALSLGLTPNFKSNFDLAEDAKLQLSKDTYDDDLDNLLAQIGDQYADLFLAAKNLSDAILLSDILRVNTEITKAPLSASMIKRYDEHHQDLTLLKALVRQQLPEKYKEIFFDQSKNGYAGYIDGGASQEEFYKFIKPILEKMDGTEELLVKLNREDLLRKQRTFDNGSIPHQIHLGELHAILRRQEDFYPFLKDNREKIEKILTFRIPYYVGPLARGNSRFAWMTRKSEETITPWNFEEVVDKGASAQSFIERMTNFDKNLPNEKVLPKHSLLYEYFTVYNELTKVKYVTEGMRKPAFLSGEQKKAIVDLLFKTNRKVTVKQLKEDYFKKIECFDSVEISGVEDRFNASLGTYHDLLKIIKDKDFLDNEENEDILEDIVLTLTLFEDREMIEERLKTYAHLFDDKVMKQLKRRRYTGWGRLSRKLINGIRDKQSGKTILDFLKSDGFANRNFMQLIHDDSLTFKEDIQKAQVSGQGDSLHEHIANLAGSPAIKKGILQTVKVVDELVKVMGRHKPENIVIEMARENQTTQKGQKNSRERMKRIEEGIKELGSQILKEHPVENTQLQNEKLYLYYLQNGRDMYVDQELDINRLSDYDVDHIVPQSFLKDDSIDNKVLTRSDKARGKSDNVPSEEVVKKMKNYWRQLLNAKLITQRKFDNLTKAERGGLSELDKAGFIKRQLVETRQITKHVAQILDSRMNTKYDENDKLIREVKVITLKSKLVSDFRKDFQFYKVREINNYHHAHDAYLNAVVGTALIKKYPKLESEFVYGDYKVYDVRKMIAKSEQEIGKATAKYFFYSNIMNFFKTEITLANGEIRKRPLIETNGETGEIVWDKGRDFATVRKVLSMPQVNIVKKTEVQTGGFSKESILPKRNSDKLIARKKDWDPKKYGGFDSPTVAYSVLVVAKVEKGKSKKLKSVKELLGITIMERSSFEKNPIDFLEAKGYKEVKKDLIIKLPKYSLFELENGRKRMLASAGELQKGNELALPSKYVNFLYLASHYEKLKGSPEDNEQKQLFVEQHKHYLDEIIEQISEFSKRVILADANLDKVLSAYNKHRDKPIREQAENIIHLFTLTNLGAPAAFKYFDTTIDRKRYTSTKEVLDATLIHQSITGLYETRIDLSQLGGDGGGSSGGSGGGGGLDDEYRLYSPLVKPDQNIQFWLEQFPQAWAETAGMGLAKQVPPQVIQLKASATPVSVRQYPLSKEAQEGIRPHVQRLIQQGILVPVQSPWNTPLLPVRKPGTNDYRPVQDLREVNKRVQDIHPTVPNPYNLLCALPPQRSWYTVLDLKDAFFCLRLHPTSQPLFAFEWRDPGTGRTGQLTWTRLPQGFKNSPTIFNEALHRDLANFRIQHPQVTLLQYVDDLLLAGATKQDCLEGTKALLLELSDLGYRASAKKAQICRREVTYLGYSLRDGQRWLTEARKKTVVQIPAPTTAKQVREFLGKAGFCRLFIPGFATLAAPLYPLTKPKGEFSWAPEHQKAFDAIKKALLSAPALALPDVTKPFTLYVDERKGVARGVLTQTLGPWRRPVAYLSKKLDPVASGWPVCLKAIAAVAILVKDADKLTLGQNITVIAPHALENIVRQPPDRWMTNARMTHYQSLLLTERVTFAPPAALNPATLLPEETDEPVTHDCHQLLIEETGVRKDLTDIPLTGEVLTWFTDGSSYVVEGKRMAGAAVVDGTRTIWASSLPEGTSAQKAELMALTQALRLAEGKSINIYTDSRYAFATAHVHGAIYKQRGWLTSAGREIKNKEEILSLLEALHLPKRLAIIHCPGHQKAKDPISRGNQMADRVAKQAAQGVNLLPAGKRTADGSEFEKRTADGSEFESPKKKAKVE

SEQ ID NO: 86 - protein, 2088 aa, synthetic construct
MPAAKRVKLDGGDKKYSIGLDIGTNSVGWAVITDEYKVPSKKFKVLGNTDRHSIKKNLIGALLFDSGETAEATRLKRTARRRYTRRKNRICYLQEIFSNEMAKVDDSFFHRLEESFLVEEDKKHERHPIFGNIVDEVAYHEKYPTIYHLRKKLVDSTDKADLRLIYLALAHMIKFRGHFLIEGDLNPDNSDVDKLFIQLVQTYNQLFEENPINASGVDAKAILSARLSKSRRLENLIAQLPGEKKNGLFGNLIALSLGLTPNFKSNFDLAEDAKLQLSKDTYDDDLDNLLAQIGDQYADLFLAAKNLSDAILLSDILRVNTEITKAPLSASMIKRYDEHHQDLTLLKALVRQQLPEKYKEIFFDQSKNGYAGYIDGGASQEEFYKFIKPILEKMDGTEELLVKLNREDLLRKQRTFDNGSIPHQIHLGELHAILRRQEDFYPFLKDNREKIEKILTFRIPYYVGPLARGNSRFAWMTRKSEETITPWNFEEVVDKGASAQSFIERMTNFDKNLPNEKVLPKHSLLYEYFTVYNELTKVKYVTEGMRKPAFLSGEQKKAIVDLLFKTNRKVTVKQLKEDYFKKIECFDSVEISGVEDRFNASLGTYHDLLKIIKDKDFLDNEENEDILEDIVLTLTLFEDREMIEERLKTYAHLFDDKVMKQLKRRRYTGWGRLSRKLINGIRDKQSGKTILDFLKSDGFANRNFMQLIHDDSLTFKEDIQKAQVSGQGDSLHEHIANLAGSPAIKKGILQTVKVVDELVKVMGRHKPENIVIEMARENQTTQKGQKNSRERMKRIEEGIKELGSQILKEHPVENTQLQNEKLYLYYLQNGRDMYVDQELDINRLSDYDVDHIVPQSFLKDDSIDNKVLTRSDKARGKSDNVPSEEVVKKMKNYWRQLLNAKLITQRKFDNLTKAERGGLSELDKAGFIKRQLVETRQITKHVAQILDSRMNTKYDENDKLIREVKVITLKSKLVSDFRKDFQFYKVREINNYHHAHDAYLNAVVGTALIKKYPKLESEFVYGDYKVYDVRKMIAKSEQEIGKATAKYFFYSNIMNFFKTEITLANGEIRKRPLIETNGETGEIVWDKGRDFATVRKVLSMPQVNIVKKTEVQTGGFSKESILPKRNSDKLIARKKDWDPKKYGGFDSPTVAYSVLVVAKVEKGKSKKLKSVKELLGITIMERSSFEKNPIDFLEAKGYKEVKKDLIIKLPKYSLFELENGRKRMLASAGELQKGNELALPSKYVNFLYLASHYEKLKGSPEDNEQKQLFVEQHKHYLDEIIEQISEFSKRVILADANLDKVLSAYNKHRDKPIREQAENIIHLFTLTNLGAPAAFKYFDTTIDRKRYTSTKEVLDATLIHQSITGLYETRIDLSQLGGDGGGSSPAPEAAAKGGLDDEYRLYSPLVKPDQNIQFWLEQFPQAWAETAGMGLAKQVPPQVIQLKASATPVSVRQYPLSKEAQEGIRPHVQRLIQQGILVPVQSPWNTPLLPVRKPGTNDYRPVQDLREVNKRVQDIHPTVPNPYNLLCALPPQRSWYTVLDLKDAFFCLRLHPTSQPLFAFEWRDPGTGRTGQLTWTRLPQGFKNSPTIFNEALHRDLANFRIQHPQVTLLQYVDDLLLAGATKQDCLEGTKALLLELSDLGYRASAKKAQICRREVTYLGYSLRDGQRWLTEARKKTVVQIPAPTTAKQVREFLGKAGFCRLFIPGFATLAAPLYPLTKPKGEFSWAPEHQKAFDAIKKALLSAPALALPDVTKPFTLYVDERKGVARGVLTQTLGPWRRPVAYLSKKLDPVASGWPVCLKAIAAVAILVKDADKLTLGQNITVIAPHALENIVRQPPDRWMTNARMTHYQSLLLTERVTFAPPAALNPATLLPEETDEPVTHDCHQLLIEETGVRKDLTDIPLTGEVLTWFTDGSSYVVEGKRMAGAAVVDGTRTIWASSLPEGTSAQKAELMALTQALRLAEGKSINIYTDSRYAFATAHVHGAIYKQRGWLTSAGREIKNKEEILSLLEALHLPKRLAIIHCPGHQKAKDPISRGNQMADRVAKQAAQGVNLLPAGKRTADGSEFEKRTADGSEFESPKKKAKVE

SEQ ID NO: 87 - protein, 2083 aa, synthetic construct
MPAAKRVKLDGGDKKYSIGLDIGTNSVGWAVITDEYKVPSKKFKVLGNTDRHSIKKNLIGALLFDSGETAEATRLKRTARRRYTRRKNRICYLQEIFSNEMAKVDDSFFHRLEESFLVEEDKKHERHPIFGNIVDEVAYHEKYPTIYHLRKKLVDSTDKADLRLIYLALAHMIKFRGHFLIEGDLNPDNSDVDKLFIQLVQTYNQLFEENPINASGVDAKAILSARLSKSRRLENLIAQLPGEKKNGLFGNLIALSLGLTPNFKSNFDLAEDAKLQLSKDTYDDDLDNLLAQIGDQYADLFLAAKNLSDAILLSDILRVNTEITKAPLSASMIKRYDEHHQDLTLLKALVRQQLPEKYKEIFFDQSKNGYAGYIDGGASQEEFYKFIKPILEKMDGTEELLVKLNREDLLRKQRTFDNGSIPHQIHLGELHAILRRQEDFYPFLKDNREKIEKILTFRIPYYVGPLARGNSRFAWMTRKSEETITPWNFEEVVDKGASAQSFIERMTNFDKNLPNEKVLPKHSLLYEYFTVYNELTKVKYVTEGMRKPAFLSGEQKKAIVDLLFKTNRKVTVKQLKEDYFKKIECFDSVEISGVEDRFNASLGTYHDLLKIIKDKDFLDNEENEDILEDIVLTLTLFEDREMIEERLKTYAHLFDDKVMKQLKRRRYTGWGRLSRKLINGIRDKQSGKTILDFLKSDGFANRNFMQLIHDDSLTFKEDIQKAQVSGQGDSLHEHIANLAGSPAIKKGILQTVKVVDELVKVMGRHKPENIVIEMARENQTTQKGQKNSRERMKRIEEGIKELGSQILKEHPVENTQLQNEKLYLYYLQNGRDMYVDQELDINRLSDYDVDHIVPQSFLKDDSIDNKVLTRSDKARGKSDNVPSEEVVKKMKNYWRQLLNAKLITQRKFDNLTKAERGGLSELDKAGFIKRQLVETRQITKHVAQILDSRMNTKYDENDKLIREVKVITLKSKLVSDFRKDFQFYKVREINNYHHAHDAYLNAVVGTALIKKYPKLESEFVYGDYKVYDVRKMIAKSEQEIGKATAKYFFYSNIMNFFKTEITLANGEIRKRPLIETNGETGEIVWDKGRDFATVRKVLSMPQVNIVKKTEVQTGGFSKESILPKRNSDKLIARKKDWDPKKYGGFDSPTVAYSVLVVAKVEKGKSKKLKSVKELLGITIMERSSFEKNPIDFLEAKGYKEVKKDLIIKLPKYSLFELENGRKRMLASAGELQKGNELALPSKYVNFLYLASHYEKLKGSPEDNEQKQLFVEQHKHYLDEIIEQISEFSKRVILADANLDKVLSAYNKHRDKPIREQAENIIHLFTLTNLGAPAAFKYFDTTIDRKRYTSTKEVLDATLIHQSITGLYETRIDLSQLGGDGGGGGGGSGGLDDEYRLYSPLVKPDQNIQFWLEQFPQAWAETAGMGLAKQVPPQVIQLKASATPVSVRQYPLSKEAQEGIRPHVQRLIQQGILVPVQSPWNTPLLPVRKPGTNDYRPVQDLREVNKRVQDIHPTVPNPYNLLCALPPQRSWYTVLDLKDAFFCLRLHPTSQPLFAFEWRDPGTGRTGQLTWTRLPQGFKNSPTIFNEALHRDLANFRIQHPQVTLLQYVDDLLLAGATKQDCLEGTKALLLELSDLGYRASAKKAQICRREVTYLGYSLRDGQRWLTEARKKTVVQIPAPTTAKQVREFLGKAGFCRLFIPGFATLAAPLYPLTKPKGEFSWAPEHQKAFDAIKKALLSAPALALPDVTKPFTLYVDERKGVARGVLTQTLGPWRRPVAYLSKKLDPVASGWPVCLKAIAAVAILVKDADKLTLGQNITVIAPHALENIVRQPPDRWMTNARMTHYQSLLLTERVTFAPPAALNPATLLPEETDEPVTHDCHQLLIEETGVRKDLTDIPLTGEVLTWFTDGSSYVVEGKRMAGAAVVDGTRTIWASSLPEGTSAQKAELMALTQALRLAEGKSINIYTDSRYAFATAHVHGAIYKQRGWLTSAGREIKNKEEILSLLEALHLPKRLAIIHCPGHQKAKDPISRGNQMADRVAKQAAQGVNLLPAGKRTADGSEFEKRTADGSEFESPKKKAKVE

SEQ ID NO: 88 - protein, 2083 aa, synthetic construct
MPAAKRVKLDGGDKKYSIGLDIGTNSVGWAVITDEYKVPSKKFKVLGNTDRHSIKKNLIGALLFDSGETAEATRLKRTARRRYTRRKNRICYLQEIFSNEMAKVDDSFFHRLEESFLVEEDKKHERHPIFGNIVDEVAYHEKYPTIYHLRKKLVDSTDKADLRLIYLALAHMIKFRGHFLIEGDLNPDNSDVDKLFIQLVQTYNQLFEENPINASGVDAKAILSARLSKSRRLENLIAQLPGEKKNGLFGNLIALSLGLTPNFKSNFDLAEDAKLQLSKDTYDDDLDNLLAQIGDQYADLFLAAKNLSDAILLSDILRVNTEITKAPLSASMIKRYDEHHQDLTLLKALVRQQLPEKYKEIFFDQSKNGYAGYIDGGASQEEFYKFIKPILEKMDGTEELLVKLNREDLLRKQRTFDNGSIPHQIHLGELHAILRRQEDFYPFLKDNREKIEKILTFRIPYYVGPLARGNSRFAWMTRKSEETITPWNFEEVVDKGASAQSFIERMTNFDKNLPNEKVLPKHSLLYEYFTVYNELTKVKYVTEGMRKPAFLSGEQKKAIVDLLFKTNRKVTVKQLKEDYFKKIECFDSVEISGVEDRFNASLGTYHDLLKIIKDKDFLDNEENEDILEDIVLTLTLFEDREMIEERLKTYAHLFDDKVMKQLKRRRYTGWGRLSRKLINGIRDKQSGKTILDFLKSDGFANRNFMQLIHDDSLTFKEDIQKAQVSGQGDSLHEHIANLAGSPAIKKGILQTVKVVDELVKVMGRHKPENIVIEMARENQTTQKGQKNSRERMKRIEEGIKELGSQILKEHPVENTQLQNEKLYLYYLQNGRDMYVDQELDINRLSDYDVDHIVPQSFLKDDSIDNKVLTRSDKARGKSDNVPSEEVVKKMKNYWRQLLNAKLITQRKFDNLTKAERGGLSELDKAGFIKRQLVETRQITKHVAQILDSRMNTKYDENDKLIREVKVITLKSKLVSDFRKDFQFYKVREINNYHHAHDAYLNAVVGTALIKKYPKLESEFVYGDYKVYDVRKMIAKSEQEIGKATAKYFFYSNIMNFFKTEITLANGEIRKRPLIETNGETGEIVWDKGRDFATVRKVLSMPQVNIVKKTEVQTGGFSKESILPKRNSDKLIARKKDWDPKKYGGFDSPTVAYSVLVVAKVEKGKSKKLKSVKELLGITIMERSSFEKNPIDFLEAKGYKEVKKDLIIKLPKYSLFELENGRKRMLASAGELQKGNELALPSKYVNFLYLASHYEKLKGSPEDNEQKQLFVEQHKHYLDEIIEQISEFSKRVILADANLDKVLSAYNKHRDKPIREQAENIIHLFTLTNLGAPAAFKYFDTTIDRKRYTSTKEVLDATLIHQSITGLYETRIDLSQLGGDGGGSSGGSGGLDDEYRLYSPLVKPDQNIQFWLEQFPQAWAETAGMGLAKQVPPQVIQLKASATPVSVRQYPLSKEAQEGIRPHVQRLIQQGILVPVQSPWNTPLLPVRKPGTNDYRPVQDLREVNKRVQDIHPTVPNPYNLLCALPPQRSWYTVLDLKDAFFCLRLHPTSQPLFAFEWRDPGTGRTGQLTWTRLPQGFKNSPTIFNEALHRDLANFRIQHPQVTLLQYVDDLLLAGATKQDCLEGTKALLLELSDLGYRASAKKAQICRREVTYLGYSLRDGQRWLTEARKKTVVQIPAPTTAKQVREFLGKAGFCRLFIPGFATLAAPLYPLTKPKGEFSWAPEHQKAFDAIKKALLSAPALALPDVTKPFTLYVDERKGVARGVLTQTLGPWRRPVAYLSKKLDPVASGWPVCLKAIAAVAILVKDADKLTLGQNITVIAPHALENIVRQPPDRWMTNARMTHYQSLLLTERVTFAPPAALNPATLLPEETDEPVTHDCHQLLIEETGVRKDLTDIPLTGEVLTWFTDGSSYVVEGKRMAGAAVVDGTRTIWASSLPEGTSAQKAELMALTQALRLAEGKSINIYTDSRYAFATAHVHGAIYKQRGWLTSAGREIKNKEEILSLLEALHLPKRLAIIHCPGHQKAKDPISRGNQMADRVAKQAAQGVNLLPAGKRTADGSEFEKRTADGSEFESPKKKAKVE

SEQ ID NO: 89 - protein, 2086 aa, synthetic construct
MPAAKRVKLDGGDKKYSIGLDIGTNSVGWAVITDEYKVPSKKFKVLGNTDRHSIKKNLIGALLFDSGETAEATRLKRTARRRYTRRKNRICYLQEIFSNEMAKVDDSFFHRLEESFLVEEDKKHERHPIFGNIVDEVAYHEKYPTIYHLRKKLVDSTDKADLRLIYLALAHMIKFRGHFLIEGDLNPDNSDVDKLFIQLVQTYNQLFEENPINASGVDAKAILSARLSKSRRLENLIAQLPGEKKNGLFGNLIALSLGLTPNFKSNFDLAEDAKLQLSKDTYDDDLDNLLAQIGDQYADLFLAAKNLSDAILLSDILRVNTEITKAPLSASMIKRYDEHHQDLTLLKALVRQQLPEKYKEIFFDQSKNGYAGYIDGGASQEEFYKFIKPILEKMDGTEELLVKLNREDLLRKQRTFDNGSIPHQIHLGELHAILRRQEDFYPFLKDNREKIEKILTFRIPYYVGPLARGNSRFAWMTRKSEETITPWNFEEVVDKGASAQSFIERMTNFDKNLPNEKVLPKHSLLYEYFTVYNELTKVKYVTEGMRKPAFLSGEQKKAIVDLLFKTNRKVTVKQLKEDYFKKIECFDSVEISGVEDRFNASLGTYHDLLKIIKDKDFLDNEENEDILEDIVLTLTLFEDREMIEERLKTYAHLFDDKVMKQLKRRRYTGWGRLSRKLINGIRDKQSGKTILDFLKSDGFANRNFMQLIHDDSLTFKEDIQKAQVSGQGDSLHEHIANLAGSPAIKKGILQTVKVVDELVKVMGRHKPENIVIEMARENQTTQKGQKNSRERMKRIEEGIKELGSQILKEHPVENTQLQNEKLYLYYLQNGRDMYVDQELDINRLSDYDVDHIVPQSFLKDDSIDNKVLTRSDKARGKSDNVPSEEVVKKMKNYWRQLLNAKLITQRKFDNLTKAERGGLSELDKAGFIKRQLVETRQITKHVAQILDSRMNTKYDENDKLIREVKVITLKSKLVSDFRKDFQFYKVREINNYHHAHDAYLNAVVGTALIKKYPKLESEFVYGDYKVYDVRKMIAKSEQEIGKATAKYFFYSNIMNFFKTEITLANGEIRKRPLIETNGETGEIVWDKGRDFATVRKVLSMPQVNIVKKTEVQTGGFSKESILPKRNSDKLIARKKDWDPKKYGGFDSPTVAYSVLVVAKVEKGKSKKLKSVKELLGITIMERSSFEKNPIDFLEAKGYKEVKKDLIIKLPKYSLFELENGRKRMLASAGELQKGNELALPSKYVNFLYLASHYEKLKGSPEDNEQKQLFVEQHKHYLDEIIEQISEFSKRVILADANLDKVLSAYNKHRDKPIREQAENIIHLFTLTNLGAPAAFKYFDTTIDRKRYTSTKEVLDATLIHQSITGLYETRIDLSQLGGDGGPAPGSSGGGGGLDDEYRLYSPLVKPDQNIQFWLEQFPQAWAETAGMGLAKQVPPQVIQLKASATPVSVRQYPLSKEAQEGIRPHVQRLIQQGILVPVQSPWNTPLLPVRKPGTNDYRPVQDLREVNKRVQDIHPTVPNPYNLLCALPPQRSWYTVLDLKDAFFCLRLHPTSQPLFAFEWRDPGTGRTGQLTWTRLPQGFKNSPTIFNEALHRDLANFRIQHPQVTLLQYVDDLLLAGATKQDCLEGTKALLLELSDLGYRASAKKAQICRREVTYLGYSLRDGQRWLTEARKKTVVQIPAPTTAKQVREFLGKAGFCRLFIPGFATLAAPLYPLTKPKGEFSWAPEHQKAFDAIKKALLSAPALALPDVTKPFTLYVDERKGVARGVLTQTLGPWRRPVAYLSKKLDPVASGWPVCLKAIAAVAILVKDADKLTLGQNITVIAPHALENIVRQPPDRWMTNARMTHYQSLLLTERVTFAPPAALNPATLLPEETDEPVTHDCHQLLIEETGVRKDLTDIPLTGEVLTWFTDGSSYVVEGKRMAGAAVVDGTRTIWASSLPEGTSAQKAELMALTQALRLAEGKSINIYTDSRYAFATAHVHGAIYKQRGWLTSAGREIKNKEEILSLLEALHLPKRLAIIHCPGHQKAKDPISRGNQMADRVAKQAAQGVNLLPAGKRTADGSEFEKRTADGSEFESPKKKAKVE

SEQ ID NO: 90 - protein, 2093 aa, synthetic construct
MPAAKRVKLDGGDKKYSIGLDIGTNSVGWAVITDEYKVPSKKFKVLGNTDRHSIKKNLIGALLFDSGETAEATRLKRTARRRYTRRKNRICYLQEIFSNEMAKVDDSFFHRLEESFLVEEDKKHERHPIFGNIVDEVAYHEKYPTIYHLRKKLVDSTDKADLRLIYLALAHMIKFRGHFLIEGDLNPDNSDVDKLFIQLVQTYNQLFEENPINASGVDAKAILSARLSKSRRLENLIAQLPGEKKNGLFGNLIALSLGLTPNFKSNFDLAEDAKLQLSKDTYDDDLDNLLAQIGDQYADLFLAAKNLSDAILLSDILRVNTEITKAPLSASMIKRYDEHHQDLTLLKALVRQQLPEKYKEIFFDQSKNGYAGYIDGGASQEEFYKFIKPILEKMDGTEELLVKLNREDLLRKQRTFDNGSIPHQIHLGELHAILRRQEDFYPFLKDNREKIEKILTFRIPYYVGPLARGNSRFAWMTRKSEETITPWNFEEVVDKGASAQSFIERMTNFDKNLPNEKVLPKHSLLYEYFTVYNELTKVKYVTEGMRKPAFLSGEQKKAIVDLLFKTNRKVTVKQLKEDYFKKIECFDSVEISGVEDRFNASLGTYHDLLKIIKDKDFLDNEENEDILEDIVLTLTLFEDREMIEERLKTYAHLFDDKVMKQLKRRRYTGWGRLSRKLINGIRDKQSGKTILDFLKSDGFANRNFMQLIHDDSLTFKEDIQKAQVSGQGDSLHEHIANLAGSPAIKKGILQTVKVVDELVKVMGRHKPENIVIEMARENQTTQKGQKNSRERMKRIEEGIKELGSQILKEHPVENTQLQNEKLYLYYLQNGRDMYVDQELDINRLSDYDVDHIVPQSFLKDDSIDNKVLTRSDKARGKSDNVPSEEVVKKMKNYWRQLLNAKLITQRKFDNLTKAERGGLSELDKAGFIKRQLVETRQITKHVAQILDSRMNTKYDENDKLIREVKVITLKSKLVSDFRKDFQFYKVREINNYHHAHDAYLNAVVGTALIKKYPKLESEFVYGDYKVYDVRKMIAKSEQEIGKATAKYFFYSNIMNFFKTEITLANGEIRKRPLIETNGETGEIVWDKGRDFATVRKVLSMPQVNIVKKTEVQTGGFSKESILPKRNSDKLIARKKDWDPKKYGGFDSPTVAYSVLVVAKVEKGKSKKLKSVKELLGITIMERSSFEKNPIDFLEAKGYKEVKKDLIIKLPKYSLFELENGRKRMLASAGELQKGNELALPSKYVNFLYLASHYEKLKGSPEDNEQKQLFVEQHKHYLDEIIEQISEFSKRVILADANLDKVLSAYNKHRDKPIREQAENIIHLFTLTNLGAPAAFKYFDTTIDRKRYTSTKEVLDATLIHQSITGLYETRIDLSQLGGDGGSGSETPGTSESATPESGGLDDEYRLYSPLVKPDQNIQFWLEQFPQAWAETAGMGLAKQVPPQVIQLKASATPVSVRQYPLSKEAQEGIRPHVQRLIQQGILVPVQSPWNTPLLPVRKPGTNDYRPVQDLREVNKRVQDIHPTVPNPYNLLCALPPQRSWYTVLDLKDAFFCLRLHPTSQPLFAFEWRDPGTGRTGQLTWTRLPQGFKNSPTIFNEALHRDLANFRIQHPQVTLLQYVDDLLLAGATKQDCLEGTKALLLELSDLGYRASAKKAQICRREVTYLGYSLRDGQRWLTEARKKTVVQIPAPTTAKQVREFLGKAGFCRLFIPGFATLAAPLYPLTKPKGEFSWAPEHQKAFDAIKKALLSAPALALPDVTKPFTLYVDERKGVARGVLTQTLGPWRRPVAYLSKKLDPVASGWPVCLKAIAAVAILVKDADKLTLGQNITVIAPHALENIVRQPPDRWMTNARMTHYQSLLLTERVTFAPPAALNPATLLPEETDEPVTHDCHQLLIEETGVRKDLTDIPLTGEVLTWFTDGSSYVVEGKRMAGAAVVDGTRTIWASSLPEGTSAQKAELMALTQALRLAEGKSINIYTDSRYAFATAHVHGAIYKQRGWLTSAGREIKNKEEILSLLEALHLPKRLAIIHCPGHQKAKDPISRGNQMADRVAKQAAQGVNLLPAGKRTADGSEFEKRTADGSEFESPKKKAKVE

SEQ ID NO: 91 - protein, 2086 aa, synthetic construct
MPAAKRVKLDGGDKKYSIGLDIGTNSVGWAVITDEYKVPSKKFKVLGNTDRHSIKKNLIGALLFDSGETAEATRLKRTARRRYTRRKNRICYLQEIFSNEMAKVDDSFFHRLEESFLVEEDKKHERHPIFGNIVDEVAYHEKYPTIYHLRKKLVDSTDKADLRLIYLALAHMIKFRGHFLIEGDLNPDNSDVDKLFIQLVQTYNQLFEENPINASGVDAKAILSARLSKSRRLENLIAQLPGEKKNGLFGNLIALSLGLTPNFKSNFDLAEDAKLQLSKDTYDDDLDNLLAQIGDQYADLFLAAKNLSDAILLSDILRVNTEITKAPLSASMIKRYDEHHQDLTLLKALVRQQLPEKYKEIFFDQSKNGYAGYIDGGASQEEFYKFIKPILEKMDGTEELLVKLNREDLLRKQRTFDNGSIPHQIHLGELHAILRRQEDFYPFLKDNREKIEKILTFRIPYYVGPLARGNSRFAWMTRKSEETITPWNFEEVVDKGASAQSFIERMTNFDKNLPNEKVLPKHSLLYEYFTVYNELTKVKYVTEGMRKPAFLSGEQKKAIVDLLFKTNRKVTVKQLKEDYFKKIECFDSVEISGVEDRFNASLGTYHDLLKIIKDKDFLDNEENEDILEDIVLTLTLFEDREMIEERLKTYAHLFDDKVMKQLKRRRYTGWGRLSRKLINGIRDKQSGKTILDFLKSDGFANRNFMQLIHDDSLTFKEDIQKAQVSGQGDSLHEHIANLAGSPAIKKGILQTVKVVDELVKVMGRHKPENIVIEMARENQTTQKGQKNSRERMKRIEEGIKELGSQILKEHPVENTQLQNEKLYLYYLQNGRDMYVDQELDINRLSDYDVDHIVPQSFLKDDSIDNKVLTRSDKARGKSDNVPSEEVVKKMKNYWRQLLNAKLITQRKFDNLTKAERGGLSELDKAGFIKRQLVETRQITKHVAQILDSRMNTKYDENDKLIREVKVITLKSKLVSDFRKDFQFYKVREINNYHHAHDAYLNAVVGTALIKKYPKLESEFVYGDYKVYDVRKMIAKSEQEIGKATAKYFFYSNIMNFFKTEITLANGEIRKRPLIETNGETGEIVWDKGRDFATVRKVLSMPQVNIVKKTEVQTGGFSKESILPKRNSDKLIARKKDWDPKKYGGFDSPTVAYSVLVVAKVEKGKSKKLKSVKELLGITIMERSSFEKNPIDFLEAKGYKEVKKDLIIKLPKYSLFELENGRKRMLASAGELQKGNELALPSKYVNFLYLASHYEKLKGSPEDNEQKQLFVEQHKHYLDEIIEQISEFSKRVILADANLDKVLSAYNKHRDKPIREQAENIIHLFTLTNLGAPAAFKYFDTTIDRKRYTSTKEVLDATLIHQSITGLYETRIDLSQLGGDGGGSSGGGPAPGGLDDEYRLYSPLVKPDQNIQFWLEQFPQAWAETAGMGLAKQVPPQVIQLKASATPVSVRQYPLSKEAQEGIRPHVQRLIQQGILVPVQSPWNTPLLPVRKPGTNDYRPVQDLREVNKRVQDIHPTVPNPYNLLCALPPQRSWYTVLDLKDAFFCLRLHPTSQPLFAFEWRDPGTGRTGQLTWTRLPQGFKNSPTIFNEALHRDLANFRIQHPQVTLLQYVDDLLLAGATKQDCLEGTKALLLELSDLGYRASAKKAQICRREVTYLGYSLRDGQRWLTEARKKTVVQIPAPTTAKQVREFLGKAGFCRLFIPGFATLAAPLYPLTKPKGEFSWAPEHQKAFDAIKKALLSAPALALPDVTKPFTLYVDERKGVARGVLTQTLGPWRRPVAYLSKKLDPVASGWPVCLKAIAAVAILVKDADKLTLGQNITVIAPHALENIVRQPPDRWMTNARMTHYQSLLLTERVTFAPPAALNPATLLPEETDEPVTHDCHQLLIEETGVRKDLTDIPLTGEVLTWFTDGSSYVVEGKRMAGAAVVDGTRTIWASSLPEGTSAQKAELMALTQALRLAEGKSINIYTDSRYAFATAHVHGAIYKQRGWLTSAGREIKNKEEILSLLEALHLPKRLAIIHCPGHQKAKDPISRGNQMADRVAKQAAQGVNLLPAGKRTADGSEFEKRTADGSEFESPKKKAKVE

SEQ ID NO: 92 - protein, 2088 aa, synthetic construct
MPAAKRVKLDGGDKKYSIGLDIGTNSVGWAVITDEYKVPSKKFKVLGNTDRHSIKKNLIGALLFDSGETAEATRLKRTARRRYTRRKNRICYLQEIFSNEMAKVDDSFFHRLEESFLVEEDKKHERHPIFGNIVDEVAYHEKYPTIYHLRKKLVDSTDKADLRLIYLALAHMIKFRGHFLIEGDLNPDNSDVDKLFIQLVQTYNQLFEENPINASGVDAKAILSARLSKSRRLENLIAQLPGEKKNGLFGNLIALSLGLTPNFKSNFDLAEDAKLQLSKDTYDDDLDNLLAQIGDQYADLFLAAKNLSDAILLSDILRVNTEITKAPLSASMIKRYDEHHQDLTLLKALVRQQLPEKYKEIFFDQSKNGYAGYIDGGASQEEFYKFIKPILEKMDGTEELLVKLNREDLLRKQRTFDNGSIPHQIHLGELHAILRRQEDFYPFLKDNREKIEKILTFRIPYYVGPLARGNSRFAWMTRKSEETITPWNFEEVVDKGASAQSFIERMTNFDKNLPNEKVLPKHSLLYEYFTVYNELTKVKYVTEGMRKPAFLSGEQKKAIVDLLFKTNRKVTVKQLKEDYFKKIECFDSVEISGVEDRFNASLGTYHDLLKIIKDKDFLDNEENEDILEDIVLTLTLFEDREMIEERLKTYAHLFDDKVMKQLKRRRYTGWGRLSRKLINGIRDKQSGKTILDFLKSDGFANRNFMQLIHDDSLTFKEDIQKAQVSGQGDSLHEHIANLAGSPAIKKGILQTVKVVDELVKVMGRHKPENIVIEMARENQTTQKGQKNSRERMKRIEEGIKELGSQILKEHPVENTQLQNEKLYLYYLQNGRDMYVDQELDINRLSDYDVDHIVPQSFLKDDSIDNKVLTRSDKARGKSDNVPSEEVVKKMKNYWRQLLNAKLITQRKFDNLTKAERGGLSELDKAGFIKRQLVETRQITKHVAQILDSRMNTKYDENDKLIREVKVITLKSKLVSDFRKDFQFYKVREINNYHHAHDAYLNAVVGTALIKKYPKLESEFVYGDYKVYDVRKMIAKSEQEIGKATAKYFFYSNIMNFFKTEITLANGEIRKRPLIETNGETGEIVWDKGRDFATVRKVLSMPQVNIVKKTEVQTGGFSKESILPKRNSDKLIARKKDWDPKKYGGFDSPTVAYSVLVVAKVEKGKSKKLKSVKELLGITIMERSSFEKNPIDFLEAKGYKEVKKDLIIKLPKYSLFELENGRKRMLASAGELQKGNELALPSKYVNFLYLASHYEKLKGSPEDNEQKQLFVEQHKHYLDEIIEQISEFSKRVILADANLDKVLSAYNKHRDKPIREQAENIIHLFTLTNLGAPAAFKYFDTTIDRKRYTSTKEVLDATLIHQSITGLYETRIDLSQLGGDGGGGSEAAAKGSSGGLDDEYRLYSPLVKPDQNIQFWLEQFPQAWAETAGMGLAKQVPPQVIQLKASATPVSVRQYPLSKEAQEGIRPHVQRLIQQGILVPVQSPWNTPLLPVRKPGTNDYRPVQDLREVNKRVQDIHPTVPNPYNLLCALPPQRSWYTVLDLKDAFFCLRLHPTSQPLFAFEWRDPGTGRTGQLTWTRLPQGFKNSPTIFNEALHRDLANFRIQHPQVTLLQYVDDLLLAGATKQDCLEGTKALLLELSDLGYRASAKKAQICRREVTYLGYSLRDGQRWLTEARKKTVVQIPAPTTAKQVREFLGKAGFCRLFIPGFATLAAPLYPLTKPKGEFSWAPEHQKAFDAIKKALLSAPALALPDVTKPFTLYVDERKGVARGVLTQTLGPWRRPVAYLSKKLDPVASGWPVCLKAIAAVAILVKDADKLTLGQNITVIAPHALENIVRQPPDRWMTNARMTHYQSLLLTERVTFAPPAALNPATLLPEETDEPVTHDCHQLLIEETGVRKDLTDIPLTGEVLTWFTDGSSYVVEGKRMAGAAVVDGTRTIWASSLPEGTSAQKAELMALTQALRLAEGKSINIYTDSRYAFATAHVHGAIYKQRGWLTSAGREIKNKEEILSLLEALHLPKRLAIIHCPGHQKAKDPISRGNQMADRVAKQAAQGVNLLPAGKRTADGSEFEKRTADGSEFESPKKKAKVE

SEQ ID NO: 93 - protein, 2088 aa, synthetic construct
MPAAKRVKLDGGDKKYSIGLDIGTNSVGWAVITDEYKVPSKKFKVLGNTDRHSIKKNLIGALLFDSGETAEATRLKRTARRRYTRRKNRICYLQEIFSNEMAKVDDSFFHRLEESFLVEEDKKHERHPIFGNIVDEVAYHEKYPTIYHLRKKLVDSTDKADLRLIYLALAHMIKFRGHFLIEGDLNPDNSDVDKLFIQLVQTYNQLFEENPINASGVDAKAILSARLSKSRRLENLIAQLPGEKKNGLFGNLIALSLGLTPNFKSNFDLAEDAKLQLSKDTYDDDLDNLLAQIGDQYADLFLAAKNLSDAILLSDILRVNTEITKAPLSASMIKRYDEHHQDLTLLKALVRQQLPEKYKEIFFDQSKNGYAGYIDGGASQEEFYKFIKPILEKMDGTEELLVKLNREDLLRKQRTFDNGSIPHQIHLGELHAILRRQEDFYPFLKDNREKIEKILTFRIPYYVGPLARGNSRFAWMTRKSEETITPWNFEEVVDKGASAQSFIERMTNFDKNLPNEKVLPKHSLLYEYFTVYNELTKVKYVTEGMRKPAFLSGEQKKAIVDLLFKTNRKVTVKQLKEDYFKKIECFDSVEISGVEDRFNASLGTYHDLLKIIKDKDFLDNEENEDILEDIVLTLTLFEDREMIEERLKTYAHLFDDKVMKQLKRRRYTGWGRLSRKLINGIRDKQSGKTILDFLKSDGFANRNFMQLIHDDSLTFKEDIQKAQVSGQGDSLHEHIANLAGSPAIKKGILQTVKVVDELVKVMGRHKPENIVIEMARENQTTQKGQKNSRERMKRIEEGIKELGSQILKEHPVENTQLQNEKLYLYYLQNGRDMYVDQELDINRLSDYDVDHIVPQSFLKDDSIDNKVLTRSDKARGKSDNVPSEEVVKKMKNYWRQLLNAKLITQRKFDNLTKAERGGLSELDKAGFIKRQLVETRQITKHVAQILDSRMNTKYDENDKLIREVKVITLKSKLVSDFRKDFQFYKVREINNYHHAHDAYLNAVVGTALIKKYPKLESEFVYGDYKVYDVRKMIAKSEQEIGKATAKYFFYSNIMNFFKTEITLANGEIRKRPLIETNGETGEIVWDKGRDFATVRKVLSMPQVNIVKKTEVQTGGFSKESILPKRNSDKLIARKKDWDPKKYGGFDSPTVAYSVLVVAKVEKGKSKKLKSVKELLGITIMERSSFEKNPIDFLEAKGYKEVKKDLIIKLPKYSLFELENGRKRMLASAGELQKGNELALPSKYVNFLYLASHYEKLKGSPEDNEQKQLFVEQHKHYLDEIIEQISEFSKRVILADANLDKVLSAYNKHRDKPIREQAENIIHLFTLTNLGAPAAFKYFDTTIDRKRYTSTKEVLDATLIHQSITGLYETRIDLSQLGGDGGPAPEAAAKGSSGGLDDEYRLYSPLVKPDQNIQFWLEQFPQAWAETAGMGLAKQVPPQVIQLKASATPVSVRQYPLSKEAQEGIRPHVQRLIQQGILVPVQSPWNTPLLPVRKPGTNDYRPVQDLREVNKRVQDIHPTVPNPYNLLCALPPQRSWYTVLDLKDAFFCLRLHPTSQPLFAFEWRDPGTGRTGQLTWTRLPQGFKNSPTIFNEALHRDLANFRIQHPQVTLLQYVDDLLLAGATKQDCLEGTKALLLELSDLGYRASAKKAQICRREVTYLGYSLRDGQRWLTEARKKTVVQIPAPTTAKQVREFLGKAGFCRLFIPGFATLAAPLYPLTKPKGEFSWAPEHQKAFDAIKKALLSAPALALPDVTKPFTLYVDERKGVARGVLTQTLGPWRRPVAYLSKKLDPVASGWPVCLKAIAAVAILVKDADKLTLGQNITVIAPHALENIVRQPPDRWMTNARMTHYQSLLLTERVTFAPPAALNPATLLPEETDEPVTHDCHQLLIEETGVRKDLTDIPLTGEVLTWFTDGSSYVVEGKRMAGAAVVDGTRTIWASSLPEGTSAQKAELMALTQALRLAEGKSINIYTDSRYAFATAHVHGAIYKQRGWLTSAGREIKNKEEILSLLEALHLPKRLAIIHCPGHQKAKDPISRGNQMADRVAKQAAQGVNLLPAGKRTADGSEFEKRTADGSEFESPKKKAKVE

SEQ ID NO: 94 - protein, 2088 aa, synthetic construct
MPAAKRVKLDGGDKKYSIGLDIGTNSVGWAVITDEYKVPSKKFKVLGNTDRHSIKKNLIGALLFDSGETAEATRLKRTARRRYTRRKNRICYLQEIFSNEMAKVDDSFFHRLEESFLVEEDKKHERHPIFGNIVDEVAYHEKYPTIYHLRKKLVDSTDKADLRLIYLALAHMIKFRGHFLIEGDLNPDNSDVDKLFIQLVQTYNQLFEENPINASGVDAKAILSARLSKSRRLENLIAQLPGEKKNGLFGNLIALSLGLTPNFKSNFDLAEDAKLQLSKDTYDDDLDNLLAQIGDQYADLFLAAKNLSDAILLSDILRVNTEITKAPLSASMIKRYDEHHQDLTLLKALVRQQLPEKYKEIFFDQSKNGYAGYIDGGASQEEFYKFIKPILEKMDGTEELLVKLNREDLLRKQRTFDNGSIPHQIHLGELHAILRRQEDFYPFLKDNREKIEKILTFRIPYYVGPLARGNSRFAWMTRKSEETITPWNFEEVVDKGASAQSFIERMTNFDKNLPNEKVLPKHSLLYEYFTVYNELTKVKYVTEGMRKPAFLSGEQKKAIVDLLFKTNRKVTVKQLKEDYFKKIECFDSVEISGVEDRFNASLGTYHDLLKIIKDKDFLDNEENEDILEDIVLTLTLFEDREMIEERLKTYAHLFDDKVMKQLKRRRYTGWGRLSRKLINGIRDKQSGKTILDFLKSDGFANRNFMQLIHDDSLTFKEDIQKAQVSGQGDSLHEHIANLAGSPAIKKGILQTVKVVDELVKVMGRHKPENIVIEMARENQTTQKGQKNSRERMKRIEEGIKELGSQILKEHPVENTQLQNEKLYLYYLQNGRDMYVDQELDINRLSDYDVDHIVPQSFLKDDSIDNKVLTRSDKARGKSDNVPSEEVVKKMKNYWRQLLNAKLITQRKFDNLTKAERGGLSELDKAGFIKRQLVETRQITKHVAQILDSRMNTKYDENDKLIREVKVITLKSKLVSDFRKDFQFYKVREINNYHHAHDAYLNAVVGTALIKKYPKLESEFVYGDYKVYDVRKMIAKSEQEIGKATAKYFFYSNIMNFFKTEITLANGEIRKRPLIETNGETGEIVWDKGRDFATVRKVLSMPQVNIVKKTEVQTGGFSKESILPKRNSDKLIARKKDWDPKKYGGFDSPTVAYSVLVVAKVEKGKSKKLKSVKELLGITIMERSSFEKNPIDFLEAKGYKEVKKDLIIKLPKYSLFELENGRKRMLASAGELQKGNELALPSKYVNFLYLASHYEKLKGSPEDNEQKQLFVEQHKHYLDEIIEQISEFSKRVILADANLDKVLSAYNKHRDKPIREQAENIIHLFTLTNLGAPAAFKYFDTTIDRKRYTSTKEVLDATLIHQSITGLYETRIDLSQLGGDGGGGSGGGEAAAKGGLDDEYRLYSPLVKPDQNIQFWLEQFPQAWAETAGMGLAKQVPPQVIQLKASATPVSVRQYPLSKEAQEGIRPHVQRLIQQGILVPVQSPWNTPLLPVRKPGTNDYRPVQDLREVNKRVQDIHPTVPNPYNLLCALPPQRSWYTVLDLKDAFFCLRLHPTSQPLFAFEWRDPGTGRTGQLTWTRLPQGFKNSPTIFNEALHRDLANFRIQHPQVTLLQYVDDLLLAGATKQDCLEGTKALLLELSDLGYRASAKKAQICRREVTYLGYSLRDGQRWLTEARKKTVVQIPAPTTAKQVREFLGKAGFCRLFIPGFATLAAPLYPLTKPKGEFSWAPEHQKAFDAIKKALLSAPALALPDVTKPFTLYVDERKGVARGVLTQTLGPWRRPVAYLSKKLDPVASGWPVCLKAIAAVAILVKDADKLTLGQNITVIAPHALENIVRQPPDRWMTNARMTHYQSLLLTERVTFAPPAALNPATLLPEETDEPVTHDCHQLLIEETGVRKDLTDIPLTGEVLTWFTDGSSYVVEGKRMAGAAVVDGTRTIWASSLPEGTSAQKAELMALTQALRLAEGKSINIYTDSRYAFATAHVHGAIYKQRGWLTSAGREIKNKEEILSLLEALHLPKRLAIIHCPGHQKAKDPISRGNQMADRVAKQAAQGVNLLPAGKRTADGSEFEKRTADGSEFESPKKKAKVE

SEQ ID NO: 95 - protein, 2086 aa, synthetic construct
MPAAKRVKLDGGDKKYSIGLDIGTNSVGWAVITDEYKVPSKKFKVLGNTDRHSIKKNLIGALLFDSGETAEATRLKRTARRRYTRRKNRICYLQEIFSNEMAKVDDSFFHRLEESFLVEEDKKHERHPIFGNIVDEVAYHEKYPTIYHLRKKLVDSTDKADLRLIYLALAHMIKFRGHFLIEGDLNPDNSDVDKLFIQLVQTYNQLFEENPINASGVDAKAILSARLSKSRRLENLIAQLPGEKKNGLFGNLIALSLGLTPNFKSNFDLAEDAKLQLSKDTYDDDLDNLLAQIGDQYADLFLAAKNLSDAILLSDILRVNTEITKAPLSASMIKRYDEHHQDLTLLKALVRQQLPEKYKEIFFDQSKNGYAGYIDGGASQEEFYKFIKPILEKMDGTEELLVKLNREDLLRKQRTFDNGSIPHQIHLGELHAILRRQEDFYPFLKDNREKIEKILTFRIPYYVGPLARGNSRFAWMTRKSEETITPWNFEEVVDKGASAQSFIERMTNFDKNLPNEKVLPKHSLLYEYFTVYNELTKVKYVTEGMRKPAFLSGEQKKAIVDLLFKTNRKVTVKQLKEDYFKKIECFDSVEISGVEDRFNASLGTYHDLLKIIKDKDFLDNEENEDILEDIVLTLTLFEDREMIEERLKTYAHLFDDKVMKQLKRRRYTGWGRLSRKLINGIRDKQSGKTILDFLKSDGFANRNFMQLIHDDSLTFKEDIQKAQVSGQGDSLHEHIANLAGSPAIKKGILQTVKVVDELVKVMGRHKPENIVIEMARENQTTQKGQKNSRERMKRIEEGIKELGSQILKEHPVENTQLQNEKLYLYYLQNGRDMYVDQELDINRLSDYDVDHIVPQSFLKDDSIDNKVLTRSDKARGKSDNVPSEEVVKKMKNYWRQLLNAKLITQRKFDNLTKAERGGLSELDKAGFIKRQLVETRQITKHVAQILDSRMNTKYDENDKLIREVKVITLKSKLVSDFRKDFQFYKVREINNYHHAHDAYLNAVVGTALIKKYPKLESEFVYGDYKVYDVRKMIAKSEQEIGKATAKYFFYSNIMNFFKTEITLANGEIRKRPLIETNGETGEIVWDKGRDFATVRKVLSMPQVNIVKKTEVQTGGFSKESILPKRNSDKLIARKKDWDPKKYGGFDSPTVAYSVLVVAKVEKGKSKKLKSVKELLGITIMERSSFEKNPIDFLEAKGYKEVKKDLIIKLPKYSLFELENGRKRMLASAGELQKGNELALPSKYVNFLYLASHYEKLKGSPEDNEQKQLFVEQHKHYLDEIIEQISEFSKRVILADANLDKVLSAYNKHRDKPIREQAENIIHLFTLTNLGAPAAFKYFDTTIDRKRYTSTKEVLDATLIHQSITGLYETRIDLSQLGGDGGGGGGSSGGSGGLDDEYRLYSPLVKPDQNIQFWLEQFPQAWAETAGMGLAKQVPPQVIQLKASATPVSVRQYPLSKEAQEGIRPHVQRLIQQGILVPVQSPWNTPLLPVRKPGTNDYRPVQDLREVNKRVQDIHPTVPNPYNLLCALPPQRSWYTVLDLKDAFFCLRLHPTSQPLFAFEWRDPGTGRTGQLTWTRLPQGFKNSPTIFNEALHRDLANFRIQHPQVTLLQYVDDLLLAGATKQDCLEGTKALLLELSDLGYRASAKKAQICRREVTYLGYSLRDGQRWLTEARKKTVVQIPAPTTAKQVREFLGKAGFCRLFIPGFATLAAPLYPLTKPKGEFSWAPEHQKAFDAIKKALLSAPALALPDVTKPFTLYVDERKGVARGVLTQTLGPWRRPVAYLSKKLDPVASGWPVCLKAIAAVAILVKDADKLTLGQNITVIAPHALENIVRQPPDRWMTNARMTHYQSLLLTERVTFAPPAALNPATLLPEETDEPVTHDCHQLLIEETGVRKDLTDIPLTGEVLTWFTDGSSYVVEGKRMAGAAVVDGTRTIWASSLPEGTSAQKAELMALTQALRLAEGKSINIYTDSRYAFATAHVHGAIYKQRGWLTSAGREIKNKEEILSLLEALHLPKRLAIIHCPGHQKAKDPISRGNQMADRVAKQAAQGVNLLPAGKRTADGSEFEKRTADGSEFESPKKKAKVE

SEQ ID NO: 96 - protein, 2104 aa, synthetic construct
MPAAKRVKLDGGDKKYSIGLDIGTNSVGWAVITDEYKVPSKKFKVLGNTDRHSIKKNLIGALLFDSGETAEATRLKRTARRRYTRRKNRICYLQEIFSNEMAKVDDSFFHRLEESFLVEEDKKHERHPIFGNIVDEVAYHEKYPTIYHLRKKLVDSTDKADLRLIYLALAHMIKFRGHFLIEGDLNPDNSDVDKLFIQLVQTYNQLFEENPINASGVDAKAILSARLSKSRRLENLIAQLPGEKKNGLFGNLIALSLGLTPNFKSNFDLAEDAKLQLSKDTYDDDLDNLLAQIGDQYADLFLAAKNLSDAILLSDILRVNTEITKAPLSASMIKRYDEHHQDLTLLKALVRQQLPEKYKEIFFDQSKNGYAGYIDGGASQEEFYKFIKPILEKMDGTEELLVKLNREDLLRKQRTFDNGSIPHQIHLGELHAILRRQEDFYPFLKDNREKIEKILTFRIPYYVGPLARGNSRFAWMTRKSEETITPWNFEEVVDKGASAQSFIERMTNFDKNLPNEKVLPKHSLLYEYFTVYNELTKVKYVTEGMRKPAFLSGEQKKAIVDLLFKTNRKVTVKQLKEDYFKKIECFDSVEISGVEDRFNASLGTYHDLLKIIKDKDFLDNEENEDILEDIVLTLTLFEDREMIEERLKTYAHLFDDKVMKQLKRRRYTGWGRLSRKLINGIRDKQSGKTILDFLKSDGFANRNFMQLIHDDSLTFKEDIQKAQVSGQGDSLHEHIANLAGSPAIKKGILQTVKVVDELVKVMGRHKPENIVIEMARENQTTQKGQKNSRERMKRIEEGIKELGSQILKEHPVENTQLQNEKLYLYYLQNGRDMYVDQELDINRLSDYDVDHIVPQSFLKDDSIDNKVLTRSDKARGKSDNVPSEEVVKKMKNYWRQLLNAKLITQRKFDNLTKAERGGLSELDKAGFIKRQLVETRQITKHVAQILDSRMNTKYDENDKLIREVKVITLKSKLVSDFRKDFQFYKVREINNYHHAHDAYLNAVVGTALIKKYPKLESEFVYGDYKVYDVRKMIAKSEQEIGKATAKYFFYSNIMNFFKTEITLANGEIRKRPLIETNGETGEIVWDKGRDFATVRKVLSMPQVNIVKKTEVQTGGFSKESILPKRNSDKLIARKKDWDPKKYGGFDSPTVAYSVLVVAKVEKGKSKKLKSVKELLGITIMERSSFEKNPIDFLEAKGYKEVKKDLIIKLPKYSLFELENGRKRMLASAGELQKGNELALPSKYVNFLYLASHYEKLKGSPEDNEQKQLFVEQHKHYLDEIIEQISEFSKRVILADANLDKVLSAYNKHRDKPIREQAENIIHLFTLTNLGAPAAFKYFDTTIDRKRYTSTKEVLDATLIHQSITGLYETRIDLSQLGGDGGEAAAKEAAAKEAAAKEAAAKEAAAKGGTLQLDDEYRLYSPLVKPDQNIQFWLEQFPQAWAETAGMGLAKQVPPQVIQLKASATPVSVRQYPLSKEAQEGIRPHVQRLIQQGILVPVQSPWNTPLLPVRKPGTNDYRPVQDLREVNKRVQDIHPTVPNPYNLLCALPPQRSWYTVLDLKDAFFCLRLHPTSQPLFAFEWRDPGTGRTGQLTWTRLPQGFKNSPTIFDEALHRDLANFRIQHPQVTLLQYVDDLLLAGATKQDCLEGTKALLLELSDLGYRASAKKAQICRREVTYLGYSLRDGQRWLTEARKKTVVQIPAPTTAKQVREFLGTAGFCRLWIPGFATLAAPLYPLTKEKGEFSWAPEHQKAFDAIKKALLSAPALALPDVTKPFTLYVDERKGVARGVLTQTLGPWRRPVAYLSKKLDPVASGWPVCLKAIAAVAILVKDADKLTLGQNITVIAPHALENIVRQPPDRWMTNARMTHYQSLLLTERVTFAPPAALNPATLLPEETDEPVTHDCHQLLIEETGVRKDLTDIPLTGEVLTWFTDGSSYVVEGKRMAGAAVVDGTRTIWASSLPEGTSAQKAELMALTQALRLAEGKSINIYTDSRYAFATAHVHGAIYKQRGLLTSAGREIKNKEEILSLLEALHLPKRLAIIHCPGHQKAKDPISRGNQMADRVAKQAAQGVNLLAGKRTADGSEFEKRTADGSEFESPKKKAKVE

SEQ ID NO: 97 - protein, 2094 aa, synthetic construct
MPAAKRVKLDGGDKKYSIGLDIGTNSVGWAVITDEYKVPSKKFKVLGNTDRHSIKKNLIGALLFDSGETAEATRLKRTARRRYTRRKNRICYLQEIFSNEMAKVDDSFFHRLEESFLVEEDKKHERHPIFGNIVDEVAYHEKYPTIYHLRKKLVDSTDKADLRLIYLALAHMIKFRGHFLIEGDLNPDNSDVDKLFIQLVQTYNQLFEENPINASGVDAKAILSARLSKSRRLENLIAQLPGEKKNGLFGNLIALSLGLTPNFKSNFDLAEDAKLQLSKDTYDDDLDNLLAQIGDQYADLFLAAKNLSDAILLSDILRVNTEITKAPLSASMIKRYDEHHQDLTLLKALVRQQLPEKYKEIFFDQSKNGYAGYIDGGASQEEFYKFIKPILEKMDGTEELLVKLNREDLLRKQRTFDNGSIPHQIHLGELHAILRRQEDFYPFLKDNREKIEKILTFRIPYYVGPLARGNSRFAWMTRKSEETITPWNFEEVVDKGASAQSFIERMTNFDKNLPNEKVLPKHSLLYEYFTVYNELTKVKYVTEGMRKPAFLSGEQKKAIVDLLFKTNRKVTVKQLKEDYFKKIECFDSVEISGVEDRFNASLGTYHDLLKIIKDKDFLDNEENEDILEDIVLTLTLFEDREMIEERLKTYAHLFDDKVMKQLKRRRYTGWGRLSRKLINGIRDKQSGKTILDFLKSDGFANRNFMQLIHDDSLTFKEDIQKAQVSGQGDSLHEHIANLAGSPAIKKGILQTVKVVDELVKVMGRHKPENIVIEMARENQTTQKGQKNSRERMKRIEEGIKELGSQILKEHPVENTQLQNEKLYLYYLQNGRDMYVDQELDINRLSDYDVDHIVPQSFLKDDSIDNKVLTRSDKARGKSDNVPSEEVVKKMKNYWRQLLNAKLITQRKFDNLTKAERGGLSELDKAGFIKRQLVETRQITKHVAQILDSRMNTKYDENDKLIREVKVITLKSKLVSDFRKDFQFYKVREINNYHHAHDAYLNAVVGTALIKKYPKLESEFVYGDYKVYDVRKMIAKSEQEIGKATAKYFFYSNIMNFFKTEITLANGEIRKRPLIETNGETGEIVWDKGRDFATVRKVLSMPQVNIVKKTEVQTGGFSKESILPKRNSDKLIARKKDWDPKKYGGFDSPTVAYSVLVVAKVEKGKSKKLKSVKELLGITIMERSSFEKNPIDFLEAKGYKEVKKDLIIKLPKYSLFELENGRKRMLASAGELQKGNELALPSKYVNFLYLASHYEKLKGSPEDNEQKQLFVEQHKHYLDEIIEQISEFSKRVILADANLDKVLSAYNKHRDKPIREQAENIIHLFTLTNLGAPAAFKYFDTTIDRKRYTSTKEVLDATLIHQSITGLYETRIDLSQLGGDGGEAAAKGGGGSEAAAKGGTLQLDDEYRLYSPLVKPDQNIQFWLEQFPQAWAETAGMGLAKQVPPQVIQLKASATPVSVRQYPLSKEAQEGIRPHVQRLIQQGILVPVQSPWNTPLLPVRKPGTNDYRPVQDLREVNKRVQDIHPTVPNPYNLLCALPPQRSWYTVLDLKDAFFCLRLHPTSQPLFAFEWRDPGTGRTGQLTWTRLPQGFKNSPTIFDEALHRDLANFRIQHPQVTLLQYVDDLLLAGATKQDCLEGTKALLLELSDLGYRASAKKAQICRREVTYLGYSLRDGQRWLTEARKKTVVQIPAPTTAKQVREFLGTAGFCRLWIPGFATLAAPLYPLTKEKGEFSWAPEHQKAFDAIKKALLSAPALALPDVTKPFTLYVDERKGVARGVLTQTLGPWRRPVAYLSKKLDPVASGWPVCLKAIAAVAILVKDADKLTLGQNITVIAPHALENIVRQPPDRWMTNARMTHYQSLLLTERVTFAPPAALNPATLLPEETDEPVTHDCHQLLIEETGVRKDLTDIPLTGEVLTWFTDGSSYVVEGKRMAGAAVVDGTRTIWASSLPEGTSAQKAELMALTQALRLAEGKSINIYTDSRYAFATAHVHGAIYKQRGLLTSAGREIKNKEEILSLLEALHLPKRLAIIHCPGHQKAKDPISRGNQMADRVAKQAAQGVNLLAGKRTADGSEFEKRTADGSEFESPKKKAKVE

SEQ ID NO: 98 - protein, 2125 aa, synthetic construct
MPAAKRVKLDGGDKKYSIGLDIGTNSVGWAVITDEYKVPSKKFKVLGNTDRHSIKKNLIGALLFDSGETAEATRLKRTARRRYTRRKNRICYLQEIFSNEMAKVDDSFFHRLEESFLVEEDKKHERHPIFGNIVDEVAYHEKYPTIYHLRKKLVDSTDKADLRLIYLALAHMIKFRGHFLIEGDLNPDNSDVDKLFIQLVQTYNQLFEENPINASGVDAKAILSARLSKSRRLENLIAQLPGEKKNGLFGNLIALSLGLTPNFKSNFDLAEDAKLQLSKDTYDDDLDNLLAQIGDQYADLFLAAKNLSDAILLSDILRVNTEITKAPLSASMIKRYDEHHQDLTLLKALVRQQLPEKYKEIFFDQSKNGYAGYIDGGASQEEFYKFIKPILEKMDGTEELLVKLNREDLLRKQRTFDNGSIPHQIHLGELHAILRRQEDFYPFLKDNREKIEKILTFRIPYYVGPLARGNSRFAWMTRKSEETITPWNFEEVVDKGASAQSFIERMTNFDKNLPNEKVLPKHSLLYEYFTVYNELTKVKYVTEGMRKPAFLSGEQKKAIVDLLFKTNRKVTVKQLKEDYFKKIECFDSVEISGVEDRFNASLGTYHDLLKIIKDKDFLDNEENEDILEDIVLTLTLFEDREMIEERLKTYAHLFDDKVMKQLKRRRYTGWGRLSRKLINGIRDKQSGKTILDFLKSDGFANRNFMQLIHDDSLTFKEDIQKAQVSGQGDSLHEHIANLAGSPAIKKGILQTVKVVDELVKVMGRHKPENIVIEMARENQTTQKGQKNSRERMKRIEEGIKELGSQILKEHPVENTQLQNEKLYLYYLQNGRDMYVDQELDINRLSDYDVDHIVPQSFLKDDSIDNKVLTRSDKARGKSDNVPSEEVVKKMKNYWRQLLNAKLITQRKFDNLTKAERGGLSELDKAGFIKRQLVETRQITKHVAQILDSRMNTKYDENDKLIREVKVITLKSKLVSDFRKDFQFYKVREINNYHHAHDAYLNAVVGTALIKKYPKLESEFVYGDYKVYDVRKMIAKSEQEIGKATAKYFFYSNIMNFFKTEITLANGEIRKRPLIETNGETGEIVWDKGRDFATVRKVLSMPQVNIVKKTEVQTGGFSKESILPKRNSDKLIARKKDWDPKKYGGFDSPTVAYSVLVVAKVEKGKSKKLKSVKELLGITIMERSSFEKNPIDFLEAKGYKEVKKDLIIKLPKYSLFELENGRKRMLASAGELQKGNELALPSKYVNFLYLASHYEKLKGSPEDNEQKQLFVEQHKHYLDEIIEQISEFSKRVILADANLDKVLSAYNKHRDKPIREQAENIIHLFTLTNLGAPAAFKYFDTTIDRKRYTSTKEVLDATLIHQSITGLYETRIDLSQLGGDGGAEAAAKEAAAKEAAAKEAAAKALEAEAAAKEAAAKEAAAKEAAAKAGGTLQLDDEYRLYSPLVKPDQNIQFWLEQFPQAWAETAGMGLAKQVPPQVIQLKASATPVSVRQYPLSKEAQEGIRPHVQRLIQQGILVPVQSPWNTPLLPVRKPGTNDYRPVQDLREVNKRVQDIHPTVPNPYNLLCALPPQRSWYTVLDLKDAFFCLRLHPTSQPLFAFEWRDPGTGRTGQLTWTRLPQGFKNSPTIFDEALHRDLANFRIQHPQVTLLQYVDDLLLAGATKQDCLEGTKALLLELSDLGYRASAKKAQICRREVTYLGYSLRDGQRWLTEARKKTVVQIPAPTTAKQVREFLGTAGFCRLWIPGFATLAAPLYPLTKEKGEFSWAPEHQKAFDAIKKALLSAPALALPDVTKPFTLYVDERKGVARGVLTQTLGPWRRPVAYLSKKLDPVASGWPVCLKAIAAVAILVKDADKLTLGQNITVIAPHALENIVRQPPDRWMTNARMTHYQSLLLTERVTFAPPAALNPATLLPEETDEPVTHDCHQLLIEETGVRKDLTDIPLTGEVLTWFTDGSSYVVEGKRMAGAAVVDGTRTIWASSLPEGTSAQKAELMALTQALRLAEGKSINIYTDSRYAFATAHVHGAIYKQRGLLTSAGREIKNKEEILSLLEALHLPKRLAIIHCPGHQKAKDPISRGNQMADRVAKQAAQGVNLLAGKRTADGSEFEKRTADGSEFESPKKKAKVE

SEQ ID NO: 99 - protein, 2094 aa, synthetic construct
MPAAKRVKLDGGDKKYSIGLDIGTNSVGWAVITDEYKVPSKKFKVLGNTDRHSIKKNLIGALLFDSGETAEATRLKRTARRRYTRRKNRICYLQEIFSNEMAKVDDSFFHRLEESFLVEEDKKHERHPIFGNIVDEVAYHEKYPTIYHLRKKLVDSTDKADLRLIYLALAHMIKFRGHFLIEGDLNPDNSDVDKLFIQLVQTYNQLFEENPINASGVDAKAILSARLSKSRRLENLIAQLPGEKKNGLFGNLIALSLGLTPNFKSNFDLAEDAKLQLSKDTYDDDLDNLLAQIGDQYADLFLAAKNLSDAILLSDILRVNTEITKAPLSASMIKRYDEHHQDLTLLKALVRQQLPEKYKEIFFDQSKNGYAGYIDGGASQEEFYKFIKPILEKMDGTEELLVKLNREDLLRKQRTFDNGSIPHQIHLGELHAILRRQEDFYPFLKDNREKIEKILTFRIPYYVGPLARGNSRFAWMTRKSEETITPWNFEEVVDKGASAQSFIERMTNFDKNLPNEKVLPKHSLLYEYFTVYNELTKVKYVTEGMRKPAFLSGEQKKAIVDLLFKTNRKVTVKQLKEDYFKKIECFDSVEISGVEDRFNASLGTYHDLLKIIKDKDFLDNEENEDILEDIVLTLTLFEDREMIEERLKTYAHLFDDKVMKQLKRRRYTGWGRLSRKLINGIRDKQSGKTILDFLKSDGFANRNFMQLIHDDSLTFKEDIQKAQVSGQGDSLHEHIANLAGSPAIKKGILQTVKVVDELVKVMGRHKPENIVIEMARENQTTQKGQKNSRERMKRIEEGIKELGSQILKEHPVENTQLQNEKLYLYYLQNGRDMYVDQELDINRLSDYDVDHIVPQSFLKDDSIDNKVLTRSDKARGKSDNVPSEEVVKKMKNYWRQLLNAKLITQRKFDNLTKAERGGLSELDKAGFIKRQLVETRQITKHVAQILDSRMNTKYDENDKLIREVKVITLKSKLVSDFRKDFQFYKVREINNYHHAHDAYLNAVVGTALIKKYPKLESEFVYGDYKVYDVRKMIAKSEQEIGKATAKYFFYSNIMNFFKTEITLANGEIRKRPLIETNGETGEIVWDKGRDFATVRKVLSMPQVNIVKKTEVQTGGFSKESILPKRNSDKLIARKKDWDPKKYGGFDSPTVAYSVLVVAKVEKGKSKKLKSVKELLGITIMERSSFEKNPIDFLEAKGYKEVKKDLIIKLPKYSLFELENGRKRMLASAGELQKGNELALPSKYVNFLYLASHYEKLKGSPEDNEQKQLFVEQHKHYLDEIIEQISEFSKRVILADANLDKVLSAYNKHRDKPIREQAENIIHLFTLTNLGAPAAFKYFDTTIDRKRYTSTKEVLDATLIHQSITGLYETRIDLSQLGGDGGGSSGSSGSSGSSGSSGGTLQLDDEYRLYSPLVKPDQNIQFWLEQFPQAWAETAGMGLAKQVPPQVIQLKASATPVSVRQYPLSKEAQEGIRPHVQRLIQQGILVPVQSPWNTPLLPVRKPGTNDYRPVQDLREVNKRVQDIHPTVPNPYNLLCALPPQRSWYTVLDLKDAFFCLRLHPTSQPLFAFEWRDPGTGRTGQLTWTRLPQGFKNSPTIFDEALHRDLANFRIQHPQVTLLQYVDDLLLAGATKQDCLEGTKALLLELSDLGYRASAKKAQICRREVTYLGYSLRDGQRWLTEARKKTVVQIPAPTTAKQVREFLGTAGFCRLWIPGFATLAAPLYPLTKEKGEFSWAPEHQKAFDAIKKALLSAPALALPDVTKPFTLYVDERKGVARGVLTQTLGPWRRPVAYLSKKLDPVASGWPVCLKAIAAVAILVKDADKLTLGQNITVIAPHALENIVRQPPDRWMTNARMTHYQSLLLTERVTFAPPAALNPATLLPEETDEPVTHDCHQLLIEETGVRKDLTDIPLTGEVLTWFTDGSSYVVEGKRMAGAAVVDGTRTIWASSLPEGTSAQKAELMALTQALRLAEGKSINIYTDSRYAFATAHVHGAIYKQRGLLTSAGREIKNKEEILSLLEALHLPKRLAIIHCPGHQKAKDPISRGNQMADRVAKQAAQGVNLLAGKRTADGSEFEKRTADGSEFESPKKKAKVE

SEQ ID NO: 100 - protein, 2085 aa, synthetic construct
MPAAKRVKLDGGDKKYSIGLDIGTNSVGWAVITDEYKVPSKKFKVLGNTDRHSIKKNLIGALLFDSGETAEATRLKRTARRRYTRRKNRICYLQEIFSNEMAKVDDSFFHRLEESFLVEEDKKHERHPIFGNIVDEVAYHEKYPTIYHLRKKLVDSTDKADLRLIYLALAHMIKFRGHFLIEGDLNPDNSDVDKLFIQLVQTYNQLFEENPINASGVDAKAILSARLSKSRRLENLIAQLPGEKKNGLFGNLIALSLGLTPNFKSNFDLAEDAKLQLSKDTYDDDLDNLLAQIGDQYADLFLAAKNLSDAILLSDILRVNTEITKAPLSASMIKRYDEHHQDLTLLKALVRQQLPEKYKEIFFDQSKNGYAGYIDGGASQEEFYKFIKPILEKMDGTEELLVKLNREDLLRKQRTFDNGSIPHQIHLGELHAILRRQEDFYPFLKDNREKIEKILTFRIPYYVGPLARGNSRFAWMTRKSEETITPWNFEEVVDKGASAQSFIERMTNFDKNLPNEKVLPKHSLLYEYFTVYNELTKVKYVTEGMRKPAFLSGEQKKAIVDLLFKTNRKVTVKQLKEDYFKKIECFDSVEISGVEDRFNASLGTYHDLLKIIKDKDFLDNEENEDILEDIVLTLTLFEDREMIEERLKTYAHLFDDKVMKQLKRRRYTGWGRLSRKLINGIRDKQSGKTILDFLKSDGFANRNFMQLIHDDSLTFKEDIQKAQVSGQGDSLHEHIANLAGSPAIKKGILQTVKVVDELVKVMGRHKPENIVIEMARENQTTQKGQKNSRERMKRIEEGIKELGSQILKEHPVENTQLQNEKLYLYYLQNGRDMYVDQELDINRLSDYDVDHIVPQSFLKDDSIDNKVLTRSDKARGKSDNVPSEEVVKKMKNYWRQLLNAKLITQRKFDNLTKAERGGLSELDKAGFIKRQLVETRQITKHVAQILDSRMNTKYDENDKLIREVKVITLKSKLVSDFRKDFQFYKVREINNYHHAHDAYLNAVVGTALIKKYPKLESEFVYGDYKVYDVRKMIAKSEQEIGKATAKYFFYSNIMNFFKTEITLANGEIRKRPLIETNGETGEIVWDKGRDFATVRKVLSMPQVNIVKKTEVQTGGFSKESILPKRNSDKLIARKKDWDPKKYGGFDSPTVAYSVLVVAKVEKGKSKKLKSVKELLGITIMERSSFEKNPIDFLEAKGYKEVKKDLIIKLPKYSLFELENGRKRMLASAGELQKGNELALPSKYVNFLYLASHYEKLKGSPEDNEQKQLFVEQHKHYLDEIIEQISEFSKRVILADANLDKVLSAYNKHRDKPIREQAENIIHLFTLTNLGAPAAFKYFDTTIDRKRYTSTKEVLDATLIHQSITGLYETRIDLSQLGGDGGGGGGSSGGTLQLDDEYRLYSPLVKPDQNIQFWLEQFPQAWAETAGMGLAKQVPPQVIQLKASATPVSVRQYPLSKEAQEGIRPHVQRLIQQGILVPVQSPWNTPLLPVRKPGTNDYRPVQDLREVNKRVQDIHPTVPNPYNLLCALPPQRSWYTVLDLKDAFFCLRLHPTSQPLFAFEWRDPGTGRTGQLTWTRLPQGFKNSPTIFDEALHRDLANFRIQHPQVTLLQYVDDLLLAGATKQDCLEGTKALLLELSDLGYRASAKKAQICRREVTYLGYSLRDGQRWLTEARKKTVVQIPAPTTAKQVREFLGTAGFCRLWIPGFATLAAPLYPLTKEKGEFSWAPEHQKAFDAIKKALLSAPALALPDVTKPFTLYVDERKGVARGVLTQTLGPWRRPVAYLSKKLDPVASGWPVCLKAIAAVAILVKDADKLTLGQNITVIAPHALENIVRQPPDRWMTNARMTHYQSLLLTERVTFAPPAALNPATLLPEETDEPVTHDCHQLLIEETGVRKDLTDIPLTGEVLTWFTDGSSYVVEGKRMAGAAVVDGTRTIWASSLPEGTSAQKAELMALTQALRLAEGKSINIYTDSRYAFATAHVHGAIYKQRGLLTSAGREIKNKEEILSLLEALHLPKRLAIIHCPGHQKAKDPISRGNQMADRVAKQAAQGVNLLAGKRTADGSEFEKRTADGSEFESPKKKAKVE

SEQ ID NO: 101 - protein, 2088 aa, synthetic construct
MPAAKRVKLDGGDKKYSIGLDIGTNSVGWAVITDEYKVPSKKFKVLGNTDRHSIKKNLIGALLFDSGETAEATRLKRTARRRYTRRKNRICYLQEIFSNEMAKVDDSFFHRLEESFLVEEDKKHERHPIFGNIVDEVAYHEKYPTIYHLRKKLVDSTDKADLRLIYLALAHMIKFRGHFLIEGDLNPDNSDVDKLFIQLVQTYNQLFEENPINASGVDAKAILSARLSKSRRLENLIAQLPGEKKNGLFGNLIALSLGLTPNFKSNFDLAEDAKLQLSKDTYDDDLDNLLAQIGDQYADLFLAAKNLSDAILLSDILRVNTEITKAPLSASMIKRYDEHHQDLTLLKALVRQQLPEKYKEIFFDQSKNGYAGYIDGGASQEEFYKFIKPILEKMDGTEELLVKLNREDLLRKQRTFDNGSIPHQIHLGELHAILRRQEDFYPFLKDNREKIEKILTFRIPYYVGPLARGNSRFAWMTRKSEETITPWNFEEVVDKGASAQSFIERMTNFDKNLPNEKVLPKHSLLYEYFTVYNELTKVKYVTEGMRKPAFLSGEQKKAIVDLLFKTNRKVTVKQLKEDYFKKIECFDSVEISGVEDRFNASLGTYHDLLKIIKDKDFLDNEENEDILEDIVLTLTLFEDREMIEERLKTYAHLFDDKVMKQLKRRRYTGWGRLSRKLINGIRDKQSGKTILDFLKSDGFANRNFMQLIHDDSLTFKEDIQKAQVSGQGDSLHEHIANLAGSPAIKKGILQTVKVVDELVKVMGRHKPENIVIEMARENQTTQKGQKNSRERMKRIEEGIKELGSQILKEHPVENTQLQNEKLYLYYLQNGRDMYVDQELDINRLSDYDVDHIVPQSFLKDDSIDNKVLTRSDKARGKSDNVPSEEVVKKMKNYWRQLLNAKLITQRKFDNLTKAERGGLSELDKAGFIKRQLVETRQITKHVAQILDSRMNTKYDENDKLIREVKVITLKSKLVSDFRKDFQFYKVREINNYHHAHDAYLNAVVGTALIKKYPKLESEFVYGDYKVYDVRKMIAKSEQEIGKATAKYFFYSNIMNFFKTEITLANGEIRKRPLIETNGETGEIVWDKGRDFATVRKVLSMPQVNIVKKTEVQTGGFSKESILPKRNSDKLIARKKDWDPKKYGGFDSPTVAYSVLVVAKVEKGKSKKLKSVKELLGITIMERSSFEKNPIDFLEAKGYKEVKKDLIIKLPKYSLFELENGRKRMLASAGELQKGNELALPSKYVNFLYLASHYEKLKGSPEDNEQKQLFVEQHKHYLDEIIEQISEFSKRVILADANLDKVLSAYNKHRDKPIREQAENIIHLFTLTNLGAPAAFKYFDTTIDRKRYTSTKEVLDATLIHQSITGLYETRIDLSQLGGDGGGSSGGSPAPGGTLQLDDEYRLYSPLVKPDQNIQFWLEQFPQAWAETAGMGLAKQVPPQVIQLKASATPVSVRQYPLSKEAQEGIRPHVQRLIQQGILVPVQSPWNTPLLPVRKPGTNDYRPVQDLREVNKRVQDIHPTVPNPYNLLCALPPQRSWYTVLDLKDAFFCLRLHPTSQPLFAFEWRDPGTGRTGQLTWTRLPQGFKNSPTIFDEALHRDLANFRIQHPQVTLLQYVDDLLLAGATKQDCLEGTKALLLELSDLGYRASAKKAQICRREVTYLGYSLRDGQRWLTEARKKTVVQIPAPTTAKQVREFLGTAGFCRLWIPGFATLAAPLYPLTKEKGEFSWAPEHQKAFDAIKKALLSAPALALPDVTKPFTLYVDERKGVARGVLTQTLGPWRRPVAYLSKKLDPVASGWPVCLKAIAAVAILVKDADKLTLGQNITVIAPHALENIVRQPPDRWMTNARMTHYQSLLLTERVTFAPPAALNPATLLPEETDEPVTHDCHQLLIEETGVRKDLTDIPLTGEVLTWFTDGSSYVVEGKRMAGAAVVDGTRTIWASSLPEGTSAQKAELMALTQALRLAEGKSINIYTDSRYAFATAHVHGAIYKQRGLLTSAGREIKNKEEILSLLEALHLPKRLAIIHCPGHQKAKDPISRGNQMADRVAKQAAQGVNLLAGKRTADGSEFEKRTADGSEFESPKKKAKVE

SEQ ID NO: 102 - protein, 2089 aa, synthetic construct
MPAAKRVKLDGGDKKYSIGLDIGTNSVGWAVITDEYKVPSKKFKVLGNTDRHSIKKNLIGALLFDSGETAEATRLKRTARRRYTRRKNRICYLQEIFSNEMAKVDDSFFHRLEESFLVEEDKKHERHPIFGNIVDEVAYHEKYPTIYHLRKKLVDSTDKADLRLIYLALAHMIKFRGHFLIEGDLNPDNSDVDKLFIQLVQTYNQLFEENPINASGVDAKAILSARLSKSRRLENLIAQLPGEKKNGLFGNLIALSLGLTPNFKSNFDLAEDAKLQLSKDTYDDDLDNLLAQIGDQYADLFLAAKNLSDAILLSDILRVNTEITKAPLSASMIKRYDEHHQDLTLLKALVRQQLPEKYKEIFFDQSKNGYAGYIDGGASQEEFYKFIKPILEKMDGTEELLVKLNREDLLRKQRTFDNGSIPHQIHLGELHAILRRQEDFYPFLKDNREKIEKILTFRIPYYVGPLARGNSRFAWMTRKSEETITPWNFEEVVDKGASAQSFIERMTNFDKNLPNEKVLPKHSLLYEYFTVYNELTKVKYVTEGMRKPAFLSGEQKKAIVDLLFKTNRKVTVKQLKEDYFKKIECFDSVEISGVEDRFNASLGTYHDLLKIIKDKDFLDNEENEDILEDIVLTLTLFEDREMIEERLKTYAHLFDDKVMKQLKRRRYTGWGRLSRKLINGIRDKQSGKTILDFLKSDGFANRNFMQLIHDDSLTFKEDIQKAQVSGQGDSLHEHIANLAGSPAIKKGILQTVKVVDELVKVMGRHKPENIVIEMARENQTTQKGQKNSRERMKRIEEGIKELGSQILKEHPVENTQLQNEKLYLYYLQNGRDMYVDQELDINRLSDYDVDHIVPQSFLKDDSIDNKVLTRSDKARGKSDNVPSEEVVKKMKNYWRQLLNAKLITQRKFDNLTKAERGGLSELDKAGFIKRQLVETRQITKHVAQILDSRMNTKYDENDKLIREVKVITLKSKLVSDFRKDFQFYKVREINNYHHAHDAYLNAVVGTALIKKYPKLESEFVYGDYKVYDVRKMIAKSEQEIGKATAKYFFYSNIMNFFKTEITLANGEIRKRPLIETNGETGEIVWDKGRDFATVRKVLSMPQVNIVKKTEVQTGGFSKESILPKRNSDKLIARKKDWDPKKYGGFDSPTVAYSVLVVAKVEKGKSKKLKSVKELLGITIMERSSFEKNPIDFLEAKGYKEVKKDLIIKLPKYSLFELENGRKRMLASAGELQKGNELALPSKYVNFLYLASHYEKLKGSPEDNEQKQLFVEQHKHYLDEIIEQISEFSKRVILADANLDKVLSAYNKHRDKPIREQAENIIHLFTLTNLGAPAAFKYFDTTIDRKRYTSTKEVLDATLIHQSITGLYETRIDLSQLGGDGGGGGGSGGGGSGGTLQLDDEYRLYSPLVKPDQNIQFWLEQFPQAWAETAGMGLAKQVPPQVIQLKASATPVSVRQYPLSKEAQEGIRPHVQRLIQQGILVPVQSPWNTPLLPVRKPGTNDYRPVQDLREVNKRVQDIHPTVPNPYNLLCALPPQRSWYTVLDLKDAFFCLRLHPTSQPLFAFEWRDPGTGRTGQLTWTRLPQGFKNSPTIFDEALHRDLANFRIQHPQVTLLQYVDDLLLAGATKQDCLEGTKALLLELSDLGYRASAKKAQICRREVTYLGYSLRDGQRWLTEARKKTVVQIPAPTTAKQVREFLGTAGFCRLWIPGFATLAAPLYPLTKEKGEFSWAPEHQKAFDAIKKALLSAPALALPDVTKPFTLYVDERKGVARGVLTQTLGPWRRPVAYLSKKLDPVASGWPVCLKAIAAVAILVKDADKLTLGQNITVIAPHALENIVRQPPDRWMTNARMTHYQSLLLTERVTFAPPAALNPATLLPEETDEPVTHDCHQLLIEETGVRKDLTDIPLTGEVLTWFTDGSSYVVEGKRMAGAAVVDGTRTIWASSLPEGTSAQKAELMALTQALRLAEGKSINIYTDSRYAFATAHVHGAIYKQRGLLTSAGREIKNKEEILSLLEALHLPKRLAIIHCPGHQKAKDPISRGNQMADRVAKQAAQGVNLLAGKRTADGSEFEKRTADGSEFESPKKKAKVE

SEQ ID NO: 103 - protein, 2091 aa, synthetic construct
MPAAKRVKLDGGDKKYSIGLDIGTNSVGWAVITDEYKVPSKKFKVLGNTDRHSIKKNLIGALLFDSGETAEATRLKRTARRRYTRRKNRICYLQEIFSNEMAKVDDSFFHRLEESFLVEEDKKHERHPIFGNIVDEVAYHEKYPTIYHLRKKLVDSTDKADLRLIYLALAHMIKFRGHFLIEGDLNPDNSDVDKLFIQLVQTYNQLFEENPINASGVDAKAILSARLSKSRRLENLIAQLPGEKKNGLFGNLIALSLGLTPNFKSNFDLAEDAKLQLSKDTYDDDLDNLLAQIGDQYADLFLAAKNLSDAILLSDILRVNTEITKAPLSASMIKRYDEHHQDLTLLKALVRQQLPEKYKEIFFDQSKNGYAGYIDGGASQEEFYKFIKPILEKMDGTEELLVKLNREDLLRKQRTFDNGSIPHQIHLGELHAILRRQEDFYPFLKDNREKIEKILTFRIPYYVGPLARGNSRFAWMTRKSEETITPWNFEEVVDKGASAQSFIERMTNFDKNLPNEKVLPKHSLLYEYFTVYNELTKVKYVTEGMRKPAFLSGEQKKAIVDLLFKTNRKVTVKQLKEDYFKKIECFDSVEISGVEDRFNASLGTYHDLLKIIKDKDFLDNEENEDILEDIVLTLTLFEDREMIEERLKTYAHLFDDKVMKQLKRRRYTGWGRLSRKLINGIRDKQSGKTILDFLKSDGFANRNFMQLIHDDSLTFKEDIQKAQVSGQGDSLHEHIANLAGSPAIKKGILQTVKVVDELVKVMGRHKPENIVIEMARENQTTQKGQKNSRERMKRIEEGIKELGSQILKEHPVENTQLQNEKLYLYYLQNGRDMYVDQELDINRLSDYDVDHIVPQSFLKDDSIDNKVLTRSDKARGKSDNVPSEEVVKKMKNYWRQLLNAKLITQRKFDNLTKAERGGLSELDKAGFIKRQLVETRQITKHVAQILDSRMNTKYDENDKLIREVKVITLKSKLVSDFRKDFQFYKVREINNYHHAHDAYLNAVVGTALIKKYPKLESEFVYGDYKVYDVRKMIAKSEQEIGKATAKYFFYSNIMNFFKTEITLANGEIRKRPLIETNGETGEIVWDKGRDFATVRKVLSMPQVNIVKKTEVQTGGFSKESILPKRNSDKLIARKKDWDPKKYGGFDSPTVAYSVLVVAKVEKGKSKKLKSVKELLGITIMERSSFEKNPIDFLEAKGYKEVKKDLIIKLPKYSLFELENGRKRMLASAGELQKGNELALPSKYVNFLYLASHYEKLKGSPEDNEQKQLFVEQHKHYLDEIIEQISEFSKRVILADANLDKVLSAYNKHRDKPIREQAENIIHLFTLTNLGAPAAFKYFDTTIDRKRYTSTKEVLDATLIHQSITGLYETRIDLSQLGGDGGGSSGSSGSSGSSGGTLQLDDEYRLYSPLVKPDQNIQFWLEQFPQAWAETAGMGLAKQVPPQVIQLKASATPVSVRQYPLSKEAQEGIRPHVQRLIQQGILVPVQSPWNTPLLPVRKPGTNDYRPVQDLREVNKRVQDIHPTVPNPYNLLCALPPQRSWYTVLDLKDAFFCLRLHPTSQPLFAFEWRDPGTGRTGQLTWTRLPQGFKNSPTIFDEALHRDLANFRIQHPQVTLLQYVDDLLLAGATKQDCLEGTKALLLELSDLGYRASAKKAQICRREVTYLGYSLRDGQRWLTEARKKTVVQIPAPTTAKQVREFLGTAGFCRLWIPGFATLAAPLYPLTKEKGEFSWAPEHQKAFDAIKKALLSAPALALPDVTKPFTLYVDERKGVARGVLTQTLGPWRRPVAYLSKKLDPVASGWPVCLKAIAAVAILVKDADKLTLGQNITVIAPHALENIVRQPPDRWMTNARMTHYQSLLLTERVTFAPPAALNPATLLPEETDEPVTHDCHQLLIEETGVRKDLTDIPLTGEVLTWFTDGSSYVVEGKRMAGAAVVDGTRTIWASSLPEGTSAQKAELMALTQALRLAEGKSINIYTDSRYAFATAHVHGAIYKQRGLLTSAGREIKNKEEILSLLEALHLPKRLAIIHCPGHQKAKDPISRGNQMADRVAKQAAQGVNLLAGKRTADGSEFEKRTADGSEFESPKKKAKVE

SEQ ID NO: 104 - protein, 2090 aa, synthetic construct
MPAAKRVKLDGGDKKYSIGLDIGTNSVGWAVITDEYKVPSKKFKVLGNTDRHSIKKNLIGALLFDSGETAEATRLKRTARRRYTRRKNRICYLQEIFSNEMAKVDDSFFHRLEESFLVEEDKKHERHPIFGNIVDEVAYHEKYPTIYHLRKKLVDSTDKADLRLIYLALAHMIKFRGHFLIEGDLNPDNSDVDKLFIQLVQTYNQLFEENPINASGVDAKAILSARLSKSRRLENLIAQLPGEKKNGLFGNLIALSLGLTPNFKSNFDLAEDAKLQLSKDTYDDDLDNLLAQIGDQYADLFLAAKNLSDAILLSDILRVNTEITKAPLSASMIKRYDEHHQDLTLLKALVRQQLPEKYKEIFFDQSKNGYAGYIDGGASQEEFYKFIKPILEKMDGTEELLVKLNREDLLRKQRTFDNGSIPHQIHLGELHAILRRQEDFYPFLKDNREKIEKILTFRIPYYVGPLARGNSRFAWMTRKSEETITPWNFEEVVDKGASAQSFIERMTNFDKNLPNEKVLPKHSLLYEYFTVYNELTKVKYVTEGMRKPAFLSGEQKKAIVDLLFKTNRKVTVKQLKEDYFKKIECFDSVEISGVEDRFNASLGTYHDLLKIIKDKDFLDNEENEDILEDIVLTLTLFEDREMIEERLKTYAHLFDDKVMKQLKRRRYTGWGRLSRKLINGIRDKQSGKTILDFLKSDGFANRNFMQLIHDDSLTFKEDIQKAQVSGQGDSLHEHIANLAGSPAIKKGILQTVKVVDELVKVMGRHKPENIVIEMARENQTTQKGQKNSRERMKRIEEGIKELGSQILKEHPVENTQLQNEKLYLYYLQNGRDMYVDQELDINRLSDYDVDHIVPQSFLKDDSIDNKVLTRSDKARGKSDNVPSEEVVKKMKNYWRQLLNAKLITQRKFDNLTKAERGGLSELDKAGFIKRQLVETRQITKHVAQILDSRMNTKYDENDKLIREVKVITLKSKLVSDFRKDFQFYKVREINNYHHAHDAYLNAVVGTALIKKYPKLESEFVYGDYKVYDVRKMIAKSEQEIGKATAKYFFYSNIMNFFKTEITLANGEIRKRPLIETNGETGEIVWDKGRDFATVRKVLSMPQVNIVKKTEVQTGGFSKESILPKRNSDKLIARKKDWDPKKYGGFDSPTVAYSVLVVAKVEKGKSKKLKSVKELLGITIMERSSFEKNPIDFLEAKGYKEVKKDLIIKLPKYSLFELENGRKRMLASAGELQKGNELALPSKYVNFLYLASHYEKLKGSPEDNEQKQLFVEQHKHYLDEIIEQISEFSKRVILADANLDKVLSAYNKHRDKPIREQAENIIHLFTLTNLGAPAAFKYFDTTIDRKRYTSTKEVLDATLIHQSITGLYETRIDLSQLGGDGGPAPGSSEAAAKGGTLQLDDEYRLYSPLVKPDQNIQFWLEQFPQAWAETAGMGLAKQVPPQVIQLKASATPVSVRQYPLSKEAQEGIRPHVQRLIQQGILVPVQSPWNTPLLPVRKPGTNDYRPVQDLREVNKRVQDIHPTVPNPYNLLCALPPQRSWYTVLDLKDAFFCLRLHPTSQPLFAFEWRDPGTGRTGQLTWTRLPQGFKNSPTIFDEALHRDLANFRIQHPQVTLLQYVDDLLLAGATKQDCLEGTKALLLELSDLGYRASAKKAQICRREVTYLGYSLRDGQRWLTEARKKTVVQIPAPTTAKQVREFLGTAGFCRLWIPGFATLAAPLYPLTKEKGEFSWAPEHQKAFDAIKKALLSAPALALPDVTKPFTLYVDERKGVARGVLTQTLGPWRRPVAYLSKKLDPVASGWPVCLKAIAAVAILVKDADKLTLGQNITVIAPHALENIVRQPPDRWMTNARMTHYQSLLLTERVTFAPPAALNPATLLPEETDEPVTHDCHQLLIEETGVRKDLTDIPLTGEVLTWFTDGSSYVVEGKRMAGAAVVDGTRTIWASSLPEGTSAQKAELMALTQALRLAEGKSINIYTDSRYAFATAHVHGAIYKQRGLLTSAGREIKNKEEILSLLEALHLPKRLAIIHCPGHQKAKDPISRGNQMADRVAKQAAQGVNLLAGKRTADGSEFEKRTADGSEFESPKKKAKVE

SEQ ID NO: 105 - protein, 2085 aa, synthetic construct
MPAAKRVKLDGGDKKYSIGLDIGTNSVGWAVITDEYKVPSKKFKVLGNTDRHSIKKNLIGALLFDSGETAEATRLKRTARRRYTRRKNRICYLQEIFSNEMAKVDDSFFHRLEESFLVEEDKKHERHPIFGNIVDEVAYHEKYPTIYHLRKKLVDSTDKADLRLIYLALAHMIKFRGHFLIEGDLNPDNSDVDKLFIQLVQTYNQLFEENPINASGVDAKAILSARLSKSRRLENLIAQLPGEKKNGLFGNLIALSLGLTPNFKSNFDLAEDAKLQLSKDTYDDDLDNLLAQIGDQYADLFLAAKNLSDAILLSDILRVNTEITKAPLSASMIKRYDEHHQDLTLLKALVRQQLPEKYKEIFFDQSKNGYAGYIDGGASQEEFYKFIKPILEKMDGTEELLVKLNREDLLRKQRTFDNGSIPHQIHLGELHAILRRQEDFYPFLKDNREKIEKILTFRIPYYVGPLARGNSRFAWMTRKSEETITPWNFEEVVDKGASAQSFIERMTNFDKNLPNEKVLPKHSLLYEYFTVYNELTKVKYVTEGMRKPAFLSGEQKKAIVDLLFKTNRKVTVKQLKEDYFKKIECFDSVEISGVEDRFNASLGTYHDLLKIIKDKDFLDNEENEDILEDIVLTLTLFEDREMIEERLKTYAHLFDDKVMKQLKRRRYTGWGRLSRKLINGIRDKQSGKTILDFLKSDGFANRNFMQLIHDDSLTFKEDIQKAQVSGQGDSLHEHIANLAGSPAIKKGILQTVKVVDELVKVMGRHKPENIVIEMARENQTTQKGQKNSRERMKRIEEGIKELGSQILKEHPVENTQLQNEKLYLYYLQNGRDMYVDQELDINRLSDYDVDHIVPQSFLKDDSIDNKVLTRSDKARGKSDNVPSEEVVKKMKNYWRQLLNAKLITQRKFDNLTKAERGGLSELDKAGFIKRQLVETRQITKHVAQILDSRMNTKYDENDKLIREVKVITLKSKLVSDFRKDFQFYKVREINNYHHAHDAYLNAVVGTALIKKYPKLESEFVYGDYKVYDVRKMIAKSEQEIGKATAKYFFYSNIMNFFKTEITLANGEIRKRPLIETNGETGEIVWDKGRDFATVRKVLSMPQVNIVKKTEVQTGGFSKESILPKRNSDKLIARKKDWDPKKYGGFDSPTVAYSVLVVAKVEKGKSKKLKSVKELLGITIMERSSFEKNPIDFLEAKGYKEVKKDLIIKLPKYSLFELENGRKRMLASAGELQKGNELALPSKYVNFLYLASHYEKLKGSPEDNEQKQLFVEQHKHYLDEIIEQISEFSKRVILADANLDKVLSAYNKHRDKPIREQAENIIHLFTLTNLGAPAAFKYFDTTIDRKRYTSTKEVLDATLIHQSITGLYETRIDLSQLGGDGGGGSGSSGGTLQLDDEYRLYSPLVKPDQNIQFWLEQFPQAWAETAGMGLAKQVPPQVIQLKASATPVSVRQYPLSKEAQEGIRPHVQRLIQQGILVPVQSPWNTPLLPVRKPGTNDYRPVQDLREVNKRVQDIHPTVPNPYNLLCALPPQRSWYTVLDLKDAFFCLRLHPTSQPLFAFEWRDPGTGRTGQLTWTRLPQGFKNSPTIFDEALHRDLANFRIQHPQVTLLQYVDDLLLAGATKQDCLEGTKALLLELSDLGYRASAKKAQICRREVTYLGYSLRDGQRWLTEARKKTVVQIPAPTTAKQVREFLGTAGFCRLWIPGFATLAAPLYPLTKEKGEFSWAPEHQKAFDAIKKALLSAPALALPDVTKPFTLYVDERKGVARGVLTQTLGPWRRPVAYLSKKLDPVASGWPVCLKAIAAVAILVKDADKLTLGQNITVIAPHALENIVRQPPDRWMTNARMTHYQSLLLTERVTFAPPAALNPATLLPEETDEPVTHDCHQLLIEETGVRKDLTDIPLTGEVLTWFTDGSSYVVEGKRMAGAAVVDGTRTIWASSLPEGTSAQKAELMALTQALRLAEGKSINIYTDSRYAFATAHVHGAIYKQRGLLTSAGREIKNKEEILSLLEALHLPKRLAIIHCPGHQKAKDPISRGNQMADRVAKQAAQGVNLLAGKRTADGSEFEKRTADGSEFESPKKKAKVE

SEQ ID NO: 106 - protein, 2088 aa, synthetic construct
MPAAKRVKLDGGDKKYSIGLDIGTNSVGWAVITDEYKVPSKKFKVLGNTDRHSIKKNLIGALLFDSGETAEATRLKRTARRRYTRRKNRICYLQEIFSNEMAKVDDSFFHRLEESFLVEEDKKHERHPIFGNIVDEVAYHEKYPTIYHLRKKLVDSTDKADLRLIYLALAHMIKFRGHFLIEGDLNPDNSDVDKLFIQLVQTYNQLFEENPINASGVDAKAILSARLSKSRRLENLIAQLPGEKKNGLFGNLIALSLGLTPNFKSNFDLAEDAKLQLSKDTYDDDLDNLLAQIGDQYADLFLAAKNLSDAILLSDILRVNTEITKAPLSASMIKRYDEHHQDLTLLKALVRQQLPEKYKEIFFDQSKNGYAGYIDGGASQEEFYKFIKPILEKMDGTEELLVKLNREDLLRKQRTFDNGSIPHQIHLGELHAILRRQEDFYPFLKDNREKIEKILTFRIPYYVGPLARGNSRFAWMTRKSEETITPWNFEEVVDKGASAQSFIERMTNFDKNLPNEKVLPKHSLLYEYFTVYNELTKVKYVTEGMRKPAFLSGEQKKAIVDLLFKTNRKVTVKQLKEDYFKKIECFDSVEISGVEDRFNASLGTYHDLLKIIKDKDFLDNEENEDILEDIVLTLTLFEDREMIEERLKTYAHLFDDKVMKQLKRRRYTGWGRLSRKLINGIRDKQSGKTILDFLKSDGFANRNFMQLIHDDSLTFKEDIQKAQVSGQGDSLHEHIANLAGSPAIKKGILQTVKVVDELVKVMGRHKPENIVIEMARENQTTQKGQKNSRERMKRIEEGIKELGSQILKEHPVENTQLQNEKLYLYYLQNGRDMYVDQELDINRLSDYDVDHIVPQSFLKDDSIDNKVLTRSDKARGKSDNVPSEEVVKKMKNYWRQLLNAKLITQRKFDNLTKAERGGLSELDKAGFIKRQLVETRQITKHVAQILDSRMNTKYDENDKLIREVKVITLKSKLVSDFRKDFQFYKVREINNYHHAHDAYLNAVVGTALIKKYPKLESEFVYGDYKVYDVRKMIAKSEQEIGKATAKYFFYSNIMNFFKTEITLANGEIRKRPLIETNGETGEIVWDKGRDFATVRKVLSMPQVNIVKKTEVQTGGFSKESILPKRNSDKLIARKKDWDPKKYGGFDSPTVAYSVLVVAKVEKGKSKKLKSVKELLGITIMERSSFEKNPIDFLEAKGYKEVKKDLIIKLPKYSLFELENGRKRMLASAGELQKGNELALPSKYVNFLYLASHYEKLKGSPEDNEQKQLFVEQHKHYLDEIIEQISEFSKRVILADANLDKVLSAYNKHRDKPIREQAENIIHLFTLTNLGAPAAFKYFDTTIDRKRYTSTKEVLDATLIHQSITGLYETRIDLSQLGGDGGPAPGSSGGGGGTLQLDDEYRLYSPLVKPDQNIQFWLEQFPQAWAETAGMGLAKQVPPQVIQLKASATPVSVRQYPLSKEAQEGIRPHVQRLIQQGILVPVQSPWNTPLLPVRKPGTNDYRPVQDLREVNKRVQDIHPTVPNPYNLLCALPPQRSWYTVLDLKDAFFCLRLHPTSQPLFAFEWRDPGTGRTGQLTWTRLPQGFKNSPTIFDEALHRDLANFRIQHPQVTLLQYVDDLLLAGATKQDCLEGTKALLLELSDLGYRASAKKAQICRREVTYLGYSLRDGQRWLTEARKKTVVQIPAPTTAKQVREFLGTAGFCRLWIPGFATLAAPLYPLTKEKGEFSWAPEHQKAFDAIKKALLSAPALALPDVTKPFTLYVDERKGVARGVLTQTLGPWRRPVAYLSKKLDPVASGWPVCLKAIAAVAILVKDADKLTLGQNITVIAPHALENIVRQPPDRWMTNARMTHYQSLLLTERVTFAPPAALNPATLLPEETDEPVTHDCHQLLIEETGVRKDLTDIPLTGEVLTWFTDGSSYVVEGKRMAGAAVVDGTRTIWASSLPEGTSAQKAELMALTQALRLAEGKSINIYTDSRYAFATAHVHGAIYKQRGLLTSAGREIKNKEEILSLLEALHLPKRLAIIHCPGHQKAKDPISRGNQMADRVAKQAAQGVNLLAGKRTADGSEFEKRTADGSEFESPKKKAKVE

SEQ ID NO: 107 - protein, 2088 aa, synthetic construct
MPAAKRVKLDGGDKKYSIGLDIGTNSVGWAVITDEYKVPSKKFKVLGNTDRHSIKKNLIGALLFDSGETAEATRLKRTARRRYTRRKNRICYLQEIFSNEMAKVDDSFFHRLEESFLVEEDKKHERHPIFGNIVDEVAYHEKYPTIYHLRKKLVDSTDKADLRLIYLALAHMIKFRGHFLIEGDLNPDNSDVDKLFIQLVQTYNQLFEENPINASGVDAKAILSARLSKSRRLENLIAQLPGEKKNGLFGNLIALSLGLTPNFKSNFDLAEDAKLQLSKDTYDDDLDNLLAQIGDQYADLFLAAKNLSDAILLSDILRVNTEITKAPLSASMIKRYDEHHQDLTLLKALVRQQLPEKYKEIFFDQSKNGYAGYIDGGASQEEFYKFIKPILEKMDGTEELLVKLNREDLLRKQRTFDNGSIPHQIHLGELHAILRRQEDFYPFLKDNREKIEKILTFRIPYYVGPLARGNSRFAWMTRKSEETITPWNFEEVVDKGASAQSFIERMTNFDKNLPNEKVLPKHSLLYEYFTVYNELTKVKYVTEGMRKPAFLSGEQKKAIVDLLFKTNRKVTVKQLKEDYFKKIECFDSVEISGVEDRFNASLGTYHDLLKIIKDKDFLDNEENEDILEDIVLTLTLFEDREMIEERLKTYAHLFDDKVMKQLKRRRYTGWGRLSRKLINGIRDKQSGKTILDFLKSDGFANRNFMQLIHDDSLTFKEDIQKAQVSGQGDSLHEHIANLAGSPAIKKGILQTVKVVDELVKVMGRHKPENIVIEMARENQTTQKGQKNSRERMKRIEEGIKELGSQILKEHPVENTQLQNEKLYLYYLQNGRDMYVDQELDINRLSDYDVDHIVPQSFLKDDSIDNKVLTRSDKARGKSDNVPSEEVVKKMKNYWRQLLNAKLITQRKFDNLTKAERGGLSELDKAGFIKRQLVETRQITKHVAQILDSRMNTKYDENDKLIREVKVITLKSKLVSDFRKDFQFYKVREINNYHHAHDAYLNAVVGTALIKKYPKLESEFVYGDYKVYDVRKMIAKSEQEIGKATAKYFFYSNIMNFFKTEITLANGEIRKRPLIETNGETGEIVWDKGRDFATVRKVLSMPQVNIVKKTEVQTGGFSKESILPKRNSDKLIARKKDWDPKKYGGFDSPTVAYSVLVVAKVEKGKSKKLKSVKELLGITIMERSSFEKNPIDFLEAKGYKEVKKDLIIKLPKYSLFELENGRKRMLASAGELQKGNELALPSKYVNFLYLASHYEKLKGSPEDNEQKQLFVEQHKHYLDEIIEQISEFSKRVILADANLDKVLSAYNKHRDKPIREQAENIIHLFTLTNLGAPAAFKYFDTTIDRKRYTSTKEVLDATLIHQSITGLYETRIDLSQLGGDGGGGGPAPGSSGGTLQLDDEYRLYSPLVKPDQNIQFWLEQFPQAWAETAGMGLAKQVPPQVIQLKASATPVSVRQYPLSKEAQEGIRPHVQRLIQQGILVPVQSPWNTPLLPVRKPGTNDYRPVQDLREVNKRVQDIHPTVPNPYNLLCALPPQRSWYTVLDLKDAFFCLRLHPTSQPLFAFEWRDPGTGRTGQLTWTRLPQGFKNSPTIFDEALHRDLANFRIQHPQVTLLQYVDDLLLAGATKQDCLEGTKALLLELSDLGYRASAKKAQICRREVTYLGYSLRDGQRWLTEARKKTVVQIPAPTTAKQVREFLGTAGFCRLWIPGFATLAAPLYPLTKEKGEFSWAPEHQKAFDAIKKALLSAPALALPDVTKPFTLYVDERKGVARGVLTQTLGPWRRPVAYLSKKLDPVASGWPVCLKAIAAVAILVKDADKLTLGQNITVIAPHALENIVRQPPDRWMTNARMTHYQSLLLTERVTFAPPAALNPATLLPEETDEPVTHDCHQLLIEETGVRKDLTDIPLTGEVLTWFTDGSSYVVEGKRMAGAAVVDGTRTIWASSLPEGTSAQKAELMALTQALRLAEGKSINIYTDSRYAFATAHVHGAIYKQRGLLTSAGREIKNKEEILSLLEALHLPKRLAIIHCPGHQKAKDPISRGNQMADRVAKQAAQGVNLLAGKRTADGSEFEKRTADGSEFESPKKKAKVE

SEQ ID NO: 108 - protein, 2090 aa, synthetic construct
MPAAKRVKLDGGDKKYSIGLDIGTNSVGWAVITDEYKVPSKKFKVLGNTDRHSIKKNLIGALLFDSGETAEATRLKRTARRRYTRRKNRICYLQEIFSNEMAKVDDSFFHRLEESFLVEEDKKHERHPIFGNIVDEVAYHEKYPTIYHLRKKLVDSTDKADLRLIYLALAHMIKFRGHFLIEGDLNPDNSDVDKLFIQLVQTYNQLFEENPINASGVDAKAILSARLSKSRRLENLIAQLPGEKKNGLFGNLIALSLGLTPNFKSNFDLAEDAKLQLSKDTYDDDLDNLLAQIGDQYADLFLAAKNLSDAILLSDILRVNTEITKAPLSASMIKRYDEHHQDLTLLKALVRQQLPEKYKEIFFDQSKNGYAGYIDGGASQEEFYKFIKPILEKMDGTEELLVKLNREDLLRKQRTFDNGSIPHQIHLGELHAILRRQEDFYPFLKDNREKIEKILTFRIPYYVGPLARGNSRFAWMTRKSEETITPWNFEEVVDKGASAQSFIERMTNFDKNLPNEKVLPKHSLLYEYFTVYNELTKVKYVTEGMRKPAFLSGEQKKAIVDLLFKTNRKVTVKQLKEDYFKKIECFDSVEISGVEDRFNASLGTYHDLLKIIKDKDFLDNEENEDILEDIVLTLTLFEDREMIEERLKTYAHLFDDKVMKQLKRRRYTGWGRLSRKLINGIRDKQSGKTILDFLKSDGFANRNFMQLIHDDSLTFKEDIQKAQVSGQGDSLHEHIANLAGSPAIKKGILQTVKVVDELVKVMGRHKPENIVIEMARENQTTQKGQKNSRERMKRIEEGIKELGSQILKEHPVENTQLQNEKLYLYYLQNGRDMYVDQELDINRLSDYDVDHIVPQSFLKDDSIDNKVLTRSDKARGKSDNVPSEEVVKKMKNYWRQLLNAKLITQRKFDNLTKAERGGLSELDKAGFIKRQLVETRQITKHVAQILDSRMNTKYDENDKLIREVKVITLKSKLVSDFRKDFQFYKVREINNYHHAHDAYLNAVVGTALIKKYPKLESEFVYGDYKVYDVRKMIAKSEQEIGKATAKYFFYSNIMNFFKTEITLANGEIRKRPLIETNGETGEIVWDKGRDFATVRKVLSMPQVNIVKKTEVQTGGFSKESILPKRNSDKLIARKKDWDPKKYGGFDSPTVAYSVLVVAKVEKGKSKKLKSVKELLGITIMERSSFEKNPIDFLEAKGYKEVKKDLIIKLPKYSLFELENGRKRMLASAGELQKGNELALPSKYVNFLYLASHYEKLKGSPEDNEQKQLFVEQHKHYLDEIIEQISEFSKRVILADANLDKVLSAYNKHRDKPIREQAENIIHLFTLTNLGAPAAFKYFDTTIDRKRYTSTKEVLDATLIHQSITGLYETRIDLSQLGGDGGGGGEAAAKPAPGGTLQLDDEYRLYSPLVKPDQNIQFWLEQFPQAWAETAGMGLAKQVPPQVIQLKASATPVSVRQYPLSKEAQEGIRPHVQRLIQQGILVPVQSPWNTPLLPVRKPGTNDYRPVQDLREVNKRVQDIHPTVPNPYNLLCALPPQRSWYTVLDLKDAFFCLRLHPTSQPLFAFEWRDPGTGRTGQLTWTRLPQGFKNSPTIFDEALHRDLANFRIQHPQVTLLQYVDDLLLAGATKQDCLEGTKALLLELSDLGYRASAKKAQICRREVTYLGYSLRDGQRWLTEARKKTVVQIPAPTTAKQVREFLGTAGFCRLWIPGFATLAAPLYPLTKEKGEFSWAPEHQKAFDAIKKALLSAPALALPDVTKPFTLYVDERKGVARGVLTQTLGPWRRPVAYLSKKLDPVASGWPVCLKAIAAVAILVKDADKLTLGQNITVIAPHALENIVRQPPDRWMTNARMTHYQSLLLTERVTFAPPAALNPATLLPEETDEPVTHDCHQLLIEETGVRKDLTDIPLTGEVLTWFTDGSSYVVEGKRMAGAAVVDGTRTIWASSLPEGTSAQKAELMALTQALRLAEGKSINIYTDSRYAFATAHVHGAIYKQRGLLTSAGREIKNKEEILSLLEALHLPKRLAIIHCPGHQKAKDPISRGNQMADRVAKQAAQGVNLLAGKRTADGSEFEKRTADGSEFESPKKKAKVE

SEQ ID NO: 109 - protein, 2085 aa, synthetic construct
MPAAKRVKLDGGDKKYSIGLDIGTNSVGWAVITDEYKVPSKKFKVLGNTDRHSIKKNLIGALLFDSGETAEATRLKRTARRRYTRRKNRICYLQEIFSNEMAKVDDSFFHRLEESFLVEEDKKHERHPIFGNIVDEVAYHEKYPTIYHLRKKLVDSTDKADLRLIYLALAHMIKFRGHFLIEGDLNPDNSDVDKLFIQLVQTYNQLFEENPINASGVDAKAILSARLSKSRRLENLIAQLPGEKKNGLFGNLIALSLGLTPNFKSNFDLAEDAKLQLSKDTYDDDLDNLLAQIGDQYADLFLAAKNLSDAILLSDILRVNTEITKAPLSASMIKRYDEHHQDLTLLKALVRQQLPEKYKEIFFDQSKNGYAGYIDGGASQEEFYKFIKPILEKMDGTEELLVKLNREDLLRKQRTFDNGSIPHQIHLGELHAILRRQEDFYPFLKDNREKIEKILTFRIPYYVGPLARGNSRFAWMTRKSEETITPWNFEEVVDKGASAQSFIERMTNFDKNLPNEKVLPKHSLLYEYFTVYNELTKVKYVTEGMRKPAFLSGEQKKAIVDLLFKTNRKVTVKQLKEDYFKKIECFDSVEISGVEDRFNASLGTYHDLLKIIKDKDFLDNEENEDILEDIVLTLTLFEDREMIEERLKTYAHLFDDKVMKQLKRRRYTGWGRLSRKLINGIRDKQSGKTILDFLKSDGFANRNFMQLIHDDSLTFKEDIQKAQVSGQGDSLHEHIANLAGSPAIKKGILQTVKVVDELVKVMGRHKPENIVIEMARENQTTQKGQKNSRERMKRIEEGIKELGSQILKEHPVENTQLQNEKLYLYYLQNGRDMYVDQELDINRLSDYDVDHIVPQSFLKDDSIDNKVLTRSDKARGKSDNVPSEEVVKKMKNYWRQLLNAKLITQRKFDNLTKAERGGLSELDKAGFIKRQLVETRQITKHVAQILDSRMNTKYDENDKLIREVKVITLKSKLVSDFRKDFQFYKVREINNYHHAHDAYLNAVVGTALIKKYPKLESEFVYGDYKVYDVRKMIAKSEQEIGKATAKYFFYSNIMNFFKTEITLANGEIRKRPLIETNGETGEIVWDKGRDFATVRKVLSMPQVNIVKKTEVQTGGFSKESILPKRNSDKLIARKKDWDPKKYGGFDSPTVAYSVLVVAKVEKGKSKKLKSVKELLGITIMERSSFEKNPIDFLEAKGYKEVKKDLIIKLPKYSLFELENGRKRMLASAGELQKGNELALPSKYVNFLYLASHYEKLKGSPEDNEQKQLFVEQHKHYLDEIIEQISEFSKRVILADANLDKVLSAYNKHRDKPIREQAENIIHLFTLTNLGAPAAFKYFDTTIDRKRYTSTKEVLDATLIHQSITGLYETRIDLSQLGGDGGGGSPAPGGTLQLDDEYRLYSPLVKPDQNIQFWLEQFPQAWAETAGMGLAKQVPPQVIQLKASATPVSVRQYPLSKEAQEGIRPHVQRLIQQGILVPVQSPWNTPLLPVRKPGTNDYRPVQDLREVNKRVQDIHPTVPNPYNLLCALPPQRSWYTVLDLKDAFFCLRLHPTSQPLFAFEWRDPGTGRTGQLTWTRLPQGFKNSPTIFDEALHRDLANFRIQHPQVTLLQYVDDLLLAGATKQDCLEGTKALLLELSDLGYRASAKKAQICRREVTYLGYSLRDGQRWLTEARKKTVVQIPAPTTAKQVREFLGTAGFCRLWIPGFATLAAPLYPLTKEKGEFSWAPEHQKAFDAIKKALLSAPALALPDVTKPFTLYVDERKGVARGVLTQTLGPWRRPVAYLSKKLDPVASGWPVCLKAIAAVAILVKDADKLTLGQNITVIAPHALENIVRQPPDRWMTNARMTHYQSLLLTERVTFAPPAALNPATLLPEETDEPVTHDCHQLLIEETGVRKDLTDIPLTGEVLTWFTDGSSYVVEGKRMAGAAVVDGTRTIWASSLPEGTSAQKAELMALTQALRLAEGKSINIYTDSRYAFATAHVHGAIYKQRGLLTSAGREIKNKEEILSLLEALHLPKRLAIIHCPGHQKAKDPISRGNQMADRVAKQAAQGVNLLAGKRTADGSEFEKRTADGSEFESPKKKAKVE

SEQ ID NO: 110 - protein, 2085 aa, synthetic construct
MPAAKRVKLDGGDKKYSIGLDIGTNSVGWAVITDEYKVPSKKFKVLGNTDRHSIKKNLIGALLFDSGETAEATRLKRTARRRYTRRKNRICYLQEIFSNEMAKVDDSFFHRLEESFLVEEDKKHERHPIFGNIVDEVAYHEKYPTIYHLRKKLVDSTDKADLRLIYLALAHMIKFRGHFLIEGDLNPDNSDVDKLFIQLVQTYNQLFEENPINASGVDAKAILSARLSKSRRLENLIAQLPGEKKNGLFGNLIALSLGLTPNFKSNFDLAEDAKLQLSKDTYDDDLDNLLAQIGDQYADLFLAAKNLSDAILLSDILRVNTEITKAPLSASMIKRYDEHHQDLTLLKALVRQQLPEKYKEIFFDQSKNGYAGYIDGGASQEEFYKFIKPILEKMDGTEELLVKLNREDLLRKQRTFDNGSIPHQIHLGELHAILRRQEDFYPFLKDNREKIEKILTFRIPYYVGPLARGNSRFAWMTRKSEETITPWNFEEVVDKGASAQSFIERMTNFDKNLPNEKVLPKHSLLYEYFTVYNELTKVKYVTEGMRKPAFLSGEQKKAIVDLLFKTNRKVTVKQLKEDYFKKIECFDSVEISGVEDRFNASLGTYHDLLKIIKDKDFLDNEENEDILEDIVLTLTLFEDREMIEERLKTYAHLFDDKVMKQLKRRRYTGWGRLSRKLINGIRDKQSGKTILDFLKSDGFANRNFMQLIHDDSLTFKEDIQKAQVSGQGDSLHEHIANLAGSPAIKKGILQTVKVVDELVKVMGRHKPENIVIEMARENQTTQKGQKNSRERMKRIEEGIKELGSQILKEHPVENTQLQNEKLYLYYLQNGRDMYVDQELDINRLSDYDVDHIVPQSFLKDDSIDNKVLTRSDKARGKSDNVPSEEVVKKMKNYWRQLLNAKLITQRKFDNLTKAERGGLSELDKAGFIKRQLVETRQITKHVAQILDSRMNTKYDENDKLIREVKVITLKSKLVSDFRKDFQFYKVREINNYHHAHDAYLNAVVGTALIKKYPKLESEFVYGDYKVYDVRKMIAKSEQEIGKATAKYFFYSNIMNFFKTEITLANGEIRKRPLIETNGETGEIVWDKGRDFATVRKVLSMPQVNIVKKTEVQTGGFSKESILPKRNSDKLIARKKDWDPKKYGGFDSPTVAYSVLVVAKVEKGKSKKLKSVKELLGITIMERSSFEKNPIDFLEAKGYKEVKKDLIIKLPKYSLFELENGRKRMLASAGELQKGNELALPSKYVNFLYLASHYEKLKGSPEDNEQKQLFVEQHKHYLDEIIEQISEFSKRVILADANLDKVLSAYNKHRDKPIREQAENIIHLFTLTNLGAPAAFKYFDTTIDRKRYTSTKEVLDATLIHQSITGLYETRIDLSQLGGDGGGSSGSSGGTLQLDDEYRLYSPLVKPDQNIQFWLEQFPQAWAETAGMGLAKQVPPQVIQLKASATPVSVRQYPLSKEAQEGIRPHVQRLIQQGILVPVQSPWNTPLLPVRKPGTNDYRPVQDLREVNKRVQDIHPTVPNPYNLLCALPPQRSWYTVLDLKDAFFCLRLHPTSQPLFAFEWRDPGTGRTGQLTWTRLPQGFKNSPTIFDEALHRDLANFRIQHPQVTLLQYVDDLLLAGATKQDCLEGTKALLLELSDLGYRASAKKAQICRREVTYLGYSLRDGQRWLTEARKKTVVQIPAPTTAKQVREFLGTAGFCRLWIPGFATLAAPLYPLTKEKGEFSWAPEHQKAFDAIKKALLSAPALALPDVTKPFTLYVDERKGVARGVLTQTLGPWRRPVAYLSKKLDPVASGWPVCLKAIAAVAILVKDADKLTLGQNITVIAPHALENIVRQPPDRWMTNARMTHYQSLLLTERVTFAPPAALNPATLLPEETDEPVTHDCHQLLIEETGVRKDLTDIPLTGEVLTWFTDGSSYVVEGKRMAGAAVVDGTRTIWASSLPEGTSAQKAELMALTQALRLAEGKSINIYTDSRYAFATAHVHGAIYKQRGLLTSAGREIKNKEEILSLLEALHLPKRLAIIHCPGHQKAKDPISRGNQMADRVAKQAAQGVNLLAGKRTADGSEFEKRTADGSEFESPKKKAKVE

SEQ ID NO: 111 - protein, 2091 aa, synthetic construct
MPAAKRVKLDGGDKKYSIGLDIGTNSVGWAVITDEYKVPSKKFKVLGNTDRHSIKKNLIGALLFDSGETAEATRLKRTARRRYTRRKNRICYLQEIFSNEMAKVDDSFFHRLEESFLVEEDKKHERHPIFGNIVDEVAYHEKYPTIYHLRKKLVDSTDKADLRLIYLALAHMIKFRGHFLIEGDLNPDNSDVDKLFIQLVQTYNQLFEENPINASGVDAKAILSARLSKSRRLENLIAQLPGEKKNGLFGNLIALSLGLTPNFKSNFDLAEDAKLQLSKDTYDDDLDNLLAQIGDQYADLFLAAKNLSDAILLSDILRVNTEITKAPLSASMIKRYDEHHQDLTLLKALVRQQLPEKYKEIFFDQSKNGYAGYIDGGASQEEFYKFIKPILEKMDGTEELLVKLNREDLLRKQRTFDNGSIPHQIHLGELHAILRRQEDFYPFLKDNREKIEKILTFRIPYYVGPLARGNSRFAWMTRKSEETITPWNFEEVVDKGASAQSFIERMTNFDKNLPNEKVLPKHSLLYEYFTVYNELTKVKYVTEGMRKPAFLSGEQKKAIVDLLFKTNRKVTVKQLKEDYFKKIECFDSVEISGVEDRFNASLGTYHDLLKIIKDKDFLDNEENEDILEDIVLTLTLFEDREMIEERLKTYAHLFDDKVMKQLKRRRYTGWGRLSRKLINGIRDKQSGKTILDFLKSDGFANRNFMQLIHDDSLTFKEDIQKAQVSGQGDSLHEHIANLAGSPAIKKGILQTVKVVDELVKVMGRHKPENIVIEMARENQTTQKGQKNSRERMKRIEEGIKELGSQILKEHPVENTQLQNEKLYLYYLQNGRDMYVDQELDINRLSDYDVDHIVPQSFLKDDSIDNKVLTRSDKARGKSDNVPSEEVVKKMKNYWRQLLNAKLITQRKFDNLTKAERGGLSELDKAGFIKRQLVETRQITKHVAQILDSRMNTKYDENDKLIREVKVITLKSKLVSDFRKDFQFYKVREINNYHHAHDAYLNAVVGTALIKKYPKLESEFVYGDYKVYDVRKMIAKSEQEIGKATAKYFFYSNIMNFFKTEITLANGEIRKRPLIETNGETGEIVWDKGRDFATVRKVLSMPQVNIVKKTEVQTGGFSKESILPKRNSDKLIARKKDWDPKKYGGFDSPTVAYSVLVVAKVEKGKSKKLKSVKELLGITIMERSSFEKNPIDFLEAKGYKEVKKDLIIKLPKYSLFELENGRKRMLASAGELQKGNELALPSKYVNFLYLASHYEKLKGSPEDNEQKQLFVEQHKHYLDEIIEQISEFSKRVILADANLDKVLSAYNKHRDKPIREQAENIIHLFTLTNLGAPAAFKYFDTTIDRKRYTSTKEVLDATLIHQSITGLYETRIDLSQLGGDGGGGSGGSGGSGGSGGTLQLDDEYRLYSPLVKPDQNIQFWLEQFPQAWAETAGMGLAKQVPPQVIQLKASATPVSVRQYPLSKEAQEGIRPHVQRLIQQGILVPVQSPWNTPLLPVRKPGTNDYRPVQDLREVNKRVQDIHPTVPNPYNLLCALPPQRSWYTVLDLKDAFFCLRLHPTSQPLFAFEWRDPGTGRTGQLTWTRLPQGFKNSPTIFDEALHRDLANFRIQHPQVTLLQYVDDLLLAGATKQDCLEGTKALLLELSDLGYRASAKKAQICRREVTYLGYSLRDGQRWLTEARKKTVVQIPAPTTAKQVREFLGTAGFCRLWIPGFATLAAPLYPLTKEKGEFSWAPEHQKAFDAIKKALLSAPALALPDVTKPFTLYVDERKGVARGVLTQTLGPWRRPVAYLSKKLDPVASGWPVCLKAIAAVAILVKDADKLTLGQNITVIAPHALENIVRQPPDRWMTNARMTHYQSLLLTERVTFAPPAALNPATLLPEETDEPVTHDCHQLLIEETGVRKDLTDIPLTGEVLTWFTDGSSYVVEGKRMAGAAVVDGTRTIWASSLPEGTSAQKAELMALTQALRLAEGKSINIYTDSRYAFATAHVHGAIYKQRGLLTSAGREIKNKEEILSLLEALHLPKRLAIIHCPGHQKAKDPISRGNQMADRVAKQAAQGVNLLAGKRTADGSEFEKRTADGSEFESPKKKAKVE

SEQ ID NO: 112 - protein, 2090 aa, synthetic construct
MPAAKRVKLDGGDKKYSIGLDIGTNSVGWAVITDEYKVPSKKFKVLGNTDRHSIKKNLIGALLFDSGETAEATRLKRTARRRYTRRKNRICYLQEIFSNEMAKVDDSFFHRLEESFLVEEDKKHERHPIFGNIVDEVAYHEKYPTIYHLRKKLVDSTDKADLRLIYLALAHMIKFRGHFLIEGDLNPDNSDVDKLFIQLVQTYNQLFEENPINASGVDAKAILSARLSKSRRLENLIAQLPGEKKNGLFGNLIALSLGLTPNFKSNFDLAEDAKLQLSKDTYDDDLDNLLAQIGDQYADLFLAAKNLSDAILLSDILRVNTEITKAPLSASMIKRYDEHHQDLTLLKALVRQQLPEKYKEIFFDQSKNGYAGYIDGGASQEEFYKFIKPILEKMDGTEELLVKLNREDLLRKQRTFDNGSIPHQIHLGELHAILRRQEDFYPFLKDNREKIEKILTFRIPYYVGPLARGNSRFAWMTRKSEETITPWNFEEVVDKGASAQSFIERMTNFDKNLPNEKVLPKHSLLYEYFTVYNELTKVKYVTEGMRKPAFLSGEQKKAIVDLLFKTNRKVTVKQLKEDYFKKIECFDSVEISGVEDRFNASLGTYHDLLKIIKDKDFLDNEENEDILEDIVLTLTLFEDREMIEERLKTYAHLFDDKVMKQLKRRRYTGWGRLSRKLINGIRDKQSGKTILDFLKSDGFANRNFMQLIHDDSLTFKEDIQKAQVSGQGDSLHEHIANLAGSPAIKKGILQTVKVVDELVKVMGRHKPENIVIEMARENQTTQKGQKNSRERMKRIEEGIKELGSQILKEHPVENTQLQNEKLYLYYLQNGRDMYVDQELDINRLSDYDVDHIVPQSFLKDDSIDNKVLTRSDKARGKSDNVPSEEVVKKMKNYWRQLLNAKLITQRKFDNLTKAERGGLSELDKAGFIKRQLVETRQITKHVAQILDSRMNTKYDENDKLIREVKVITLKSKLVSDFRKDFQFYKVREINNYHHAHDAYLNAVVGTALIKKYPKLESEFVYGDYKVYDVRKMIAKSEQEIGKATAKYFFYSNIMNFFKTEITLANGEIRKRPLIETNGETGEIVWDKGRDFATVRKVLSMPQVNIVKKTEVQTGGFSKESILPKRNSDKLIARKKDWDPKKYGGFDSPTVAYSVLVVAKVEKGKSKKLKSVKELLGITIMERSSFEKNPIDFLEAKGYKEVKKDLIIKLPKYSLFELENGRKRMLASAGELQKGNELALPSKYVNFLYLASHYEKLKGSPEDNEQKQLFVEQHKHYLDEIIEQISEFSKRVILADANLDKVLSAYNKHRDKPIREQAENIIHLFTLTNLGAPAAFKYFDTTIDRKRYTSTKEVLDATLIHQSITGLYETRIDLSQLGGDGGEAAAKGGGPAPGGTLQLDDEYRLYSPLVKPDQNIQFWLEQFPQAWAETAGMGLAKQVPPQVIQLKASATPVSVRQYPLSKEAQEGIRPHVQRLIQQGILVPVQSPWNTPLLPVRKPGTNDYRPVQDLREVNKRVQDIHPTVPNPYNLLCALPPQRSWYTVLDLKDAFFCLRLHPTSQPLFAFEWRDPGTGRTGQLTWTRLPQGFKNSPTIFDEALHRDLANFRIQHPQVTLLQYVDDLLLAGATKQDCLEGTKALLLELSDLGYRASAKKAQICRREVTYLGYSLRDGQRWLTEARKKTVVQIPAPTTAKQVREFLGTAGFCRLWIPGFATLAAPLYPLTKEKGEFSWAPEHQKAFDAIKKALLSAPALALPDVTKPFTLYVDERKGVARGVLTQTLGPWRRPVAYLSKKLDPVASGWPVCLKAIAAVAILVKDADKLTLGQNITVIAPHALENIVRQPPDRWMTNARMTHYQSLLLTERVTFAPPAALNPATLLPEETDEPVTHDCHQLLIEETGVRKDLTDIPLTGEVLTWFTDGSSYVVEGKRMAGAAVVDGTRTIWASSLPEGTSAQKAELMALTQALRLAEGKSINIYTDSRYAFATAHVHGAIYKQRGLLTSAGREIKNKEEILSLLEALHLPKRLAIIHCPGHQKAKDPISRGNQMADRVAKQAAQGVNLLAGKRTADGSEFEKRTADGSEFESPKKKAKVE

SEQ ID NO: 113 - protein, 2097 aa, synthetic construct
MPAAKRVKLDGGDKKYSIGLDIGTNSVGWAVITDEYKVPSKKFKVLGNTDRHSIKKNLIGALLFDSGETAEATRLKRTARRRYTRRKNRICYLQEIFSNEMAKVDDSFFHRLEESFLVEEDKKHERHPIFGNIVDEVAYHEKYPTIYHLRKKLVDSTDKADLRLIYLALAHMIKFRGHFLIEGDLNPDNSDVDKLFIQLVQTYNQLFEENPINASGVDAKAILSARLSKSRRLENLIAQLPGEKKNGLFGNLIALSLGLTPNFKSNFDLAEDAKLQLSKDTYDDDLDNLLAQIGDQYADLFLAAKNLSDAILLSDILRVNTEITKAPLSASMIKRYDEHHQDLTLLKALVRQQLPEKYKEIFFDQSKNGYAGYIDGGASQEEFYKFIKPILEKMDGTEELLVKLNREDLLRKQRTFDNGSIPHQIHLGELHAILRRQEDFYPFLKDNREKIEKILTFRIPYYVGPLARGNSRFAWMTRKSEETITPWNFEEVVDKGASAQSFIERMTNFDKNLPNEKVLPKHSLLYEYFTVYNELTKVKYVTEGMRKPAFLSGEQKKAIVDLLFKTNRKVTVKQLKEDYFKKIECFDSVEISGVEDRFNASLGTYHDLLKIIKDKDFLDNEENEDILEDIVLTLTLFEDREMIEERLKTYAHLFDDKVMKQLKRRRYTGWGRLSRKLINGIRDKQSGKTILDFLKSDGFANRNFMQLIHDDSLTFKEDIQKAQVSGQGDSLHEHIANLAGSPAIKKGILQTVKVVDELVKVMGRHKPENIVIEMARENQTTQKGQKNSRERMKRIEEGIKELGSQILKEHPVENTQLQNEKLYLYYLQNGRDMYVDQELDINRLSDYDVDHIVPQSFLKDDSIDNKVLTRSDKARGKSDNVPSEEVVKKMKNYWRQLLNAKLITQRKFDNLTKAERGGLSELDKAGFIKRQLVETRQITKHVAQILDSRMNTKYDENDKLIREVKVITLKSKLVSDFRKDFQFYKVREINNYHHAHDAYLNAVVGTALIKKYPKLESEFVYGDYKVYDVRKMIAKSEQEIGKATAKYFFYSNIMNFFKTEITLANGEIRKRPLIETNGETGEIVWDKGRDFATVRKVLSMPQVNIVKKTEVQTGGFSKESILPKRNSDKLIARKKDWDPKKYGGFDSPTVAYSVLVVAKVEKGKSKKLKSVKELLGITIMERSSFEKNPIDFLEAKGYKEVKKDLIIKLPKYSLFELENGRKRMLASAGELQKGNELALPSKYVNFLYLASHYEKLKGSPEDNEQKQLFVEQHKHYLDEIIEQISEFSKRVILADANLDKVLSAYNKHRDKPIREQAENIIHLFTLTNLGAPAAFKYFDTTIDRKRYTSTKEVLDATLIHQSITGLYETRIDLSQLGGDGGGSSGSSGSSGSSGSSGSSGGTLQLDDEYRLYSPLVKPDQNIQFWLEQFPQAWAETAGMGLAKQVPPQVIQLKASATPVSVRQYPLSKEAQEGIRPHVQRLIQQGILVPVQSPWNTPLLPVRKPGTNDYRPVQDLREVNKRVQDIHPTVPNPYNLLCALPPQRSWYTVLDLKDAFFCLRLHPTSQPLFAFEWRDPGTGRTGQLTWTRLPQGFKNSPTIFNEALHRDLANFRIQHPQVTLLQYVDDLLLAGATKQDCLEGTKALLLELSDLGYRASAKKAQICRREVTYLGYSLRDGQRWLTEARKKTVVQIPAPTTAKQVREFLGTAGFCRLWIPGFATLAAPLYPLTKPKGEFSWAPEHQKAFDAIKKALLSAPALALPDVTKPFTLYVDERKGVARGVLTQTLGPWRRPVAYLSKKLDPVASGWPVCLKAIAAVAILVKDADKLTLGQNITVIAPHALENIVRQPPDRWMTNARMTHYQSLLLTERVTFAPPAALNPATLLPEETDEPVTHDCHQLLIEETGVRKDLTDIPLTGEVLTWFTDGSSYVVEGKRMAGAAVVDGTRTIWASSLPEGTSAQKAELMALTQALRLAEGKSINIYTDSRYAFATAHVHGAIYKQRGWLTSAGREIKNKEEILSLLEALHLPKRLAIIHCPGHQKAKDPISRGNQMADRVAKQAAQGVNLLAGKRTADGSEFEKRTADGSEFESPKKKAKVE

SEQ ID NO: 114 - protein, 2087 aa, synthetic construct
MPAAKRVKLDGGDKKYSIGLDIGTNSVGWAVITDEYKVPSKKFKVLGNTDRHSIKKNLIGALLFDSGETAEATRLKRTARRRYTRRKNRICYLQEIFSNEMAKVDDSFFHRLEESFLVEEDKKHERHPIFGNIVDEVAYHEKYPTIYHLRKKLVDSTDKADLRLIYLALAHMIKFRGHFLIEGDLNPDNSDVDKLFIQLVQTYNQLFEENPINASGVDAKAILSARLSKSRRLENLIAQLPGEKKNGLFGNLIALSLGLTPNFKSNFDLAEDAKLQLSKDTYDDDLDNLLAQIGDQYADLFLAAKNLSDAILLSDILRVNTEITKAPLSASMIKRYDEHHQDLTLLKALVRQQLPEKYKEIFFDQSKNGYAGYIDGGASQEEFYKFIKPILEKMDGTEELLVKLNREDLLRKQRTFDNGSIPHQIHLGELHAILRRQEDFYPFLKDNREKIEKILTFRIPYYVGPLARGNSRFAWMTRKSEETITPWNFEEVVDKGASAQSFIERMTNFDKNLPNEKVLPKHSLLYEYFTVYNELTKVKYVTEGMRKPAFLSGEQKKAIVDLLFKTNRKVTVKQLKEDYFKKIECFDSVEISGVEDRFNASLGTYHDLLKIIKDKDFLDNEENEDILEDIVLTLTLFEDREMIEERLKTYAHLFDDKVMKQLKRRRYTGWGRLSRKLINGIRDKQSGKTILDFLKSDGFANRNFMQLIHDDSLTFKEDIQKAQVSGQGDSLHEHIANLAGSPAIKKGILQTVKVVDELVKVMGRHKPENIVIEMARENQTTQKGQKNSRERMKRIEEGIKELGSQILKEHPVENTQLQNEKLYLYYLQNGRDMYVDQELDINRLSDYDVDHIVPQSFLKDDSIDNKVLTRSDKARGKSDNVPSEEVVKKMKNYWRQLLNAKLITQRKFDNLTKAERGGLSELDKAGFIKRQLVETRQITKHVAQILDSRMNTKYDENDKLIREVKVITLKSKLVSDFRKDFQFYKVREINNYHHAHDAYLNAVVGTALIKKYPKLESEFVYGDYKVYDVRKMIAKSEQEIGKATAKYFFYSNIMNFFKTEITLANGEIRKRPLIETNGETGEIVWDKGRDFATVRKVLSMPQVNIVKKTEVQTGGFSKESILPKRNSDKLIARKKDWDPKKYGGFDSPTVAYSVLVVAKVEKGKSKKLKSVKELLGITIMERSSFEKNPIDFLEAKGYKEVKKDLIIKLPKYSLFELENGRKRMLASAGELQKGNELALPSKYVNFLYLASHYEKLKGSPEDNEQKQLFVEQHKHYLDEIIEQISEFSKRVILADANLDKVLSAYNKHRDKPIREQAENIIHLFTLTNLGAPAAFKYFDTTIDRKRYTSTKEVLDATLIHQSITGLYETRIDLSQLGGDGGGGGGGGGGGGTLQLDDEYRLYSPLVKPDQNIQFWLEQFPQAWAETAGMGLAKQVPPQVIQLKASATPVSVRQYPLSKEAQEGIRPHVQRLIQQGILVPVQSPWNTPLLPVRKPGTNDYRPVQDLREVNKRVQDIHPTVPNPYNLLCALPPQRSWYTVLDLKDAFFCLRLHPTSQPLFAFEWRDPGTGRTGQLTWTRLPQGFKNSPTIFNEALHRDLANFRIQHPQVTLLQYVDDLLLAGATKQDCLEGTKALLLELSDLGYRASAKKAQICRREVTYLGYSLRDGQRWLTEARKKTVVQIPAPTTAKQVREFLGTAGFCRLWIPGFATLAAPLYPLTKPKGEFSWAPEHQKAFDAIKKALLSAPALALPDVTKPFTLYVDERKGVARGVLTQTLGPWRRPVAYLSKKLDPVASGWPVCLKAIAAVAILVKDADKLTLGQNITVIAPHALENIVRQPPDRWMTNARMTHYQSLLLTERVTFAPPAALNPATLLPEETDEPVTHDCHQLLIEETGVRKDLTDIPLTGEVLTWFTDGSSYVVEGKRMAGAAVVDGTRTIWASSLPEGTSAQKAELMALTQALRLAEGKSINIYTDSRYAFATAHVHGAIYKQRGWLTSAGREIKNKEEILSLLEALHLPKRLAIIHCPGHQKAKDPISRGNQMADRVAKQAAQGVNLLAGKRTADGSEFEKRTADGSEFESPKKKAKVE

SEQ ID NO: 115 - protein, 2090 aa, synthetic construct
MPAAKRVKLDGGDKKYSIGLDIGTNSVGWAVITDEYKVPSKKFKVLGNTDRHSIKKNLIGALLFDSGETAEATRLKRTARRRYTRRKNRICYLQEIFSNEMAKVDDSFFHRLEESFLVEEDKKHERHPIFGNIVDEVAYHEKYPTIYHLRKKLVDSTDKADLRLIYLALAHMIKFRGHFLIEGDLNPDNSDVDKLFIQLVQTYNQLFEENPINASGVDAKAILSARLSKSRRLENLIAQLPGEKKNGLFGNLIALSLGLTPNFKSNFDLAEDAKLQLSKDTYDDDLDNLLAQIGDQYADLFLAAKNLSDAILLSDILRVNTEITKAPLSASMIKRYDEHHQDLTLLKALVRQQLPEKYKEIFFDQSKNGYAGYIDGGASQEEFYKFIKPILEKMDGTEELLVKLNREDLLRKQRTFDNGSIPHQIHLGELHAILRRQEDFYPFLKDNREKIEKILTFRIPYYVGPLARGNSRFAWMTRKSEETITPWNFEEVVDKGASAQSFIERMTNFDKNLPNEKVLPKHSLLYEYFTVYNELTKVKYVTEGMRKPAFLSGEQKKAIVDLLFKTNRKVTVKQLKEDYFKKIECFDSVEISGVEDRFNASLGTYHDLLKIIKDKDFLDNEENEDILEDIVLTLTLFEDREMIEERLKTYAHLFDDKVMKQLKRRRYTGWGRLSRKLINGIRDKQSGKTILDFLKSDGFANRNFMQLIHDDSLTFKEDIQKAQVSGQGDSLHEHIANLAGSPAIKKGILQTVKVVDELVKVMGRHKPENIVIEMARENQTTQKGQKNSRERMKRIEEGIKELGSQILKEHPVENTQLQNEKLYLYYLQNGRDMYVDQELDINRLSDYDVDHIVPQSFLKDDSIDNKVLTRSDKARGKSDNVPSEEVVKKMKNYWRQLLNAKLITQRKFDNLTKAERGGLSELDKAGFIKRQLVETRQITKHVAQILDSRMNTKYDENDKLIREVKVITLKSKLVSDFRKDFQFYKVREINNYHHAHDAYLNAVVGTALIKKYPKLESEFVYGDYKVYDVRKMIAKSEQEIGKATAKYFFYSNIMNFFKTEITLANGEIRKRPLIETNGETGEIVWDKGRDFATVRKVLSMPQVNIVKKTEVQTGGFSKESILPKRNSDKLIARKKDWDPKKYGGFDSPTVAYSVLVVAKVEKGKSKKLKSVKELLGITIMERSSFEKNPIDFLEAKGYKEVKKDLIIKLPKYSLFELENGRKRMLASAGELQKGNELALPSKYVNFLYLASHYEKLKGSPEDNEQKQLFVEQHKHYLDEIIEQISEFSKRVILADANLDKVLSAYNKHRDKPIREQAENIIHLFTLTNLGAPAAFKYFDTTIDRKRYTSTKEVLDATLIHQSITGLYETRIDLSQLGGDGGPAPAPAPAPAPGGTLQLDDEYRLYSPLVKPDQNIQFWLEQFPQAWAETAGMGLAKQVPPQVIQLKASATPVSVRQYPLSKEAQEGIRPHVQRLIQQGILVPVQSPWNTPLLPVRKPGTNDYRPVQDLREVNKRVQDIHPTVPNPYNLLCALPPQRSWYTVLDLKDAFFCLRLHPTSQPLFAFEWRDPGTGRTGQLTWTRLPQGFKNSPTIFNEALHRDLANFRIQHPQVTLLQYVDDLLLAGATKQDCLEGTKALLLELSDLGYRASAKKAQICRREVTYLGYSLRDGQRWLTEARKKTVVQIPAPTTAKQVREFLGTAGFCRLWIPGFATLAAPLYPLTKPKGEFSWAPEHQKAFDAIKKALLSAPALALPDVTKPFTLYVDERKGVARGVLTQTLGPWRRPVAYLSKKLDPVASGWPVCLKAIAAVAILVKDADKLTLGQNITVIAPHALENIVRQPPDRWMTNARMTHYQSLLLTERVTFAPPAALNPATLLPEETDEPVTHDCHQLLIEETGVRKDLTDIPLTGEVLTWFTDGSSYVVEGKRMAGAAVVDGTRTIWASSLPEGTSAQKAELMALTQALRLAEGKSINIYTDSRYAFATAHVHGAIYKQRGWLTSAGREIKNKEEILSLLEALHLPKRLAIIHCPGHQKAKDPISRGNQMADRVAKQAAQGVNLLAGKRTADGSEFEKRTADGSEFESPKKKAKVE

SEQ ID NO: 116 - protein, 2090 aa, synthetic construct
MPAAKRVKLDGGDKKYSIGLDIGTNSVGWAVITDEYKVPSKKFKVLGNTDRHSIKKNLIGALLFDSGETAEATRLKRTARRRYTRRKNRICYLQEIFSNEMAKVDDSFFHRLEESFLVEEDKKHERHPIFGNIVDEVAYHEKYPTIYHLRKKLVDSTDKADLRLIYLALAHMIKFRGHFLIEGDLNPDNSDVDKLFIQLVQTYNQLFEENPINASGVDAKAILSARLSKSRRLENLIAQLPGEKKNGLFGNLIALSLGLTPNFKSNFDLAEDAKLQLSKDTYDDDLDNLLAQIGDQYADLFLAAKNLSDAILLSDILRVNTEITKAPLSASMIKRYDEHHQDLTLLKALVRQQLPEKYKEIFFDQSKNGYAGYIDGGASQEEFYKFIKPILEKMDGTEELLVKLNREDLLRKQRTFDNGSIPHQIHLGELHAILRRQEDFYPFLKDNREKIEKILTFRIPYYVGPLARGNSRFAWMTRKSEETITPWNFEEVVDKGASAQSFIERMTNFDKNLPNEKVLPKHSLLYEYFTVYNELTKVKYVTEGMRKPAFLSGEQKKAIVDLLFKTNRKVTVKQLKEDYFKKIECFDSVEISGVEDRFNASLGTYHDLLKIIKDKDFLDNEENEDILEDIVLTLTLFEDREMIEERLKTYAHLFDDKVMKQLKRRRYTGWGRLSRKLINGIRDKQSGKTILDFLKSDGFANRNFMQLIHDDSLTFKEDIQKAQVSGQGDSLHEHIANLAGSPAIKKGILQTVKVVDELVKVMGRHKPENIVIEMARENQTTQKGQKNSRERMKRIEEGIKELGSQILKEHPVENTQLQNEKLYLYYLQNGRDMYVDQELDINRLSDYDVDHIVPQSFLKDDSIDNKVLTRSDKARGKSDNVPSEEVVKKMKNYWRQLLNAKLITQRKFDNLTKAERGGLSELDKAGFIKRQLVETRQITKHVAQILDSRMNTKYDENDKLIREVKVITLKSKLVSDFRKDFQFYKVREINNYHHAHDAYLNAVVGTALIKKYPKLESEFVYGDYKVYDVRKMIAKSEQEIGKATAKYFFYSNIMNFFKTEITLANGEIRKRPLIETNGETGEIVWDKGRDFATVRKVLSMPQVNIVKKTEVQTGGFSKESILPKRNSDKLIARKKDWDPKKYGGFDSPTVAYSVLVVAKVEKGKSKKLKSVKELLGITIMERSSFEKNPIDFLEAKGYKEVKKDLIIKLPKYSLFELENGRKRMLASAGELQKGNELALPSKYVNFLYLASHYEKLKGSPEDNEQKQLFVEQHKHYLDEIIEQISEFSKRVILADANLDKVLSAYNKHRDKPIREQAENIIHLFTLTNLGAPAAFKYFDTTIDRKRYTSTKEVLDATLIHQSITGLYETRIDLSQLGGDGGGSSEAAAKPAPGGTLQLDDEYRLYSPLVKPDQNIQFWLEQFPQAWAETAGMGLAKQVPPQVIQLKASATPVSVRQYPLSKEAQEGIRPHVQRLIQQGILVPVQSPWNTPLLPVRKPGTNDYRPVQDLREVNKRVQDIHPTVPNPYNLLCALPPQRSWYTVLDLKDAFFCLRLHPTSQPLFAFEWRDPGTGRTGQLTWTRLPQGFKNSPTIFNEALHRDLANFRIQHPQVTLLQYVDDLLLAGATKQDCLEGTKALLLELSDLGYRASAKKAQICRREVTYLGYSLRDGQRWLTEARKKTVVQIPAPTTAKQVREFLGTAGFCRLWIPGFATLAAPLYPLTKPKGEFSWAPEHQKAFDAIKKALLSAPALALPDVTKPFTLYVDERKGVARGVLTQTLGPWRRPVAYLSKKLDPVASGWPVCLKAIAAVAILVKDADKLTLGQNITVIAPHALENIVRQPPDRWMTNARMTHYQSLLLTERVTFAPPAALNPATLLPEETDEPVTHDCHQLLIEETGVRKDLTDIPLTGEVLTWFTDGSSYVVEGKRMAGAAVVDGTRTIWASSLPEGTSAQKAELMALTQALRLAEGKSINIYTDSRYAFATAHVHGAIYKQRGWLTSAGREIKNKEEILSLLEALHLPKRLAIIHCPGHQKAKDPISRGNQMADRVAKQAAQGVNLLAGKRTADGSEFEKRTADGSEFESPKKKAKVE

SEQ ID NO: 117 - protein, 2109 aa, synthetic construct
MPAAKRVKLDGGDKKYSIGLDIGTNSVGWAVITDEYKVPSKKFKVLGNTDRHSIKKNLIGALLFDSGETAEATRLKRTARRRYTRRKNRICYLQEIFSNEMAKVDDSFFHRLEESFLVEEDKKHERHPIFGNIVDEVAYHEKYPTIYHLRKKLVDSTDKADLRLIYLALAHMIKFRGHFLIEGDLNPDNSDVDKLFIQLVQTYNQLFEENPINASGVDAKAILSARLSKSRRLENLIAQLPGEKKNGLFGNLIALSLGLTPNFKSNFDLAEDAKLQLSKDTYDDDLDNLLAQIGDQYADLFLAAKNLSDAILLSDILRVNTEITKAPLSASMIKRYDEHHQDLTLLKALVRQQLPEKYKEIFFDQSKNGYAGYIDGGASQEEFYKFIKPILEKMDGTEELLVKLNREDLLRKQRTFDNGSIPHQIHLGELHAILRRQEDFYPFLKDNREKIEKILTFRIPYYVGPLARGNSRFAWMTRKSEETITPWNFEEVVDKGASAQSFIERMTNFDKNLPNEKVLPKHSLLYEYFTVYNELTKVKYVTEGMRKPAFLSGEQKKAIVDLLFKTNRKVTVKQLKEDYFKKIECFDSVEISGVEDRFNASLGTYHDLLKIIKDKDFLDNEENEDILEDIVLTLTLFEDREMIEERLKTYAHLFDDKVMKQLKRRRYTGWGRLSRKLINGIRDKQSGKTILDFLKSDGFANRNFMQLIHDDSLTFKEDIQKAQVSGQGDSLHEHIANLAGSPAIKKGILQTVKVVDELVKVMGRHKPENIVIEMARENQTTQKGQKNSRERMKRIEEGIKELGSQILKEHPVENTQLQNEKLYLYYLQNGRDMYVDQELDINRLSDYDVDHIVPQSFLKDDSIDNKVLTRSDKARGKSDNVPSEEVVKKMKNYWRQLLNAKLITQRKFDNLTKAERGGLSELDKAGFIKRQLVETRQITKHVAQILDSRMNTKYDENDKLIREVKVITLKSKLVSDFRKDFQFYKVREINNYHHAHDAYLNAVVGTALIKKYPKLESEFVYGDYKVYDVRKMIAKSEQEIGKATAKYFFYSNIMNFFKTEITLANGEIRKRPLIETNGETGEIVWDKGRDFATVRKVLSMPQVNIVKKTEVQTGGFSKESILPKRNSDKLIARKKDWDPKKYGGFDSPTVAYSVLVVAKVEKGKSKKLKSVKELLGITIMERSSFEKNPIDFLEAKGYKEVKKDLIIKLPKYSLFELENGRKRMLASAGELQKGNELALPSKYVNFLYLASHYEKLKGSPEDNEQKQLFVEQHKHYLDEIIEQISEFSKRVILADANLDKVLSAYNKHRDKPIREQAENIIHLFTLTNLGAPAAFKYFDTTIDRKRYTSTKEVLDATLIHQSITGLYETRIDLSQLGGDGGEAAAKEAAAKEAAAKEAAAKEAAAKEAAAKGGTLQLDDEYRLYSPLVKPDQNIQFWLEQFPQAWAETAGMGLAKQVPPQVIQLKASATPVSVRQYPLSKEAQEGIRPHVQRLIQQGILVPVQSPWNTPLLPVRKPGTNDYRPVQDLREVNKRVQDIHPTVPNPYNLLCALPPQRSWYTVLDLKDAFFCLRLHPTSQPLFAFEWRDPGTGRTGQLTWTRLPQGFKNSPTIFNEALHRDLANFRIQHPQVTLLQYVDDLLLAGATKQDCLEGTKALLLELSDLGYRASAKKAQICRREVTYLGYSLRDGQRWLTEARKKTVVQIPAPTTAKQVREFLGTAGFCRLWIPGFATLAAPLYPLTKPKGEFSWAPEHQKAFDAIKKALLSAPALALPDVTKPFTLYVDERKGVARGVLTQTLGPWRRPVAYLSKKLDPVASGWPVCLKAIAAVAILVKDADKLTLGQNITVIAPHALENIVRQPPDRWMTNARMTHYQSLLLTERVTFAPPAALNPATLLPEETDEPVTHDCHQLLIEETGVRKDLTDIPLTGEVLTWFTDGSSYVVEGKRMAGAAVVDGTRTIWASSLPEGTSAQKAELMALTQALRLAEGKSINIYTDSRYAFATAHVHGAIYKQRGWLTSAGREIKNKEEILSLLEALHLPKRLAIIHCPGHQKAKDPISRGNQMADRVAKQAAQGVNLLAGKRTADGSEFEKRTADGSEFESPKKKAKVE

SEQ ID NO: 118 - protein, 2094 aa, synthetic construct
MPAAKRVKLDGGDKKYSIGLDIGTNSVGWAVITDEYKVPSKKFKVLGNTDRHSIKKNLIGALLFDSGETAEATRLKRTARRRYTRRKNRICYLQEIFSNEMAKVDDSFFHRLEESFLVEEDKKHERHPIFGNIVDEVAYHEKYPTIYHLRKKLVDSTDKADLRLIYLALAHMIKFRGHFLIEGDLNPDNSDVDKLFIQLVQTYNQLFEENPINASGVDAKAILSARLSKSRRLENLIAQLPGEKKNGLFGNLIALSLGLTPNFKSNFDLAEDAKLQLSKDTYDDDLDNLLAQIGDQYADLFLAAKNLSDAILLSDILRVNTEITKAPLSASMIKRYDEHHQDLTLLKALVRQQLPEKYKEIFFDQSKNGYAGYIDGGASQEEFYKFIKPILEKMDGTEELLVKLNREDLLRKQRTFDNGSIPHQIHLGELHAILRRQEDFYPFLKDNREKIEKILTFRIPYYVGPLARGNSRFAWMTRKSEETITPWNFEEVVDKGASAQSFIERMTNFDKNLPNEKVLPKHSLLYEYFTVYNELTKVKYVTEGMRKPAFLSGEQKKAIVDLLFKTNRKVTVKQLKEDYFKKIECFDSVEISGVEDRFNASLGTYHDLLKIIKDKDFLDNEENEDILEDIVLTLTLFEDREMIEERLKTYAHLFDDKVMKQLKRRRYTGWGRLSRKLINGIRDKQSGKTILDFLKSDGFANRNFMQLIHDDSLTFKEDIQKAQVSGQGDSLHEHIANLAGSPAIKKGILQTVKVVDELVKVMGRHKPENIVIEMARENQTTQKGQKNSRERMKRIEEGIKELGSQILKEHPVENTQLQNEKLYLYYLQNGRDMYVDQELDINRLSDYDVDHIVPQSFLKDDSIDNKVLTRSDKARGKSDNVPSEEVVKKMKNYWRQLLNAKLITQRKFDNLTKAERGGLSELDKAGFIKRQLVETRQITKHVAQILDSRMNTKYDENDKLIREVKVITLKSKLVSDFRKDFQFYKVREINNYHHAHDAYLNAVVGTALIKKYPKLESEFVYGDYKVYDVRKMIAKSEQEIGKATAKYFFYSNIMNFFKTEITLANGEIRKRPLIETNGETGEIVWDKGRDFATVRKVLSMPQVNIVKKTEVQTGGFSKESILPKRNSDKLIARKKDWDPKKYGGFDSPTVAYSVLVVAKVEKGKSKKLKSVKELLGITIMERSSFEKNPIDFLEAKGYKEVKKDLIIKLPKYSLFELENGRKRMLASAGELQKGNELALPSKYVNFLYLASHYEKLKGSPEDNEQKQLFVEQHKHYLDEIIEQISEFSKRVILADANLDKVLSAYNKHRDKPIREQAENIIHLFTLTNLGAPAAFKYFDTTIDRKRYTSTKEVLDATLIHQSITGLYETRIDLSQLGGDGGGSSGSSGSSGSSGSSGGTLQLDDEYRLYSPLVKPDQNIQFWLEQFPQAWAETAGMGLAKQVPPQVIQLKASATPVSVRQYPLSKEAQEGIRPHVQRLIQQGILVPVQSPWNTPLLPVRKPGTNDYRPVQDLREVNKRVQDIHPTVPNPYNLLCALPPQRSWYTVLDLKDAFFCLRLHPTSQPLFAFEWRDPGTGRTGQLTWTRLPQGFKNSPTIFNEALHRDLANFRIQHPQVTLLQYVDDLLLAGATKQDCLEGTKALLLELSDLGYRASAKKAQICRREVTYLGYSLRDGQRWLTEARKKTVVQIPAPTTAKQVREFLGTAGFCRLWIPGFATLAAPLYPLTKPKGEFSWAPEHQKAFDAIKKALLSAPALALPDVTKPFTLYVDERKGVARGVLTQTLGPWRRPVAYLSKKLDPVASGWPVCLKAIAAVAILVKDADKLTLGQNITVIAPHALENIVRQPPDRWMTNARMTHYQSLLLTERVTFAPPAALNPATLLPEETDEPVTHDCHQLLIEETGVRKDLTDIPLTGEVLTWFTDGSSYVVEGKRMAGAAVVDGTRTIWASSLPEGTSAQKAELMALTQALRLAEGKSINIYTDSRYAFATAHVHGAIYKQRGWLTSAGREIKNKEEILSLLEALHLPKRLAIIHCPGHQKAKDPISRGNQMADRVAKQAAQGVNLLAGKRTADGSEFEKRTADGSEFESPKKKAKVE

SEQ ID NO: 119 - protein, 2090 aa, synthetic construct
MPAAKRVKLDGGDKKYSIGLDIGTNSVGWAVITDEYKVPSKKFKVLGNTDRHSIKKNLIGALLFDSGETAEATRLKRTARRRYTRRKNRICYLQEIFSNEMAKVDDSFFHRLEESFLVEEDKKHERHPIFGNIVDEVAYHEKYPTIYHLRKKLVDSTDKADLRLIYLALAHMIKFRGHFLIEGDLNPDNSDVDKLFIQLVQTYNQLFEENPINASGVDAKAILSARLSKSRRLENLIAQLPGEKKNGLFGNLIALSLGLTPNFKSNFDLAEDAKLQLSKDTYDDDLDNLLAQIGDQYADLFLAAKNLSDAILLSDILRVNTEITKAPLSASMIKRYDEHHQDLTLLKALVRQQLPEKYKEIFFDQSKNGYAGYIDGGASQEEFYKFIKPILEKMDGTEELLVKLNREDLLRKQRTFDNGSIPHQIHLGELHAILRRQEDFYPFLKDNREKIEKILTFRIPYYVGPLARGNSRFAWMTRKSEETITPWNFEEVVDKGASAQSFIERMTNFDKNLPNEKVLPKHSLLYEYFTVYNELTKVKYVTEGMRKPAFLSGEQKKAIVDLLFKTNRKVTVKQLKEDYFKKIECFDSVEISGVEDRFNASLGTYHDLLKIIKDKDFLDNEENEDILEDIVLTLTLFEDREMIEERLKTYAHLFDDKVMKQLKRRRYTGWGRLSRKLINGIRDKQSGKTILDFLKSDGFANRNFMQLIHDDSLTFKEDIQKAQVSGQGDSLHEHIANLAGSPAIKKGILQTVKVVDELVKVMGRHKPENIVIEMARENQTTQKGQKNSRERMKRIEEGIKELGSQILKEHPVENTQLQNEKLYLYYLQNGRDMYVDQELDINRLSDYDVDHIVPQSFLKDDSIDNKVLTRSDKARGKSDNVPSEEVVKKMKNYWRQLLNAKLITQRKFDNLTKAERGGLSELDKAGFIKRQLVETRQITKHVAQILDSRMNTKYDENDKLIREVKVITLKSKLVSDFRKDFQFYKVREINNYHHAHDAYLNAVVGTALIKKYPKLESEFVYGDYKVYDVRKMIAKSEQEIGKATAKYFFYSNIMNFFKTEITLANGEIRKRPLIETNGETGEIVWDKGRDFATVRKVLSMPQVNIVKKTEVQTGGFSKESILPKRNSDKLIARKKDWDPKKYGGFDSPTVAYSVLVVAKVEKGKSKKLKSVKELLGITIMERSSFEKNPIDFLEAKGYKEVKKDLIIKLPKYSLFELENGRKRMLASAGELQKGNELALPSKYVNFLYLASHYEKLKGSPEDNEQKQLFVEQHKHYLDEIIEQISEFSKRVILADANLDKVLSAYNKHRDKPIREQAENIIHLFTLTNLGAPAAFKYFDTTIDRKRYTSTKEVLDATLIHQSITGLYETRIDLSQLGGDGGEAAAKGSSGGSGGTLQLDDEYRLYSPLVKPDQNIQFWLEQFPQAWAETAGMGLAKQVPPQVIQLKASATPVSVRQYPLSKEAQEGIRPHVQRLIQQGILVPVQSPWNTPLLPVRKPGTNDYRPVQDLREVNKRVQDIHPTVPNPYNLLCALPPQRSWYTVLDLKDAFFCLRLHPTSQPLFAFEWRDPGTGRTGQLTWTRLPQGFKNSPTIFNEALHRDLANFRIQHPQVTLLQYVDDLLLAGATKQDCLEGTKALLLELSDLGYRASAKKAQICRREVTYLGYSLRDGQRWLTEARKKTVVQIPAPTTAKQVREFLGTAGFCRLWIPGFATLAAPLYPLTKPKGEFSWAPEHQKAFDAIKKALLSAPALALPDVTKPFTLYVDERKGVARGVLTQTLGPWRRPVAYLSKKLDPVASGWPVCLKAIAAVAILVKDADKLTLGQNITVIAPHALENIVRQPPDRWMTNARMTHYQSLLLTERVTFAPPAALNPATLLPEETDEPVTHDCHQLLIEETGVRKDLTDIPLTGEVLTWFTDGSSYVVEGKRMAGAAVVDGTRTIWASSLPEGTSAQKAELMALTQALRLAEGKSINIYTDSRYAFATAHVHGAIYKQRGWLTSAGREIKNKEEILSLLEALHLPKRLAIIHCPGHQKAKDPISRGNQMADRVAKQAAQGVNLLAGKRTADGSEFEKRTADGSEFESPKKKAKVE

SEQ ID NO: 120 - protein, 2082 aa, synthetic construct
MPAAKRVKLDGGDKKYSIGLDIGTNSVGWAVITDEYKVPSKKFKVLGNTDRHSIKKNLIGALLFDSGETAEATRLKRTARRRYTRRKNRICYLQEIFSNEMAKVDDSFFHRLEESFLVEEDKKHERHPIFGNIVDEVAYHEKYPTIYHLRKKLVDSTDKADLRLIYLALAHMIKFRGHFLIEGDLNPDNSDVDKLFIQLVQTYNQLFEENPINASGVDAKAILSARLSKSRRLENLIAQLPGEKKNGLFGNLIALSLGLTPNFKSNFDLAEDAKLQLSKDTYDDDLDNLLAQIGDQYADLFLAAKNLSDAILLSDILRVNTEITKAPLSASMIKRYDEHHQDLTLLKALVRQQLPEKYKEIFFDQSKNGYAGYIDGGASQEEFYKFIKPILEKMDGTEELLVKLNREDLLRKQRTFDNGSIPHQIHLGELHAILRRQEDFYPFLKDNREKIEKILTFRIPYYVGPLARGNSRFAWMTRKSEETITPWNFEEVVDKGASAQSFIERMTNFDKNLPNEKVLPKHSLLYEYFTVYNELTKVKYVTEGMRKPAFLSGEQKKAIVDLLFKTNRKVTVKQLKEDYFKKIECFDSVEISGVEDRFNASLGTYHDLLKIIKDKDFLDNEENEDILEDIVLTLTLFEDREMIEERLKTYAHLFDDKVMKQLKRRRYTGWGRLSRKLINGIRDKQSGKTILDFLKSDGFANRNFMQLIHDDSLTFKEDIQKAQVSGQGDSLHEHIANLAGSPAIKKGILQTVKVVDELVKVMGRHKPENIVIEMARENQTTQKGQKNSRERMKRIEEGIKELGSQILKEHPVENTQLQNEKLYLYYLQNGRDMYVDQELDINRLSDYDVDHIVPQSFLKDDSIDNKVLTRSDKARGKSDNVPSEEVVKKMKNYWRQLLNAKLITQRKFDNLTKAERGGLSELDKAGFIKRQLVETRQITKHVAQILDSRMNTKYDENDKLIREVKVITLKSKLVSDFRKDFQFYKVREINNYHHAHDAYLNAVVGTALIKKYPKLESEFVYGDYKVYDVRKMIAKSEQEIGKATAKYFFYSNIMNFFKTEITLANGEIRKRPLIETNGETGEIVWDKGRDFATVRKVLSMPQVNIVKKTEVQTGGFSKESILPKRNSDKLIARKKDWDPKKYGGFDSPTVAYSVLVVAKVEKGKSKKLKSVKELLGITIMERSSFEKNPIDFLEAKGYKEVKKDLIIKLPKYSLFELENGRKRMLASAGELQKGNELALPSKYVNFLYLASHYEKLKGSPEDNEQKQLFVEQHKHYLDEIIEQISEFSKRVILADANLDKVLSAYNKHRDKPIREQAENIIHLFTLTNLGAPAAFKYFDTTIDRKRYTSTKEVLDATLIHQSITGLYETRIDLSQLGGDGGGSSGGTLQLDDEYRLYSPLVKPDQNIQFWLEQFPQAWAETAGMGLAKQVPPQVIQLKASATPVSVRQYPLSKEAQEGIRPHVQRLIQQGILVPVQSPWNTPLLPVRKPGTNDYRPVQDLREVNKRVQDIHPTVPNPYNLLCALPPQRSWYTVLDLKDAFFCLRLHPTSQPLFAFEWRDPGTGRTGQLTWTRLPQGFKNSPTIFNEALHRDLANFRIQHPQVTLLQYVDDLLLAGATKQDCLEGTKALLLELSDLGYRASAKKAQICRREVTYLGYSLRDGQRWLTEARKKTVVQIPAPTTAKQVREFLGTAGFCRLWIPGFATLAAPLYPLTKPKGEFSWAPEHQKAFDAIKKALLSAPALALPDVTKPFTLYVDERKGVARGVLTQTLGPWRRPVAYLSKKLDPVASGWPVCLKAIAAVAILVKDADKLTLGQNITVIAPHALENIVRQPPDRWMTNARMTHYQSLLLTERVTFAPPAALNPATLLPEETDEPVTHDCHQLLIEETGVRKDLTDIPLTGEVLTWFTDGSSYVVEGKRMAGAAVVDGTRTIWASSLPEGTSAQKAELMALTQALRLAEGKSINIYTDSRYAFATAHVHGAIYKQRGWLTSAGREIKNKEEILSLLEALHLPKRLAIIHCPGHQKAKDPISRGNQMADRVAKQAAQGVNLLAGKRTADGSEFEKRTADGSEFESPKKKAKVE

SEQ ID NO: 121 - protein, 2090 aa, synthetic construct
MPAAKRVKLDGGDKKYSIGLDIGTNSVGWAVITDEYKVPSKKFKVLGNTDRHSIKKNLIGALLFDSGETAEATRLKRTARRRYTRRKNRICYLQEIFSNEMAKVDDSFFHRLEESFLVEEDKKHERHPIFGNIVDEVAYHEKYPTIYHLRKKLVDSTDKADLRLIYLALAHMIKFRGHFLIEGDLNPDNSDVDKLFIQLVQTYNQLFEENPINASGVDAKAILSARLSKSRRLENLIAQLPGEKKNGLFGNLIALSLGLTPNFKSNFDLAEDAKLQLSKDTYDDDLDNLLAQIGDQYADLFLAAKNLSDAILLSDILRVNTEITKAPLSASMIKRYDEHHQDLTLLKALVRQQLPEKYKEIFFDQSKNGYAGYIDGGASQEEFYKFIKPILEKMDGTEELLVKLNREDLLRKQRTFDNGSIPHQIHLGELHAILRRQEDFYPFLKDNREKIEKILTFRIPYYVGPLARGNSRFAWMTRKSEETITPWNFEEVVDKGASAQSFIERMTNFDKNLPNEKVLPKHSLLYEYFTVYNELTKVKYVTEGMRKPAFLSGEQKKAIVDLLFKTNRKVTVKQLKEDYFKKIECFDSVEISGVEDRFNASLGTYHDLLKIIKDKDFLDNEENEDILEDIVLTLTLFEDREMIEERLKTYAHLFDDKVMKQLKRRRYTGWGRLSRKLINGIRDKQSGKTILDFLKSDGFANRNFMQLIHDDSLTFKEDIQKAQVSGQGDSLHEHIANLAGSPAIKKGILQTVKVVDELVKVMGRHKPENIVIEMARENQTTQKGQKNSRERMKRIEEGIKELGSQILKEHPVENTQLQNEKLYLYYLQNGRDMYVDQELDINRLSDYDVDHIVPQSFLKDDSIDNKVLTRSDKARGKSDNVPSEEVVKKMKNYWRQLLNAKLITQRKFDNLTKAERGGLSELDKAGFIKRQLVETRQITKHVAQILDSRMNTKYDENDKLIREVKVITLKSKLVSDFRKDFQFYKVREINNYHHAHDAYLNAVVGTALIKKYPKLESEFVYGDYKVYDVRKMIAKSEQEIGKATAKYFFYSNIMNFFKTEITLANGEIRKRPLIETNGETGEIVWDKGRDFATVRKVLSMPQVNIVKKTEVQTGGFSKESILPKRNSDKLIARKKDWDPKKYGGFDSPTVAYSVLVVAKVEKGKSKKLKSVKELLGITIMERSSFEKNPIDFLEAKGYKEVKKDLIIKLPKYSLFELENGRKRMLASAGELQKGNELALPSKYVNFLYLASHYEKLKGSPEDNEQKQLFVEQHKHYLDEIIEQISEFSKRVILADANLDKVLSAYNKHRDKPIREQAENIIHLFTLTNLGAPAAFKYFDTTIDRKRYTSTKEVLDATLIHQSITGLYETRIDLSQLGGDGGGGGGSSEAAAKGGTLQLDDEYRLYSPLVKPDQNIQFWLEQFPQAWAETAGMGLAKQVPPQVIQLKASATPVSVRQYPLSKEAQEGIRPHVQRLIQQGILVPVQSPWNTPLLPVRKPGTNDYRPVQDLREVNKRVQDIHPTVPNPYNLLCALPPQRSWYTVLDLKDAFFCLRLHPTSQPLFAFEWRDPGTGRTGQLTWTRLPQGFKNSPTIFNEALHRDLANFRIQHPQVTLLQYVDDLLLAGATKQDCLEGTKALLLELSDLGYRASAKKAQICRREVTYLGYSLRDGQRWLTEARKKTVVQIPAPTTAKQVREFLGTAGFCRLWIPGFATLAAPLYPLTKPKGEFSWAPEHQKAFDAIKKALLSAPALALPDVTKPFTLYVDERKGVARGVLTQTLGPWRRPVAYLSKKLDPVASGWPVCLKAIAAVAILVKDADKLTLGQNITVIAPHALENIVRQPPDRWMTNARMTHYQSLLLTERVTFAPPAALNPATLLPEETDEPVTHDCHQLLIEETGVRKDLTDIPLTGEVLTWFTDGSSYVVEGKRMAGAAVVDGTRTIWASSLPEGTSAQKAELMALTQALRLAEGKSINIYTDSRYAFATAHVHGAIYKQRGWLTSAGREIKNKEEILSLLEALHLPKRLAIIHCPGHQKAKDPISRGNQMADRVAKQAAQGVNLLAGKRTADGSEFEKRTADGSEFESPKKKAKVE

SEQ ID NO: 122 - protein, 2095 aa, synthetic construct
MPAAKRVKLDGGDKKYSIGLDIGTNSVGWAVITDEYKVPSKKFKVLGNTDRHSIKKNLIGALLFDSGETAEATRLKRTARRRYTRRKNRICYLQEIFSNEMAKVDDSFFHRLEESFLVEEDKKHERHPIFGNIVDEVAYHEKYPTIYHLRKKLVDSTDKADLRLIYLALAHMIKFRGHFLIEGDLNPDNSDVDKLFIQLVQTYNQLFEENPINASGVDAKAILSARLSKSRRLENLIAQLPGEKKNGLFGNLIALSLGLTPNFKSNFDLAEDAKLQLSKDTYDDDLDNLLAQIGDQYADLFLAAKNLSDAILLSDILRVNTEITKAPLSASMIKRYDEHHQDLTLLKALVRQQLPEKYKEIFFDQSKNGYAGYIDGGASQEEFYKFIKPILEKMDGTEELLVKLNREDLLRKQRTFDNGSIPHQIHLGELHAILRRQEDFYPFLKDNREKIEKILTFRIPYYVGPLARGNSRFAWMTRKSEETITPWNFEEVVDKGASAQSFIERMTNFDKNLPNEKVLPKHSLLYEYFTVYNELTKVKYVTEGMRKPAFLSGEQKKAIVDLLFKTNRKVTVKQLKEDYFKKIECFDSVEISGVEDRFNASLGTYHDLLKIIKDKDFLDNEENEDILEDIVLTLTLFEDREMIEERLKTYAHLFDDKVMKQLKRRRYTGWGRLSRKLINGIRDKQSGKTILDFLKSDGFANRNFMQLIHDDSLTFKEDIQKAQVSGQGDSLHEHIANLAGSPAIKKGILQTVKVVDELVKVMGRHKPENIVIEMARENQTTQKGQKNSRERMKRIEEGIKELGSQILKEHPVENTQLQNEKLYLYYLQNGRDMYVDQELDINRLSDYDVDHIVPQSFLKDDSIDNKVLTRSDKARGKSDNVPSEEVVKKMKNYWRQLLNAKLITQRKFDNLTKAERGGLSELDKAGFIKRQLVETRQITKHVAQILDSRMNTKYDENDKLIREVKVITLKSKLVSDFRKDFQFYKVREINNYHHAHDAYLNAVVGTALIKKYPKLESEFVYGDYKVYDVRKMIAKSEQEIGKATAKYFFYSNIMNFFKTEITLANGEIRKRPLIETNGETGEIVWDKGRDFATVRKVLSMPQVNIVKKTEVQTGGFSKESILPKRNSDKLIARKKDWDPKKYGGFDSPTVAYSVLVVAKVEKGKSKKLKSVKELLGITIMERSSFEKNPIDFLEAKGYKEVKKDLIIKLPKYSLFELENGRKRMLASAGELQKGNELALPSKYVNFLYLASHYEKLKGSPEDNEQKQLFVEQHKHYLDEIIEQISEFSKRVILADANLDKVLSAYNKHRDKPIREQAENIIHLFTLTNLGAPAAFKYFDTTIDRKRYTSTKEVLDATLIHQSITGLYETRIDLSQLGGDGGSGSETPGTSESATPESGGTLQLDDEYRLYSPLVKPDQNIQFWLEQFPQAWAETAGMGLAKQVPPQVIQLKASATPVSVRQYPLSKEAQEGIRPHVQRLIQQGILVPVQSPWNTPLLPVRKPGTNDYRPVQDLREVNKRVQDIHPTVPNPYNLLCALPPQRSWYTVLDLKDAFFCLRLHPTSQPLFAFEWRDPGTGRTGQLTWTRLPQGFKNSPTIFNEALHRDLANFRIQHPQVTLLQYVDDLLLAGATKQDCLEGTKALLLELSDLGYRASAKKAQICRREVTYLGYSLRDGQRWLTEARKKTVVQIPAPTTAKQVREFLGTAGFCRLWIPGFATLAAPLYPLTKPKGEFSWAPEHQKAFDAIKKALLSAPALALPDVTKPFTLYVDERKGVARGVLTQTLGPWRRPVAYLSKKLDPVASGWPVCLKAIAAVAILVKDADKLTLGQNITVIAPHALENIVRQPPDRWMTNARMTHYQSLLLTERVTFAPPAALNPATLLPEETDEPVTHDCHQLLIEETGVRKDLTDIPLTGEVLTWFTDGSSYVVEGKRMAGAAVVDGTRTIWASSLPEGTSAQKAELMALTQALRLAEGKSINIYTDSRYAFATAHVHGAIYKQRGWLTSAGREIKNKEEILSLLEALHLPKRLAIIHCPGHQKAKDPISRGNQMADRVAKQAAQGVNLLAGKRTADGSEFEKRTADGSEFESPKKKAKVE

SEQ ID NO: 123 - protein, 2085 aa, synthetic construct
MPAAKRVKLDGGDKKYSIGLDIGTNSVGWAVITDEYKVPSKKFKVLGNTDRHSIKKNLIGALLFDSGETAEATRLKRTARRRYTRRKNRICYLQEIFSNEMAKVDDSFFHRLEESFLVEEDKKHERHPIFGNIVDEVAYHEKYPTIYHLRKKLVDSTDKADLRLIYLALAHMIKFRGHFLIEGDLNPDNSDVDKLFIQLVQTYNQLFEENPINASGVDAKAILSARLSKSRRLENLIAQLPGEKKNGLFGNLIALSLGLTPNFKSNFDLAEDAKLQLSKDTYDDDLDNLLAQIGDQYADLFLAAKNLSDAILLSDILRVNTEITKAPLSASMIKRYDEHHQDLTLLKALVRQQLPEKYKEIFFDQSKNGYAGYIDGGASQEEFYKFIKPILEKMDGTEELLVKLNREDLLRKQRTFDNGSIPHQIHLGELHAILRRQEDFYPFLKDNREKIEKILTFRIPYYVGPLARGNSRFAWMTRKSEETITPWNFEEVVDKGASAQSFIERMTNFDKNLPNEKVLPKHSLLYEYFTVYNELTKVKYVTEGMRKPAFLSGEQKKAIVDLLFKTNRKVTVKQLKEDYFKKIECFDSVEISGVEDRFNASLGTYHDLLKIIKDKDFLDNEENEDILEDIVLTLTLFEDREMIEERLKTYAHLFDDKVMKQLKRRRYTGWGRLSRKLINGIRDKQSGKTILDFLKSDGFANRNFMQLIHDDSLTFKEDIQKAQVSGQGDSLHEHIANLAGSPAIKKGILQTVKVVDELVKVMGRHKPENIVIEMARENQTTQKGQKNSRERMKRIEEGIKELGSQILKEHPVENTQLQNEKLYLYYLQNGRDMYVDQELDINRLSDYDVDHIVPQSFLKDDSIDNKVLTRSDKARGKSDNVPSEEVVKKMKNYWRQLLNAKLITQRKFDNLTKAERGGLSELDKAGFIKRQLVETRQITKHVAQILDSRMNTKYDENDKLIREVKVITLKSKLVSDFRKDFQFYKVREINNYHHAHDAYLNAVVGTALIKKYPKLESEFVYGDYKVYDVRKMIAKSEQEIGKATAKYFFYSNIMNFFKTEITLANGEIRKRPLIETNGETGEIVWDKGRDFATVRKVLSMPQVNIVKKTEVQTGGFSKESILPKRNSDKLIARKKDWDPKKYGGFDSPTVAYSVLVVAKVEKGKSKKLKSVKELLGITIMERSSFEKNPIDFLEAKGYKEVKKDLIIKLPKYSLFELENGRKRMLASAGELQKGNELALPSKYVNFLYLASHYEKLKGSPEDNEQKQLFVEQHKHYLDEIIEQISEFSKRVILADANLDKVLSAYNKHRDKPIREQAENIIHLFTLTNLGAPAAFKYFDTTIDRKRYTSTKEVLDATLIHQSITGLYETRIDLSQLGGDGGPAPGSSGGTLQLDDEYRLYSPLVKPDQNIQFWLEQFPQAWAETAGMGLAKQVPPQVIQLKASATPVSVRQYPLSKEAQEGIRPHVQRLIQQGILVPVQSPWNTPLLPVRKPGTNDYRPVQDLREVNKRVQDIHPTVPNPYNLLCALPPQRSWYTVLDLKDAFFCLRLHPTSQPLFAFEWRDPGTGRTGQLTWTRLPQGFKNSPTIFNEALHRDLANFRIQHPQVTLLQYVDDLLLAGATKQDCLEGTKALLLELSDLGYRASAKKAQICRREVTYLGYSLRDGQRWLTEARKKTVVQIPAPTTAKQVREFLGTAGFCRLWIPGFATLAAPLYPLTKPKGEFSWAPEHQKAFDAIKKALLSAPALALPDVTKPFTLYVDERKGVARGVLTQTLGPWRRPVAYLSKKLDPVASGWPVCLKAIAAVAILVKDADKLTLGQNITVIAPHALENIVRQPPDRWMTNARMTHYQSLLLTERVTFAPPAALNPATLLPEETDEPVTHDCHQLLIEETGVRKDLTDIPLTGEVLTWFTDGSSYVVEGKRMAGAAVVDGTRTIWASSLPEGTSAQKAELMALTQALRLAEGKSINIYTDSRYAFATAHVHGAIYKQRGWLTSAGREIKNKEEILSLLEALHLPKRLAIIHCPGHQKAKDPISRGNQMADRVAKQAAQGVNLLAGKRTADGSEFEKRTADGSEFESPKKKAKVE

SEQ ID NO: 124 - protein, 2090 aa, synthetic construct
MPAAKRVKLDGGDKKYSIGLDIGTNSVGWAVITDEYKVPSKKFKVLGNTDRHSIKKNLIGALLFDSGETAEATRLKRTARRRYTRRKNRICYLQEIFSNEMAKVDDSFFHRLEESFLVEEDKKHERHPIFGNIVDEVAYHEKYPTIYHLRKKLVDSTDKADLRLIYLALAHMIKFRGHFLIEGDLNPDNSDVDKLFIQLVQTYNQLFEENPINASGVDAKAILSARLSKSRRLENLIAQLPGEKKNGLFGNLIALSLGLTPNFKSNFDLAEDAKLQLSKDTYDDDLDNLLAQIGDQYADLFLAAKNLSDAILLSDILRVNTEITKAPLSASMIKRYDEHHQDLTLLKALVRQQLPEKYKEIFFDQSKNGYAGYIDGGASQEEFYKFIKPILEKMDGTEELLVKLNREDLLRKQRTFDNGSIPHQIHLGELHAILRRQEDFYPFLKDNREKIEKILTFRIPYYVGPLARGNSRFAWMTRKSEETITPWNFEEVVDKGASAQSFIERMTNFDKNLPNEKVLPKHSLLYEYFTVYNELTKVKYVTEGMRKPAFLSGEQKKAIVDLLFKTNRKVTVKQLKEDYFKKIECFDSVEISGVEDRFNASLGTYHDLLKIIKDKDFLDNEENEDILEDIVLTLTLFEDREMIEERLKTYAHLFDDKVMKQLKRRRYTGWGRLSRKLINGIRDKQSGKTILDFLKSDGFANRNFMQLIHDDSLTFKEDIQKAQVSGQGDSLHEHIANLAGSPAIKKGILQTVKVVDELVKVMGRHKPENIVIEMARENQTTQKGQKNSRERMKRIEEGIKELGSQILKEHPVENTQLQNEKLYLYYLQNGRDMYVDQELDINRLSDYDVDHIVPQSFLKDDSIDNKVLTRSDKARGKSDNVPSEEVVKKMKNYWRQLLNAKLITQRKFDNLTKAERGGLSELDKAGFIKRQLVETRQITKHVAQILDSRMNTKYDENDKLIREVKVITLKSKLVSDFRKDFQFYKVREINNYHHAHDAYLNAVVGTALIKKYPKLESEFVYGDYKVYDVRKMIAKSEQEIGKATAKYFFYSNIMNFFKTEITLANGEIRKRPLIETNGETGEIVWDKGRDFATVRKVLSMPQVNIVKKTEVQTGGFSKESILPKRNSDKLIARKKDWDPKKYGGFDSPTVAYSVLVVAKVEKGKSKKLKSVKELLGITIMERSSFEKNPIDFLEAKGYKEVKKDLIIKLPKYSLFELENGRKRMLASAGELQKGNELALPSKYVNFLYLASHYEKLKGSPEDNEQKQLFVEQHKHYLDEIIEQISEFSKRVILADANLDKVLSAYNKHRDKPIREQAENIIHLFTLTNLGAPAAFKYFDTTIDRKRYTSTKEVLDATLIHQSITGLYETRIDLSQLGGDGGPAPEAAAKGGGGGTLQLDDEYRLYSPLVKPDQNIQFWLEQFPQAWAETAGMGLAKQVPPQVIQLKASATPVSVRQYPLSKEAQEGIRPHVQRLIQQGILVPVQSPWNTPLLPVRKPGTNDYRPVQDLREVNKRVQDIHPTVPNPYNLLCALPPQRSWYTVLDLKDAFFCLRLHPTSQPLFAFEWRDPGTGRTGQLTWTRLPQGFKNSPTIFNEALHRDLANFRIQHPQVTLLQYVDDLLLAGATKQDCLEGTKALLLELSDLGYRASAKKAQICRREVTYLGYSLRDGQRWLTEARKKTVVQIPAPTTAKQVREFLGTAGFCRLWIPGFATLAAPLYPLTKPKGEFSWAPEHQKAFDAIKKALLSAPALALPDVTKPFTLYVDERKGVARGVLTQTLGPWRRPVAYLSKKLDPVASGWPVCLKAIAAVAILVKDADKLTLGQNITVIAPHALENIVRQPPDRWMTNARMTHYQSLLLTERVTFAPPAALNPATLLPEETDEPVTHDCHQLLIEETGVRKDLTDIPLTGEVLTWFTDGSSYVVEGKRMAGAAVVDGTRTIWASSLPEGTSAQKAELMALTQALRLAEGKSINIYTDSRYAFATAHVHGAIYKQRGWLTSAGREIKNKEEILSLLEALHLPKRLAIIHCPGHQKAKDPISRGNQMADRVAKQAAQGVNLLAGKRTADGSEFEKRTADGSEFESPKKKAKVE

SEQ ID NO: 125 - protein, 2085 aa, synthetic construct
MPAAKRVKLDGGDKKYSIGLDIGTNSVGWAVITDEYKVPSKKFKVLGNTDRHSIKKNLIGALLFDSGETAEATRLKRTARRRYTRRKNRICYLQEIFSNEMAKVDDSFFHRLEESFLVEEDKKHERHPIFGNIVDEVAYHEKYPTIYHLRKKLVDSTDKADLRLIYLALAHMIKFRGHFLIEGDLNPDNSDVDKLFIQLVQTYNQLFEENPINASGVDAKAILSARLSKSRRLENLIAQLPGEKKNGLFGNLIALSLGLTPNFKSNFDLAEDAKLQLSKDTYDDDLDNLLAQIGDQYADLFLAAKNLSDAILLSDILRVNTEITKAPLSASMIKRYDEHHQDLTLLKALVRQQLPEKYKEIFFDQSKNGYAGYIDGGASQEEFYKFIKPILEKMDGTEELLVKLNREDLLRKQRTFDNGSIPHQIHLGELHAILRRQEDFYPFLKDNREKIEKILTFRIPYYVGPLARGNSRFAWMTRKSEETITPWNFEEVVDKGASAQSFIERMTNFDKNLPNEKVLPKHSLLYEYFTVYNELTKVKYVTEGMRKPAFLSGEQKKAIVDLLFKTNRKVTVKQLKEDYFKKIECFDSVEISGVEDRFNASLGTYHDLLKIIKDKDFLDNEENEDILEDIVLTLTLFEDREMIEERLKTYAHLFDDKVMKQLKRRRYTGWGRLSRKLINGIRDKQSGKTILDFLKSDGFANRNFMQLIHDDSLTFKEDIQKAQVSGQGDSLHEHIANLAGSPAIKKGILQTVKVVDELVKVMGRHKPENIVIEMARENQTTQKGQKNSRERMKRIEEGIKELGSQILKEHPVENTQLQNEKLYLYYLQNGRDMYVDQELDINRLSDYDVDHIVPQSFLKDDSIDNKVLTRSDKARGKSDNVPSEEVVKKMKNYWRQLLNAKLITQRKFDNLTKAERGGLSELDKAGFIKRQLVETRQITKHVAQILDSRMNTKYDENDKLIREVKVITLKSKLVSDFRKDFQFYKVREINNYHHAHDAYLNAVVGTALIKKYPKLESEFVYGDYKVYDVRKMIAKSEQEIGKATAKYFFYSNIMNFFKTEITLANGEIRKRPLIETNGETGEIVWDKGRDFATVRKVLSMPQVNIVKKTEVQTGGFSKESILPKRNSDKLIARKKDWDPKKYGGFDSPTVAYSVLVVAKVEKGKSKKLKSVKELLGITIMERSSFEKNPIDFLEAKGYKEVKKDLIIKLPKYSLFELENGRKRMLASAGELQKGNELALPSKYVNFLYLASHYEKLKGSPEDNEQKQLFVEQHKHYLDEIIEQISEFSKRVILADANLDKVLSAYNKHRDKPIREQAENIIHLFTLTNLGAPAAFKYFDTTIDRKRYTSTKEVLDATLIHQSITGLYETRIDLSQLGGDGGPAPGGSGGTLQLDDEYRLYSPLVKPDQNIQFWLEQFPQAWAETAGMGLAKQVPPQVIQLKASATPVSVRQYPLSKEAQEGIRPHVQRLIQQGILVPVQSPWNTPLLPVRKPGTNDYRPVQDLREVNKRVQDIHPTVPNPYNLLCALPPQRSWYTVLDLKDAFFCLRLHPTSQPLFAFEWRDPGTGRTGQLTWTRLPQGFKNSPTIFNEALHRDLANFRIQHPQVTLLQYVDDLLLAGATKQDCLEGTKALLLELSDLGYRASAKKAQICRREVTYLGYSLRDGQRWLTEARKKTVVQIPAPTTAKQVREFLGTAGFCRLWIPGFATLAAPLYPLTKPKGEFSWAPEHQKAFDAIKKALLSAPALALPDVTKPFTLYVDERKGVARGVLTQTLGPWRRPVAYLSKKLDPVASGWPVCLKAIAAVAILVKDADKLTLGQNITVIAPHALENIVRQPPDRWMTNARMTHYQSLLLTERVTFAPPAALNPATLLPEETDEPVTHDCHQLLIEETGVRKDLTDIPLTGEVLTWFTDGSSYVVEGKRMAGAAVVDGTRTIWASSLPEGTSAQKAELMALTQALRLAEGKSINIYTDSRYAFATAHVHGAIYKQRGWLTSAGREIKNKEEILSLLEALHLPKRLAIIHCPGHQKAKDPISRGNQMADRVAKQAAQGVNLLAGKRTADGSEFEKRTADGSEFESPKKKAKVE

SEQ ID NO: 126 - protein, 2087 aa, synthetic construct
MPAAKRVKLDGGDKKYSIGLDIGTNSVGWAVITDEYKVPSKKFKVLGNTDRHSIKKNLIGALLFDSGETAEATRLKRTARRRYTRRKNRICYLQEIFSNEMAKVDDSFFHRLEESFLVEEDKKHERHPIFGNIVDEVAYHEKYPTIYHLRKKLVDSTDKADLRLIYLALAHMIKFRGHFLIEGDLNPDNSDVDKLFIQLVQTYNQLFEENPINASGVDAKAILSARLSKSRRLENLIAQLPGEKKNGLFGNLIALSLGLTPNFKSNFDLAEDAKLQLSKDTYDDDLDNLLAQIGDQYADLFLAAKNLSDAILLSDILRVNTEITKAPLSASMIKRYDEHHQDLTLLKALVRQQLPEKYKEIFFDQSKNGYAGYIDGGASQEEFYKFIKPILEKMDGTEELLVKLNREDLLRKQRTFDNGSIPHQIHLGELHAILRRQEDFYPFLKDNREKIEKILTFRIPYYVGPLARGNSRFAWMTRKSEETITPWNFEEVVDKGASAQSFIERMTNFDKNLPNEKVLPKHSLLYEYFTVYNELTKVKYVTEGMRKPAFLSGEQKKAIVDLLFKTNRKVTVKQLKEDYFKKIECFDSVEISGVEDRFNASLGTYHDLLKIIKDKDFLDNEENEDILEDIVLTLTLFEDREMIEERLKTYAHLFDDKVMKQLKRRRYTGWGRLSRKLINGIRDKQSGKTILDFLKSDGFANRNFMQLIHDDSLTFKEDIQKAQVSGQGDSLHEHIANLAGSPAIKKGILQTVKVVDELVKVMGRHKPENIVIEMARENQTTQKGQKNSRERMKRIEEGIKELGSQILKEHPVENTQLQNEKLYLYYLQNGRDMYVDQELDINRLSDYDVDHIVPQSFLKDDSIDNKVLTRSDKARGKSDNVPSEEVVKKMKNYWRQLLNAKLITQRKFDNLTKAERGGLSELDKAGFIKRQLVETRQITKHVAQILDSRMNTKYDENDKLIREVKVITLKSKLVSDFRKDFQFYKVREINNYHHAHDAYLNAVVGTALIKKYPKLESEFVYGDYKVYDVRKMIAKSEQEIGKATAKYFFYSNIMNFFKTEITLANGEIRKRPLIETNGETGEIVWDKGRDFATVRKVLSMPQVNIVKKTEVQTGGFSKESILPKRNSDKLIARKKDWDPKKYGGFDSPTVAYSVLVVAKVEKGKSKKLKSVKELLGITIMERSSFEKNPIDFLEAKGYKEVKKDLIIKLPKYSLFELENGRKRMLASAGELQKGNELALPSKYVNFLYLASHYEKLKGSPEDNEQKQLFVEQHKHYLDEIIEQISEFSKRVILADANLDKVLSAYNKHRDKPIREQAENIIHLFTLTNLGAPAAFKYFDTTIDRKRYTSTKEVLDATLIHQSITGLYETRIDLSQLGGDGGEAAAKGGGGGTLQLDDEYRLYSPLVKPDQNIQFWLEQFPQAWAETAGMGLAKQVPPQVIQLKASATPVSVRQYPLSKEAQEGIRPHVQRLIQQGILVPVQSPWNTPLLPVRKPGTNDYRPVQDLREVNKRVQDIHPTVPNPYNLLCALPPQRSWYTVLDLKDAFFCLRLHPTSQPLFAFEWRDPGTGRTGQLTWTRLPQGFKNSPTIFNEALHRDLANFRIQHPQVTLLQYVDDLLLAGATKQDCLEGTKALLLELSDLGYRASAKKAQICRREVTYLGYSLRDGQRWLTEARKKTVVQIPAPTTAKQVREFLGTAGFCRLWIPGFATLAAPLYPLTKPKGEFSWAPEHQKAFDAIKKALLSAPALALPDVTKPFTLYVDERKGVARGVLTQTLGPWRRPVAYLSKKLDPVASGWPVCLKAIAAVAILVKDADKLTLGQNITVIAPHALENIVRQPPDRWMTNARMTHYQSLLLTERVTFAPPAALNPATLLPEETDEPVTHDCHQLLIEETGVRKDLTDIPLTGEVLTWFTDGSSYVVEGKRMAGAAVVDGTRTIWASSLPEGTSAQKAELMALTQALRLAEGKSINIYTDSRYAFATAHVHGAIYKQRGWLTSAGREIKNKEEILSLLEALHLPKRLAIIHCPGHQKAKDPISRGNQMADRVAKQAAQGVNLLAGKRTADGSEFEKRTADGSEFESPKKKAKVE

SEQ ID NO: 127 - protein, 2090 aa, synthetic construct
MPAAKRVKLDGGDKKYSIGLDIGTNSVGWAVITDEYKVPSKKFKVLGNTDRHSIKKNLIGALLFDSGETAEATRLKRTARRRYTRRKNRICYLQEIFSNEMAKVDDSFFHRLEESFLVEEDKKHERHPIFGNIVDEVAYHEKYPTIYHLRKKLVDSTDKADLRLIYLALAHMIKFRGHFLIEGDLNPDNSDVDKLFIQLVQTYNQLFEENPINASGVDAKAILSARLSKSRRLENLIAQLPGEKKNGLFGNLIALSLGLTPNFKSNFDLAEDAKLQLSKDTYDDDLDNLLAQIGDQYADLFLAAKNLSDAILLSDILRVNTEITKAPLSASMIKRYDEHHQDLTLLKALVRQQLPEKYKEIFFDQSKNGYAGYIDGGASQEEFYKFIKPILEKMDGTEELLVKLNREDLLRKQRTFDNGSIPHQIHLGELHAILRRQEDFYPFLKDNREKIEKILTFRIPYYVGPLARGNSRFAWMTRKSEETITPWNFEEVVDKGASAQSFIERMTNFDKNLPNEKVLPKHSLLYEYFTVYNELTKVKYVTEGMRKPAFLSGEQKKAIVDLLFKTNRKVTVKQLKEDYFKKIECFDSVEISGVEDRFNASLGTYHDLLKIIKDKDFLDNEENEDILEDIVLTLTLFEDREMIEERLKTYAHLFDDKVMKQLKRRRYTGWGRLSRKLINGIRDKQSGKTILDFLKSDGFANRNFMQLIHDDSLTFKEDIQKAQVSGQGDSLHEHIANLAGSPAIKKGILQTVKVVDELVKVMGRHKPENIVIEMARENQTTQKGQKNSRERMKRIEEGIKELGSQILKEHPVENTQLQNEKLYLYYLQNGRDMYVDQELDINRLSDYDVDHIVPQSFLKDDSIDNKVLTRSDKARGKSDNVPSEEVVKKMKNYWRQLLNAKLITQRKFDNLTKAERGGLSELDKAGFIKRQLVETRQITKHVAQILDSRMNTKYDENDKLIREVKVITLKSKLVSDFRKDFQFYKVREINNYHHAHDAYLNAVVGTALIKKYPKLESEFVYGDYKVYDVRKMIAKSEQEIGKATAKYFFYSNIMNFFKTEITLANGEIRKRPLIETNGETGEIVWDKGRDFATVRKVLSMPQVNIVKKTEVQTGGFSKESILPKRNSDKLIARKKDWDPKKYGGFDSPTVAYSVLVVAKVEKGKSKKLKSVKELLGITIMERSSFEKNPIDFLEAKGYKEVKKDLIIKLPKYSLFELENGRKRMLASAGELQKGNELALPSKYVNFLYLASHYEKLKGSPEDNEQKQLFVEQHKHYLDEIIEQISEFSKRVILADANLDKVLSAYNKHRDKPIREQAENIIHLFTLTNLGAPAAFKYFDTTIDRKRYTSTKEVLDATLIHQSITGLYETRIDLSQLGGDGGPAPGGGEAAAKGGTLQLDDEYRLYSPLVKPDQNIQFWLEQFPQAWAETAGMGLAKQVPPQVIQLKASATPVSVRQYPLSKEAQEGIRPHVQRLIQQGILVPVQSPWNTPLLPVRKPGTNDYRPVQDLREVNKRVQDIHPTVPNPYNLLCALPPQRSWYTVLDLKDAFFCLRLHPTSQPLFAFEWRDPGTGRTGQLTWTRLPQGFKNSPTIFNEALHRDLANFRIQHPQVTLLQYVDDLLLAGATKQDCLEGTKALLLELSDLGYRASAKKAQICRREVTYLGYSLRDGQRWLTEARKKTVVQIPAPTTAKQVREFLGTAGFCRLWIPGFATLAAPLYPLTKPKGEFSWAPEHQKAFDAIKKALLSAPALALPDVTKPFTLYVDERKGVARGVLTQTLGPWRRPVAYLSKKLDPVASGWPVCLKAIAAVAILVKDADKLTLGQNITVIAPHALENIVRQPPDRWMTNARMTHYQSLLLTERVTFAPPAALNPATLLPEETDEPVTHDCHQLLIEETGVRKDLTDIPLTGEVLTWFTDGSSYVVEGKRMAGAAVVDGTRTIWASSLPEGTSAQKAELMALTQALRLAEGKSINIYTDSRYAFATAHVHGAIYKQRGWLTSAGREIKNKEEILSLLEALHLPKRLAIIHCPGHQKAKDPISRGNQMADRVAKQAAQGVNLLAGKRTADGSEFEKRTADGSEFESPKKKAKVE

SEQ ID NO: 128 - protein, 2087 aa, synthetic construct
MPAAKRVKLDGGDKKYSIGLDIGTNSVGWAVITDEYKVPSKKFKVLGNTDRHSIKKNLIGALLFDSGETAEATRLKRTARRRYTRRKNRICYLQEIFSNEMAKVDDSFFHRLEESFLVEEDKKHERHPIFGNIVDEVAYHEKYPTIYHLRKKLVDSTDKADLRLIYLALAHMIKFRGHFLIEGDLNPDNSDVDKLFIQLVQTYNQLFEENPINASGVDAKAILSARLSKSRRLENLIAQLPGEKKNGLFGNLIALSLGLTPNFKSNFDLAEDAKLQLSKDTYDDDLDNLLAQIGDQYADLFLAAKNLSDAILLSDILRVNTEITKAPLSASMIKRYDEHHQDLTLLKALVRQQLPEKYKEIFFDQSKNGYAGYIDGGASQEEFYKFIKPILEKMDGTEELLVKLNREDLLRKQRTFDNGSIPHQIHLGELHAILRRQEDFYPFLKDNREKIEKILTFRIPYYVGPLARGNSRFAWMTRKSEETITPWNFEEVVDKGASAQSFIERMTNFDKNLPNEKVLPKHSLLYEYFTVYNELTKVKYVTEGMRKPAFLSGEQKKAIVDLLFKTNRKVTVKQLKEDYFKKIECFDSVEISGVEDRFNASLGTYHDLLKIIKDKDFLDNEENEDILEDIVLTLTLFEDREMIEERLKTYAHLFDDKVMKQLKRRRYTGWGRLSRKLINGIRDKQSGKTILDFLKSDGFANRNFMQLIHDDSLTFKEDIQKAQVSGQGDSLHEHIANLAGSPAIKKGILQTVKVVDELVKVMGRHKPENIVIEMARENQTTQKGQKNSRERMKRIEEGIKELGSQILKEHPVENTQLQNEKLYLYYLQNGRDMYVDQELDINRLSDYDVDHIVPQSFLKDDSIDNKVLTRSDKARGKSDNVPSEEVVKKMKNYWRQLLNAKLITQRKFDNLTKAERGGLSELDKAGFIKRQLVETRQITKHVAQILDSRMNTKYDENDKLIREVKVITLKSKLVSDFRKDFQFYKVREINNYHHAHDAYLNAVVGTALIKKYPKLESEFVYGDYKVYDVRKMIAKSEQEIGKATAKYFFYSNIMNFFKTEITLANGEIRKRPLIETNGETGEIVWDKGRDFATVRKVLSMPQVNIVKKTEVQTGGFSKESILPKRNSDKLIARKKDWDPKKYGGFDSPTVAYSVLVVAKVEKGKSKKLKSVKELLGITIMERSSFEKNPIDFLEAKGYKEVKKDLIIKLPKYSLFELENGRKRMLASAGELQKGNELALPSKYVNFLYLASHYEKLKGSPEDNEQKQLFVEQHKHYLDEIIEQISEFSKRVILADANLDKVLSAYNKHRDKPIREQAENIIHLFTLTNLGAPAAFKYFDTTIDRKRYTSTKEVLDATLIHQSITGLYETRIDLSQLGGDGGGSSEAAAKGGTLQLDDEYRLYSPLVKPDQNIQFWLEQFPQAWAETAGMGLAKQVPPQVIQLKASATPVSVRQYPLSKEAQEGIRPHVQRLIQQGILVPVQSPWNTPLLPVRKPGTNDYRPVQDLREVNKRVQDIHPTVPNPYNLLCALPPQRSWYTVLDLKDAFFCLRLHPTSQPLFAFEWRDPGTGRTGQLTWTRLPQGFKNSPTIFNEALHRDLANFRIQHPQVTLLQYVDDLLLAGATKQDCLEGTKALLLELSDLGYRASAKKAQICRREVTYLGYSLRDGQRWLTEARKKTVVQIPAPTTAKQVREFLGTAGFCRLWIPGFATLAAPLYPLTKPKGEFSWAPEHQKAFDAIKKALLSAPALALPDVTKPFTLYVDERKGVARGVLTQTLGPWRRPVAYLSKKLDPVASGWPVCLKAIAAVAILVKDADKLTLGQNITVIAPHALENIVRQPPDRWMTNARMTHYQSLLLTERVTFAPPAALNPATLLPEETDEPVTHDCHQLLIEETGVRKDLTDIPLTGEVLTWFTDGSSYVVEGKRMAGAAVVDGTRTIWASSLPEGTSAQKAELMALTQALRLAEGKSINIYTDSRYAFATAHVHGAIYKQRGWLTSAGREIKNKEEILSLLEALHLPKRLAIIHCPGHQKAKDPISRGNQMADRVAKQAAQGVNLLAGKRTADGSEFEKRTADGSEFESPKKKAKVE

SEQ ID NO: 129 - protein, 2088 aa, synthetic construct
MPAAKRVKLDGGDKKYSIGLDIGTNSVGWAVITDEYKVPSKKFKVLGNTDRHSIKKNLIGALLFDSGETAEATRLKRTARRRYTRRKNRICYLQEIFSNEMAKVDDSFFHRLEESFLVEEDKKHERHPIFGNIVDEVAYHEKYPTIYHLRKKLVDSTDKADLRLIYLALAHMIKFRGHFLIEGDLNPDNSDVDKLFIQLVQTYNQLFEENPINASGVDAKAILSARLSKSRRLENLIAQLPGEKKNGLFGNLIALSLGLTPNFKSNFDLAEDAKLQLSKDTYDDDLDNLLAQIGDQYADLFLAAKNLSDAILLSDILRVNTEITKAPLSASMIKRYDEHHQDLTLLKALVRQQLPEKYKEIFFDQSKNGYAGYIDGGASQEEFYKFIKPILEKMDGTEELLVKLNREDLLRKQRTFDNGSIPHQIHLGELHAILRRQEDFYPFLKDNREKIEKILTFRIPYYVGPLARGNSRFAWMTRKSEETITPWNFEEVVDKGASAQSFIERMTNFDKNLPNEKVLPKHSLLYEYFTVYNELTKVKYVTEGMRKPAFLSGEQKKAIVDLLFKTNRKVTVKQLKEDYFKKIECFDSVEISGVEDRFNASLGTYHDLLKIIKDKDFLDNEENEDILEDIVLTLTLFEDREMIEERLKTYAHLFDDKVMKQLKRRRYTGWGRLSRKLINGIRDKQSGKTILDFLKSDGFANRNFMQLIHDDSLTFKEDIQKAQVSGQGDSLHEHIANLAGSPAIKKGILQTVKVVDELVKVMGRHKPENIVIEMARENQTTQKGQKNSRERMKRIEEGIKELGSQILKEHPVENTQLQNEKLYLYYLQNGRDMYVDQELDINRLSDYDVDHIVPQSFLKDDSIDNKVLTRSDKARGKSDNVPSEEVVKKMKNYWRQLLNAKLITQRKFDNLTKAERGGLSELDKAGFIKRQLVETRQITKHVAQILDSRMNTKYDENDKLIREVKVITLKSKLVSDFRKDFQFYKVREINNYHHAHDAYLNAVVGTALIKKYPKLESEFVYGDYKVYDVRKMIAKSEQEIGKATAKYFFYSNIMNFFKTEITLANGEIRKRPLIETNGETGEIVWDKGRDFATVRKVLSMPQVNIVKKTEVQTGGFSKESILPKRNSDKLIARKKDWDPKKYGGFDSPTVAYSVLVVAKVEKGKSKKLKSVKELLGITIMERSSFEKNPIDFLEAKGYKEVKKDLIIKLPKYSLFELENGRKRMLASAGELQKGNELALPSKYVNFLYLASHYEKLKGSPEDNEQKQLFVEQHKHYLDEIIEQISEFSKRVILADANLDKVLSAYNKHRDKPIREQAENIIHLFTLTNLGAPAAFKYFDTTIDRKRYTSTKEVLDATLIHQSITGLYETRIDLSQLGGDGGPAPGSSGGGGGTLQLDDEYRLYSPLVKPDQNIQFWLEQFPQAWAETAGMGLAKQVPPQVIQLKASATPVSVRQYPLSKEAQEGIRPHVQRLIQQGILVPVQSPWNTPLLPVRKPGTNDYRPVQDLREVNKRVQDIHPTVPNPYNLLCALPPQRSWYTVLDLKDAFFCLRLHPTSQPLFAFEWRDPGTGRTGQLTWTRLPQGFKNSPTIFNEALHRDLANFRIQHPQVTLLQYVDDLLLAGATKQDCLEGTKALLLELSDLGYRASAKKAQICRREVTYLGYSLRDGQRWLTEARKKTVVQIPAPTTAKQVREFLGTAGFCRLWIPGFATLAAPLYPLTKPKGEFSWAPEHQKAFDAIKKALLSAPALALPDVTKPFTLYVDERKGVARGVLTQTLGPWRRPVAYLSKKLDPVASGWPVCLKAIAAVAILVKDADKLTLGQNITVIAPHALENIVRQPPDRWMTNARMTHYQSLLLTERVTFAPPAALNPATLLPEETDEPVTHDCHQLLIEETGVRKDLTDIPLTGEVLTWFTDGSSYVVEGKRMAGAAVVDGTRTIWASSLPEGTSAQKAELMALTQALRLAEGKSINIYTDSRYAFATAHVHGAIYKQRGWLTSAGREIKNKEEILSLLEALHLPKRLAIIHCPGHQKAKDPISRGNQMADRVAKQAAQGVNLLAGKRTADGSEFEKRTADGSEFESPKKKAKVE

SEQ ID NO: 130 - protein, 2088 aa, synthetic construct
MPAAKRVKLDGGDKKYSIGLDIGTNSVGWAVITDEYKVPSKKFKVLGNTDRHSIKKNLIGALLFDSGETAEATRLKRTARRRYTRRKNRICYLQEIFSNEMAKVDDSFFHRLEESFLVEEDKKHERHPIFGNIVDEVAYHEKYPTIYHLRKKLVDSTDKADLRLIYLALAHMIKFRGHFLIEGDLNPDNSDVDKLFIQLVQTYNQLFEENPINASGVDAKAILSARLSKSRRLENLIAQLPGEKKNGLFGNLIALSLGLTPNFKSNFDLAEDAKLQLSKDTYDDDLDNLLAQIGDQYADLFLAAKNLSDAILLSDILRVNTEITKAPLSASMIKRYDEHHQDLTLLKALVRQQLPEKYKEIFFDQSKNGYAGYIDGGASQEEFYKFIKPILEKMDGTEELLVKLNREDLLRKQRTFDNGSIPHQIHLGELHAILRRQEDFYPFLKDNREKIEKILTFRIPYYVGPLARGNSRFAWMTRKSEETITPWNFEEVVDKGASAQSFIERMTNFDKNLPNEKVLPKHSLLYEYFTVYNELTKVKYVTEGMRKPAFLSGEQKKAIVDLLFKTNRKVTVKQLKEDYFKKIECFDSVEISGVEDRFNASLGTYHDLLKIIKDKDFLDNEENEDILEDIVLTLTLFEDREMIEERLKTYAHLFDDKVMKQLKRRRYTGWGRLSRKLINGIRDKQSGKTILDFLKSDGFANRNFMQLIHDDSLTFKEDIQKAQVSGQGDSLHEHIANLAGSPAIKKGILQTVKVVDELVKVMGRHKPENIVIEMARENQTTQKGQKNSRERMKRIEEGIKELGSQILKEHPVENTQLQNEKLYLYYLQNGRDMYVDQELDINRLSDYDVDHIVPQSFLKDDSIDNKVLTRSDKARGKSDNVPSEEVVKKMKNYWRQLLNAKLITQRKFDNLTKAERGGLSELDKAGFIKRQLVETRQITKHVAQILDSRMNTKYDENDKLIREVKVITLKSKLVSDFRKDFQFYKVREINNYHHAHDAYLNAVVGTALIKKYPKLESEFVYGDYKVYDVRKMIAKSEQEIGKATAKYFFYSNIMNFFKTEITLANGEIRKRPLIETNGETGEIVWDKGRDFATVRKVLSMPQVNIVKKTEVQTGGFSKESILPKRNSDKLIARKKDWDPKKYGGFDSPTVAYSVLVVAKVEKGKSKKLKSVKELLGITIMERSSFEKNPIDFLEAKGYKEVKKDLIIKLPKYSLFELENGRKRMLASAGELQKGNELALPSKYVNFLYLASHYEKLKGSPEDNEQKQLFVEQHKHYLDEIIEQISEFSKRVILADANLDKVLSAYNKHRDKPIREQAENIIHLFTLTNLGAPAAFKYFDTTIDRKRYTSTKEVLDATLIHQSITGLYETRIDLSQLGGDGGGGSGGSGGSGGTLQLDDEYRLYSPLVKPDQNIQFWLEQFPQAWAETAGMGLAKQVPPQVIQLKASATPVSVRQYPLSKEAQEGIRPHVQRLIQQGILVPVQSPWNTPLLPVRKPGTNDYRPVQDLREVNKRVQDIHPTVPNPYNLLCALPPQRSWYTVLDLKDAFFCLRLHPTSQPLFAFEWRDPGTGRTGQLTWTRLPQGFKNSPTIFNEALHRDLANFRIQHPQVTLLQYVDDLLLAGATKQDCLEGTKALLLELSDLGYRASAKKAQICRREVTYLGYSLRDGQRWLTEARKKTVVQIPAPTTAKQVREFLGTAGFCRLWIPGFATLAAPLYPLTKPKGEFSWAPEHQKAFDAIKKALLSAPALALPDVTKPFTLYVDERKGVARGVLTQTLGPWRRPVAYLSKKLDPVASGWPVCLKAIAAVAILVKDADKLTLGQNITVIAPHALENIVRQPPDRWMTNARMTHYQSLLLTERVTFAPPAALNPATLLPEETDEPVTHDCHQLLIEETGVRKDLTDIPLTGEVLTWFTDGSSYVVEGKRMAGAAVVDGTRTIWASSLPEGTSAQKAELMALTQALRLAEGKSINIYTDSRYAFATAHVHGAIYKQRGWLTSAGREIKNKEEILSLLEALHLPKRLAIIHCPGHQKAKDPISRGNQMADRVAKQAAQGVNLLAGKRTADGSEFEKRTADGSEFESPKKKAKVE

SEQ ID NO: 131 - protein, 2088 aa, synthetic construct
MPAAKRVKLDGGDKKYSIGLDIGTNSVGWAVITDEYKVPSKKFKVLGNTDRHSIKKNLIGALLFDSGETAEATRLKRTARRRYTRRKNRICYLQEIFSNEMAKVDDSFFHRLEESFLVEEDKKHERHPIFGNIVDEVAYHEKYPTIYHLRKKLVDSTDKADLRLIYLALAHMIKFRGHFLIEGDLNPDNSDVDKLFIQLVQTYNQLFEENPINASGVDAKAILSARLSKSRRLENLIAQLPGEKKNGLFGNLIALSLGLTPNFKSNFDLAEDAKLQLSKDTYDDDLDNLLAQIGDQYADLFLAAKNLSDAILLSDILRVNTEITKAPLSASMIKRYDEHHQDLTLLKALVRQQLPEKYKEIFFDQSKNGYAGYIDGGASQEEFYKFIKPILEKMDGTEELLVKLNREDLLRKQRTFDNGSIPHQIHLGELHAILRRQEDFYPFLKDNREKIEKILTFRIPYYVGPLARGNSRFAWMTRKSEETITPWNFEEVVDKGASAQSFIERMTNFDKNLPNEKVLPKHSLLYEYFTVYNELTKVKYVTEGMRKPAFLSGEQKKAIVDLLFKTNRKVTVKQLKEDYFKKIECFDSVEISGVEDRFNASLGTYHDLLKIIKDKDFLDNEENEDILEDIVLTLTLFEDREMIEERLKTYAHLFDDKVMKQLKRRRYTGWGRLSRKLINGIRDKQSGKTILDFLKSDGFANRNFMQLIHDDSLTFKEDIQKAQVSGQGDSLHEHIANLAGSPAIKKGILQTVKVVDELVKVMGRHKPENIVIEMARENQTTQKGQKNSRERMKRIEEGIKELGSQILKEHPVENTQLQNEKLYLYYLQNGRDMYVDQELDINRLSDYDVDHIVPQSFLKDDSIDNKVLTRSDKARGKSDNVPSEEVVKKMKNYWRQLLNAKLITQRKFDNLTKAERGGLSELDKAGFIKRQLVETRQITKHVAQILDSRMNTKYDENDKLIREVKVITLKSKLVSDFRKDFQFYKVREINNYHHAHDAYLNAVVGTALIKKYPKLESEFVYGDYKVYDVRKMIAKSEQEIGKATAKYFFYSNIMNFFKTEITLANGEIRKRPLIETNGETGEIVWDKGRDFATVRKVLSMPQVNIVKKTEVQTGGFSKESILPKRNSDKLIARKKDWDPKKYGGFDSPTVAYSVLVVAKVEKGKSKKLKSVKELLGITIMERSSFEKNPIDFLEAKGYKEVKKDLIIKLPKYSLFELENGRKRMLASAGELQKGNELALPSKYVNFLYLASHYEKLKGSPEDNEQKQLFVEQHKHYLDEIIEQISEFSKRVILADANLDKVLSAYNKHRDKPIREQAENIIHLFTLTNLGAPAAFKYFDTTIDRKRYTSTKEVLDATLIHQSITGLYETRIDLSQLGGDGGGGSPAPGGGGGTLQLDDEYRLYSPLVKPDQNIQFWLEQFPQAWAETAGMGLAKQVPPQVIQLKASATPVSVRQYPLSKEAQEGIRPHVQRLIQQGILVPVQSPWNTPLLPVRKPGTNDYRPVQDLREVNKRVQDIHPTVPNPYNLLCALPPQRSWYTVLDLKDAFFCLRLHPTSQPLFAFEWRDPGTGRTGQLTWTRLPQGFKNSPTIFNEALHRDLANFRIQHPQVTLLQYVDDLLLAGATKQDCLEGTKALLLELSDLGYRASAKKAQICRREVTYLGYSLRDGQRWLTEARKKTVVQIPAPTTAKQVREFLGTAGFCRLWIPGFATLAAPLYPLTKPKGEFSWAPEHQKAFDAIKKALLSAPALALPDVTKPFTLYVDERKGVARGVLTQTLGPWRRPVAYLSKKLDPVASGWPVCLKAIAAVAILVKDADKLTLGQNITVIAPHALENIVRQPPDRWMTNARMTHYQSLLLTERVTFAPPAALNPATLLPEETDEPVTHDCHQLLIEETGVRKDLTDIPLTGEVLTWFTDGSSYVVEGKRMAGAAVVDGTRTIWASSLPEGTSAQKAELMALTQALRLAEGKSINIYTDSRYAFATAHVHGAIYKQRGWLTSAGREIKNKEEILSLLEALHLPKRLAIIHCPGHQKAKDPISRGNQMADRVAKQAAQGVNLLAGKRTADGSEFEKRTADGSEFESPKKKAKVE

SEQ ID NO: 132 - protein, 2090 aa, synthetic construct
MPAAKRVKLDGGDKKYSIGLDIGTNSVGWAVITDEYKVPSKKFKVLGNTDRHSIKKNLIGALLFDSGETAEATRLKRTARRRYTRRKNRICYLQEIFSNEMAKVDDSFFHRLEESFLVEEDKKHERHPIFGNIVDEVAYHEKYPTIYHLRKKLVDSTDKADLRLIYLALAHMIKFRGHFLIEGDLNPDNSDVDKLFIQLVQTYNQLFEENPINASGVDAKAILSARLSKSRRLENLIAQLPGEKKNGLFGNLIALSLGLTPNFKSNFDLAEDAKLQLSKDTYDDDLDNLLAQIGDQYADLFLAAKNLSDAILLSDILRVNTEITKAPLSASMIKRYDEHHQDLTLLKALVRQQLPEKYKEIFFDQSKNGYAGYIDGGASQEEFYKFIKPILEKMDGTEELLVKLNREDLLRKQRTFDNGSIPHQIHLGELHAILRRQEDFYPFLKDNREKIEKILTFRIPYYVGPLARGNSRFAWMTRKSEETITPWNFEEVVDKGASAQSFIERMTNFDKNLPNEKVLPKHSLLYEYFTVYNELTKVKYVTEGMRKPAFLSGEQKKAIVDLLFKTNRKVTVKQLKEDYFKKIECFDSVEISGVEDRFNASLGTYHDLLKIIKDKDFLDNEENEDILEDIVLTLTLFEDREMIEERLKTYAHLFDDKVMKQLKRRRYTGWGRLSRKLINGIRDKQSGKTILDFLKSDGFANRNFMQLIHDDSLTFKEDIQKAQVSGQGDSLHEHIANLAGSPAIKKGILQTVKVVDELVKVMGRHKPENIVIEMARENQTTQKGQKNSRERMKRIEEGIKELGSQILKEHPVENTQLQNEKLYLYYLQNGRDMYVDQELDINRLSDYDVDHIVPQSFLKDDSIDNKVLTRSDKARGKSDNVPSEEVVKKMKNYWRQLLNAKLITQRKFDNLTKAERGGLSELDKAGFIKRQLVETRQITKHVAQILDSRMNTKYDENDKLIREVKVITLKSKLVSDFRKDFQFYKVREINNYHHAHDAYLNAVVGTALIKKYPKLESEFVYGDYKVYDVRKMIAKSEQEIGKATAKYFFYSNIMNFFKTEITLANGEIRKRPLIETNGETGEIVWDKGRDFATVRKVLSMPQVNIVKKTEVQTGGFSKESILPKRNSDKLIARKKDWDPKKYGGFDSPTVAYSVLVVAKVEKGKSKKLKSVKELLGITIMERSSFEKNPIDFLEAKGYKEVKKDLIIKLPKYSLFELENGRKRMLASAGELQKGNELALPSKYVNFLYLASHYEKLKGSPEDNEQKQLFVEQHKHYLDEIIEQISEFSKRVILADANLDKVLSAYNKHRDKPIREQAENIIHLFTLTNLGAPAAFKYFDTTIDRKRYTSTKEVLDATLIHQSITGLYETRIDLSQLGGDGGPAPEAAAKGSSGGTLQLDDEYRLYSPLVKPDQNIQFWLEQFPQAWAETAGMGLAKQVPPQVIQLKASATPVSVRQYPLSKEAQEGIRPHVQRLIQQGILVPVQSPWNTPLLPVRKPGTNDYRPVQDLREVNKRVQDIHPTVPNPYNLLCALPPQRSWYTVLDLKDAFFCLRLHPTSQPLFAFEWRDPGTGRTGQLTWTRLPQGFKNSPTIFNEALHRDLANFRIQHPQVTLLQYVDDLLLAGATKQDCLEGTKALLLELSDLGYRASAKKAQICRREVTYLGYSLRDGQRWLTEARKKTVVQIPAPTTAKQVREFLGTAGFCRLWIPGFATLAAPLYPLTKPKGEFSWAPEHQKAFDAIKKALLSAPALALPDVTKPFTLYVDERKGVARGVLTQTLGPWRRPVAYLSKKLDPVASGWPVCLKAIAAVAILVKDADKLTLGQNITVIAPHALENIVRQPPDRWMTNARMTHYQSLLLTERVTFAPPAALNPATLLPEETDEPVTHDCHQLLIEETGVRKDLTDIPLTGEVLTWFTDGSSYVVEGKRMAGAAVVDGTRTIWASSLPEGTSAQKAELMALTQALRLAEGKSINIYTDSRYAFATAHVHGAIYKQRGWLTSAGREIKNKEEILSLLEALHLPKRLAIIHCPGHQKAKDPISRGNQMADRVAKQAAQGVNLLAGKRTADGSEFEKRTADGSEFESPKKKAKVE

SEQ ID NO: 133 - protein, 2090 aa, synthetic construct
MPAAKRVKLDGGDKKYSIGLDIGTNSVGWAVITDEYKVPSKKFKVLGNTDRHSIKKNLIGALLFDSGETAEATRLKRTARRRYTRRKNRICYLQEIFSNEMAKVDDSFFHRLEESFLVEEDKKHERHPIFGNIVDEVAYHEKYPTIYHLRKKLVDSTDKADLRLIYLALAHMIKFRGHFLIEGDLNPDNSDVDKLFIQLVQTYNQLFEENPINASGVDAKAILSARLSKSRRLENLIAQLPGEKKNGLFGNLIALSLGLTPNFKSNFDLAEDAKLQLSKDTYDDDLDNLLAQIGDQYADLFLAAKNLSDAILLSDILRVNTEITKAPLSASMIKRYDEHHQDLTLLKALVRQQLPEKYKEIFFDQSKNGYAGYIDGGASQEEFYKFIKPILEKMDGTEELLVKLNREDLLRKQRTFDNGSIPHQIHLGELHAILRRQEDFYPFLKDNREKIEKILTFRIPYYVGPLARGNSRFAWMTRKSEETITPWNFEEVVDKGASAQSFIERMTNFDKNLPNEKVLPKHSLLYEYFTVYNELTKVKYVTEGMRKPAFLSGEQKKAIVDLLFKTNRKVTVKQLKEDYFKKIECFDSVEISGVEDRFNASLGTYHDLLKIIKDKDFLDNEENEDILEDIVLTLTLFEDREMIEERLKTYAHLFDDKVMKQLKRRRYTGWGRLSRKLINGIRDKQSGKTILDFLKSDGFANRNFMQLIHDDSLTFKEDIQKAQVSGQGDSLHEHIANLAGSPAIKKGILQTVKVVDELVKVMGRHKPENIVIEMARENQTTQKGQKNSRERMKRIEEGIKELGSQILKEHPVENTQLQNEKLYLYYLQNGRDMYVDQELDINRLSDYDVDHIVPQSFLKDDSIDNKVLTRSDKARGKSDNVPSEEVVKKMKNYWRQLLNAKLITQRKFDNLTKAERGGLSELDKAGFIKRQLVETRQITKHVAQILDSRMNTKYDENDKLIREVKVITLKSKLVSDFRKDFQFYKVREINNYHHAHDAYLNAVVGTALIKKYPKLESEFVYGDYKVYDVRKMIAKSEQEIGKATAKYFFYSNIMNFFKTEITLANGEIRKRPLIETNGETGEIVWDKGRDFATVRKVLSMPQVNIVKKTEVQTGGFSKESILPKRNSDKLIARKKDWDPKKYGGFDSPTVAYSVLVVAKVEKGKSKKLKSVKELLGITIMERSSFEKNPIDFLEAKGYKEVKKDLIIKLPKYSLFELENGRKRMLASAGELQKGNELALPSKYVNFLYLASHYEKLKGSPEDNEQKQLFVEQHKHYLDEIIEQISEFSKRVILADANLDKVLSAYNKHRDKPIREQAENIIHLFTLTNLGAPAAFKYFDTTIDRKRYTSTKEVLDATLIHQSITGLYETRIDLSQLGGDGGGSSEAAAKGGGGGTLQLDDEYRLYSPLVKPDQNIQFWLEQFPQAWAETAGMGLAKQVPPQVIQLKASATPVSVRQYPLSKEAQEGIRPHVQRLIQQGILVPVQSPWNTPLLPVRKPGTNDYRPVQDLREVNKRVQDIHPTVPNPYNLLCALPPQRSWYTVLDLKDAFFCLRLHPTSQPLFAFEWRDPGTGRTGQLTWTRLPQGFKNSPTIFNEALHRDLANFRIQHPQVTLLQYVDDLLLAGATKQDCLEGTKALLLELSDLGYRASAKKAQICRREVTYLGYSLRDGQRWLTEARKKTVVQIPAPTTAKQVREFLGTAGFCRLWIPGFATLAAPLYPLTKPKGEFSWAPEHQKAFDAIKKALLSAPALALPDVTKPFTLYVDERKGVARGVLTQTLGPWRRPVAYLSKKLDPVASGWPVCLKAIAAVAILVKDADKLTLGQNITVIAPHALENIVRQPPDRWMTNARMTHYQSLLLTERVTFAPPAALNPATLLPEETDEPVTHDCHQLLIEETGVRKDLTDIPLTGEVLTWFTDGSSYVVEGKRMAGAAVVDGTRTIWASSLPEGTSAQKAELMALTQALRLAEGKSINIYTDSRYAFATAHVHGAIYKQRGWLTSAGREIKNKEEILSLLEALHLPKRLAIIHCPGHQKAKDPISRGNQMADRVAKQAAQGVNLLAGKRTADGSEFEKRTADGSEFESPKKKAKVE

SEQ ID NO: 134 - protein, 2088 aa, synthetic construct
MPAAKRVKLDGGDKKYSIGLDIGTNSVGWAVITDEYKVPSKKFKVLGNTDRHSIKKNLIGALLFDSGETAEATRLKRTARRRYTRRKNRICYLQEIFSNEMAKVDDSFFHRLEESFLVEEDKKHERHPIFGNIVDEVAYHEKYPTIYHLRKKLVDSTDKADLRLIYLALAHMIKFRGHFLIEGDLNPDNSDVDKLFIQLVQTYNQLFEENPINASGVDAKAILSARLSKSRRLENLIAQLPGEKKNGLFGNLIALSLGLTPNFKSNFDLAEDAKLQLSKDTYDDDLDNLLAQIGDQYADLFLAAKNLSDAILLSDILRVNTEITKAPLSASMIKRYDEHHQDLTLLKALVRQQLPEKYKEIFFDQSKNGYAGYIDGGASQEEFYKFIKPILEKMDGTEELLVKLNREDLLRKQRTFDNGSIPHQIHLGELHAILRRQEDFYPFLKDNREKIEKILTFRIPYYVGPLARGNSRFAWMTRKSEETITPWNFEEVVDKGASAQSFIERMTNFDKNLPNEKVLPKHSLLYEYFTVYNELTKVKYVTEGMRKPAFLSGEQKKAIVDLLFKTNRKVTVKQLKEDYFKKIECFDSVEISGVEDRFNASLGTYHDLLKIIKDKDFLDNEENEDILEDIVLTLTLFEDREMIEERLKTYAHLFDDKVMKQLKRRRYTGWGRLSRKLINGIRDKQSGKTILDFLKSDGFANRNFMQLIHDDSLTFKEDIQKAQVSGQGDSLHEHIANLAGSPAIKKGILQTVKVVDELVKVMGRHKPENIVIEMARENQTTQKGQKNSRERMKRIEEGIKELGSQILKEHPVENTQLQNEKLYLYYLQNGRDMYVDQELDINRLSDYDVDHIVPQSFLKDDSIDNKVLTRSDKARGKSDNVPSEEVVKKMKNYWRQLLNAKLITQRKFDNLTKAERGGLSELDKAGFIKRQLVETRQITKHVAQILDSRMNTKYDENDKLIREVKVITLKSKLVSDFRKDFQFYKVREINNYHHAHDAYLNAVVGTALIKKYPKLESEFVYGDYKVYDVRKMIAKSEQEIGKATAKYFFYSNIMNFFKTEITLANGEIRKRPLIETNGETGEIVWDKGRDFATVRKVLSMPQVNIVKKTEVQTGGFSKESILPKRNSDKLIARKKDWDPKKYGGFDSPTVAYSVLVVAKVEKGKSKKLKSVKELLGITIMERSSFEKNPIDFLEAKGYKEVKKDLIIKLPKYSLFELENGRKRMLASAGELQKGNELALPSKYVNFLYLASHYEKLKGSPEDNEQKQLFVEQHKHYLDEIIEQISEFSKRVILADANLDKVLSAYNKHRDKPIREQAENIIHLFTLTNLGAPAAFKYFDTTIDRKRYTSTKEVLDATLIHQSITGLYETRIDLSQLGGDGGPAPGSSGGSGGTLQLDDEYRLYSPLVKPDQNIQFWLEQFPQAWAETAGMGLAKQVPPQVIQLKASATPVSVRQYPLSKEAQEGIRPHVQRLIQQGILVPVQSPWNTPLLPVRKPGTNDYRPVQDLREVNKRVQDIHPTVPNPYNLLCALPPQRSWYTVLDLKDAFFCLRLHPTSQPLFAFEWRDPGTGRTGQLTWTRLPQGFKNSPTIFNEALHRDLANFRIQHPQVTLLQYVDDLLLAGATKQDCLEGTKALLLELSDLGYRASAKKAQICRREVTYLGYSLRDGQRWLTEARKKTVVQIPAPTTAKQVREFLGTAGFCRLWIPGFATLAAPLYPLTKPKGEFSWAPEHQKAFDAIKKALLSAPALALPDVTKPFTLYVDERKGVARGVLTQTLGPWRRPVAYLSKKLDPVASGWPVCLKAIAAVAILVKDADKLTLGQNITVIAPHALENIVRQPPDRWMTNARMTHYQSLLLTERVTFAPPAALNPATLLPEETDEPVTHDCHQLLIEETGVRKDLTDIPLTGEVLTWFTDGSSYVVEGKRMAGAAVVDGTRTIWASSLPEGTSAQKAELMALTQALRLAEGKSINIYTDSRYAFATAHVHGAIYKQRGWLTSAGREIKNKEEILSLLEALHLPKRLAIIHCPGHQKAKDPISRGNQMADRVAKQAAQGVNLLAGKRTADGSEFEKRTADGSEFESPKKKAKVE

SEQ ID NO: 135 - protein, 2088 aa, synthetic construct
MPAAKRVKLDGGDKKYSIGLDIGTNSVGWAVITDEYKVPSKKFKVLGNTDRHSIKKNLIGALLFDSGETAEATRLKRTARRRYTRRKNRICYLQEIFSNEMAKVDDSFFHRLEESFLVEEDKKHERHPIFGNIVDEVAYHEKYPTIYHLRKKLVDSTDKADLRLIYLALAHMIKFRGHFLIEGDLNPDNSDVDKLFIQLVQTYNQLFEENPINASGVDAKAILSARLSKSRRLENLIAQLPGEKKNGLFGNLIALSLGLTPNFKSNFDLAEDAKLQLSKDTYDDDLDNLLAQIGDQYADLFLAAKNLSDAILLSDILRVNTEITKAPLSASMIKRYDEHHQDLTLLKALVRQQLPEKYKEIFFDQSKNGYAGYIDGGASQEEFYKFIKPILEKMDGTEELLVKLNREDLLRKQRTFDNGSIPHQIHLGELHAILRRQEDFYPFLKDNREKIEKILTFRIPYYVGPLARGNSRFAWMTRKSEETITPWNFEEVVDKGASAQSFIERMTNFDKNLPNEKVLPKHSLLYEYFTVYNELTKVKYVTEGMRKPAFLSGEQKKAIVDLLFKTNRKVTVKQLKEDYFKKIECFDSVEISGVEDRFNASLGTYHDLLKIIKDKDFLDNEENEDILEDIVLTLTLFEDREMIEERLKTYAHLFDDKVMKQLKRRRYTGWGRLSRKLINGIRDKQSGKTILDFLKSDGFANRNFMQLIHDDSLTFKEDIQKAQVSGQGDSLHEHIANLAGSPAIKKGILQTVKVVDELVKVMGRHKPENIVIEMARENQTTQKGQKNSRERMKRIEEGIKELGSQILKEHPVENTQLQNEKLYLYYLQNGRDMYVDQELDINRLSDYDVDHIVPQSFLKDDSIDNKVLTRSDKARGKSDNVPSEEVVKKMKNYWRQLLNAKLITQRKFDNLTKAERGGLSELDKAGFIKRQLVETRQITKHVAQILDSRMNTKYDENDKLIREVKVITLKSKLVSDFRKDFQFYKVREINNYHHAHDAYLNAVVGTALIKKYPKLESEFVYGDYKVYDVRKMIAKSEQEIGKATAKYFFYSNIMNFFKTEITLANGEIRKRPLIETNGETGEIVWDKGRDFATVRKVLSMPQVNIVKKTEVQTGGFSKESILPKRNSDKLIARKKDWDPKKYGGFDSPTVAYSVLVVAKVEKGKSKKLKSVKELLGITIMERSSFEKNPIDFLEAKGYKEVKKDLIIKLPKYSLFELENGRKRMLASAGELQKGNELALPSKYVNFLYLASHYEKLKGSPEDNEQKQLFVEQHKHYLDEIIEQISEFSKRVILADANLDKVLSAYNKHRDKPIREQAENIIHLFTLTNLGAPAAFKYFDTTIDRKRYTSTKEVLDATLIHQSITGLYETRIDLSQLGGDGGPAPGGSGSSGGTLQLDDEYRLYSPLVKPDQNIQFWLEQFPQAWAETAGMGLAKQVPPQVIQLKASATPVSVRQYPLSKEAQEGIRPHVQRLIQQGILVPVQSPWNTPLLPVRKPGTNDYRPVQDLREVNKRVQDIHPTVPNPYNLLCALPPQRSWYTVLDLKDAFFCLRLHPTSQPLFAFEWRDPGTGRTGQLTWTRLPQGFKNSPTIFNEALHRDLANFRIQHPQVTLLQYVDDLLLAGATKQDCLEGTKALLLELSDLGYRASAKKAQICRREVTYLGYSLRDGQRWLTEARKKTVVQIPAPTTAKQVREFLGTAGFCRLWIPGFATLAAPLYPLTKPKGEFSWAPEHQKAFDAIKKALLSAPALALPDVTKPFTLYVDERKGVARGVLTQTLGPWRRPVAYLSKKLDPVASGWPVCLKAIAAVAILVKDADKLTLGQNITVIAPHALENIVRQPPDRWMTNARMTHYQSLLLTERVTFAPPAALNPATLLPEETDEPVTHDCHQLLIEETGVRKDLTDIPLTGEVLTWFTDGSSYVVEGKRMAGAAVVDGTRTIWASSLPEGTSAQKAELMALTQALRLAEGKSINIYTDSRYAFATAHVHGAIYKQRGWLTSAGREIKNKEEILSLLEALHLPKRLAIIHCPGHQKAKDPISRGNQMADRVAKQAAQGVNLLAGKRTADGSEFEKRTADGSEFESPKKKAKVE

SEQ ID NO: 136 - protein, 2090 aa, synthetic construct
MPAAKRVKLDGGDKKYSIGLDIGTNSVGWAVITDEYKVPSKKFKVLGNTDRHSIKKNLIGALLFDSGETAEATRLKRTARRRYTRRKNRICYLQEIFSNEMAKVDDSFFHRLEESFLVEEDKKHERHPIFGNIVDEVAYHEKYPTIYHLRKKLVDSTDKADLRLIYLALAHMIKFRGHFLIEGDLNPDNSDVDKLFIQLVQTYNQLFEENPINASGVDAKAILSARLSKSRRLENLIAQLPGEKKNGLFGNLIALSLGLTPNFKSNFDLAEDAKLQLSKDTYDDDLDNLLAQIGDQYADLFLAAKNLSDAILLSDILRVNTEITKAPLSASMIKRYDEHHQDLTLLKALVRQQLPEKYKEIFFDQSKNGYAGYIDGGASQEEFYKFIKPILEKMDGTEELLVKLNREDLLRKQRTFDNGSIPHQIHLGELHAILRRQEDFYPFLKDNREKIEKILTFRIPYYVGPLARGNSRFAWMTRKSEETITPWNFEEVVDKGASAQSFIERMTNFDKNLPNEKVLPKHSLLYEYFTVYNELTKVKYVTEGMRKPAFLSGEQKKAIVDLLFKTNRKVTVKQLKEDYFKKIECFDSVEISGVEDRFNASLGTYHDLLKIIKDKDFLDNEENEDILEDIVLTLTLFEDREMIEERLKTYAHLFDDKVMKQLKRRRYTGWGRLSRKLINGIRDKQSGKTILDFLKSDGFANRNFMQLIHDDSLTFKEDIQKAQVSGQGDSLHEHIANLAGSPAIKKGILQTVKVVDELVKVMGRHKPENIVIEMARENQTTQKGQKNSRERMKRIEEGIKELGSQILKEHPVENTQLQNEKLYLYYLQNGRDMYVDQELDINRLSDYDVDHIVPQSFLKDDSIDNKVLTRSDKARGKSDNVPSEEVVKKMKNYWRQLLNAKLITQRKFDNLTKAERGGLSELDKAGFIKRQLVETRQITKHVAQILDSRMNTKYDENDKLIREVKVITLKSKLVSDFRKDFQFYKVREINNYHHAHDAYLNAVVGTALIKKYPKLESEFVYGDYKVYDVRKMIAKSEQEIGKATAKYFFYSNIMNFFKTEITLANGEIRKRPLIETNGETGEIVWDKGRDFATVRKVLSMPQVNIVKKTEVQTGGFSKESILPKRNSDKLIARKKDWDPKKYGGFDSPTVAYSVLVVAKVEKGKSKKLKSVKELLGITIMERSSFEKNPIDFLEAKGYKEVKKDLIIKLPKYSLFELENGRKRMLASAGELQKGNELALPSKYVNFLYLASHYEKLKGSPEDNEQKQLFVEQHKHYLDEIIEQISEFSKRVILADANLDKVLSAYNKHRDKPIREQAENIIHLFTLTNLGAPAAFKYFDTTIDRKRYTSTKEVLDATLIHQSITGLYETRIDLSQLGGDGGEAAAKGGSGSSGGTLQLDDEYRLYSPLVKPDQNIQFWLEQFPQAWAETAGMGLAKQVPPQVIQLKASATPVSVRQYPLSKEAQEGIRPHVQRLIQQGILVPVQSPWNTPLLPVRKPGTNDYRPVQDLREVNKRVQDIHPTVPNPYNLLCALPPQRSWYTVLDLKDAFFCLRLHPTSQPLFAFEWRDPGTGRTGQLTWTRLPQGFKNSPTIFNEALHRDLANFRIQHPQVTLLQYVDDLLLAGATKQDCLEGTKALLLELSDLGYRASAKKAQICRREVTYLGYSLRDGQRWLTEARKKTVVQIPAPTTAKQVREFLGTAGFCRLWIPGFATLAAPLYPLTKPKGEFSWAPEHQKAFDAIKKALLSAPALALPDVTKPFTLYVDERKGVARGVLTQTLGPWRRPVAYLSKKLDPVASGWPVCLKAIAAVAILVKDADKLTLGQNITVIAPHALENIVRQPPDRWMTNARMTHYQSLLLTERVTFAPPAALNPATLLPEETDEPVTHDCHQLLIEETGVRKDLTDIPLTGEVLTWFTDGSSYVVEGKRMAGAAVVDGTRTIWASSLPEGTSAQKAELMALTQALRLAEGKSINIYTDSRYAFATAHVHGAIYKQRGWLTSAGREIKNKEEILSLLEALHLPKRLAIIHCPGHQKAKDPISRGNQMADRVAKQAAQGVNLLAGKRTADGSEFEKRTADGSEFESPKKKAKVE

SEQ ID NO: 137 - protein, 2099 aa, synthetic construct
MPAAKRVKLDGGDKKYSIGLDIGTNSVGWAVITDEYKVPSKKFKVLGNTDRHSIKKNLIGALLFDSGETAEATRLKRTARRRYTRRKNRICYLQEIFSNEMAKVDDSFFHRLEESFLVEEDKKHERHPIFGNIVDEVAYHEKYPTIYHLRKKLVDSTDKADLRLIYLALAHMIKFRGHFLIEGDLNPDNSDVDKLFIQLVQTYNQLFEENPINASGVDAKAILSARLSKSRRLENLIAQLPGEKKNGLFGNLIALSLGLTPNFKSNFDLAEDAKLQLSKDTYDDDLDNLLAQIGDQYADLFLAAKNLSDAILLSDILRVNTEITKAPLSASMIKRYDEHHQDLTLLKALVRQQLPEKYKEIFFDQSKNGYAGYIDGGASQEEFYKFIKPILEKMDGTEELLVKLNREDLLRKQRTFDNGSIPHQIHLGELHAILRRQEDFYPFLKDNREKIEKILTFRIPYYVGPLARGNSRFAWMTRKSEETITPWNFEEVVDKGASAQSFIERMTNFDKNLPNEKVLPKHSLLYEYFTVYNELTKVKYVTEGMRKPAFLSGEQKKAIVDLLFKTNRKVTVKQLKEDYFKKIECFDSVEISGVEDRFNASLGTYHDLLKIIKDKDFLDNEENEDILEDIVLTLTLFEDREMIEERLKTYAHLFDDKVMKQLKRRRYTGWGRLSRKLINGIRDKQSGKTILDFLKSDGFANRNFMQLIHDDSLTFKEDIQKAQVSGQGDSLHEHIANLAGSPAIKKGILQTVKVVDELVKVMGRHKPENIVIEMARENQTTQKGQKNSRERMKRIEEGIKELGSQILKEHPVENTQLQNEKLYLYYLQNGRDMYVDQELDINRLSDYDVDHIVPQSFLKDDSIDNKVLTRSDKARGKSDNVPSEEVVKKMKNYWRQLLNAKLITQRKFDNLTKAERGGLSELDKAGFIKRQLVETRQITKHVAQILDSRMNTKYDENDKLIREVKVITLKSKLVSDFRKDFQFYKVREINNYHHAHDAYLNAVVGTALIKKYPKLESEFVYGDYKVYDVRKMIAKSEQEIGKATAKYFFYSNIMNFFKTEITLANGEIRKRPLIETNGETGEIVWDKGRDFATVRKVLSMPQVNIVKKTEVQTGGFSKESILPKRNSDKLIARKKDWDPKKYGGFDSPTVAYSVLVVAKVEKGKSKKLKSVKELLGITIMERSSFEKNPIDFLEAKGYKEVKKDLIIKLPKYSLFELENGRKRMLASAGELQKGNELALPSKYVNFLYLASHYEKLKGSPEDNEQKQLFVEQHKHYLDEIIEQISEFSKRVILADANLDKVLSAYNKHRDKPIREQAENIIHLFTLTNLGAPAAFKYFDTTIDRKRYTSTKEVLDATLIHQSITGLYETRIDLSQLGGDGGEAAAKEAAAKEAAAKEAAAKGGTLQLDDEYRLYSPLVKPDQNIQFWLEQFPQAWAETAGMGLAKQVPPQVIQLKASATPVSVRQYPLSKEAQEGIRPHVQRLIQQGILVPVQSPWNTPLLPVRKPGTNDYRPVQDLREVNKRVQDIHPTVPNPYNLLCALPPQRSWYTVLDLKDAFFCLRLHPTSQPLFAFEWRDPGTGRTGQLTWTRLPQGFKNSPTIFNEALHRDLANFRIQHPQVTLLQYVDDLLLAGATKQDCLEGTKALLLELSDLGYRASAKKAQICRREVTYLGYSLRDGQRWLTEARKKTVVQIPAPTTAKQVREFLGTAGFCRLWIPGFATLAAPLYPLTKPKGEFSWAPEHQKAFDAIKKALLSAPALALPDVTKPFTLYVDERKGVARGVLTQTLGPWRRPVAYLSKKLDPVASGWPVCLKAIAAVAILVKDADKLTLGQNITVIAPHALENIVRQPPDRWMTNARMTHYQSLLLTERVTFAPPAALNPATLLPEETDEPVTHDCHQLLIEETGVRKDLTDIPLTGEVLTWFTDGSSYVVEGKRMAGAAVVDGTRTIWASSLPEGTSAQKAELMALTQALRLAEGKSINIYTDSRYAFATAHVHGAIYKQRGWLTSAGREIKNKEEILSLLEALHLPKRLAIIHCPGHQKAKDPISRGNQMADRVAKQAAQGVNLLAGKRTADGSEFEKRTADGSEFESPKKKAKVE

SEQ ID NO: 138 - protein, 2090 aa, synthetic construct
MPAAKRVKLDGGDKKYSIGLDIGTNSVGWAVITDEYKVPSKKFKVLGNTDRHSIKKNLIGALLFDSGETAEATRLKRTARRRYTRRKNRICYLQEIFSNEMAKVDDSFFHRLEESFLVEEDKKHERHPIFGNIVDEVAYHEKYPTIYHLRKKLVDSTDKADLRLIYLALAHMIKFRGHFLIEGDLNPDNSDVDKLFIQLVQTYNQLFEENPINASGVDAKAILSARLSKSRRLENLIAQLPGEKKNGLFGNLIALSLGLTPNFKSNFDLAEDAKLQLSKDTYDDDLDNLLAQIGDQYADLFLAAKNLSDAILLSDILRVNTEITKAPLSASMIKRYDEHHQDLTLLKALVRQQLPEKYKEIFFDQSKNGYAGYIDGGASQEEFYKFIKPILEKMDGTEELLVKLNREDLLRKQRTFDNGSIPHQIHLGELHAILRRQEDFYPFLKDNREKIEKILTFRIPYYVGPLARGNSRFAWMTRKSEETITPWNFEEVVDKGASAQSFIERMTNFDKNLPNEKVLPKHSLLYEYFTVYNELTKVKYVTEGMRKPAFLSGEQKKAIVDLLFKTNRKVTVKQLKEDYFKKIECFDSVEISGVEDRFNASLGTYHDLLKIIKDKDFLDNEENEDILEDIVLTLTLFEDREMIEERLKTYAHLFDDKVMKQLKRRRYTGWGRLSRKLINGIRDKQSGKTILDFLKSDGFANRNFMQLIHDDSLTFKEDIQKAQVSGQGDSLHEHIANLAGSPAIKKGILQTVKVVDELVKVMGRHKPENIVIEMARENQTTQKGQKNSRERMKRIEEGIKELGSQILKEHPVENTQLQNEKLYLYYLQNGRDMYVDQELDINRLSDYDVDHIVPQSFLKDDSIDNKVLTRSDKARGKSDNVPSEEVVKKMKNYWRQLLNAKLITQRKFDNLTKAERGGLSELDKAGFIKRQLVETRQITKHVAQILDSRMNTKYDENDKLIREVKVITLKSKLVSDFRKDFQFYKVREINNYHHAHDAYLNAVVGTALIKKYPKLESEFVYGDYKVYDVRKMIAKSEQEIGKATAKYFFYSNIMNFFKTEITLANGEIRKRPLIETNGETGEIVWDKGRDFATVRKVLSMPQVNIVKKTEVQTGGFSKESILPKRNSDKLIARKKDWDPKKYGGFDSPTVAYSVLVVAKVEKGKSKKLKSVKELLGITIMERSSFEKNPIDFLEAKGYKEVKKDLIIKLPKYSLFELENGRKRMLASAGELQKGNELALPSKYVNFLYLASHYEKLKGSPEDNEQKQLFVEQHKHYLDEIIEQISEFSKRVILADANLDKVLSAYNKHRDKPIREQAENIIHLFTLTNLGAPAAFKYFDTTIDRKRYTSTKEVLDATLIHQSITGLYETRIDLSQLGGDGGPAPGGSEAAAKGGTLQLDDEYRLYSPLVKPDQNIQFWLEQFPQAWAETAGMGLAKQVPPQVIQLKASATPVSVRQYPLSKEAQEGIRPHVQRLIQQGILVPVQSPWNTPLLPVRKPGTNDYRPVQDLREVNKRVQDIHPTVPNPYNLLCALPPQRSWYTVLDLKDAFFCLRLHPTSQPLFAFEWRDPGTGRTGQLTWTRLPQGFKNSPTIFNEALHRDLANFRIQHPQVTLLQYVDDLLLAGATKQDCLEGTKALLLELSDLGYRASAKKAQICRREVTYLGYSLRDGQRWLTEARKKTVVQIPAPTTAKQVREFLGTAGFCRLWIPGFATLAAPLYPLTKPKGEFSWAPEHQKAFDAIKKALLSAPALALPDVTKPFTLYVDERKGVARGVLTQTLGPWRRPVAYLSKKLDPVASGWPVCLKAIAAVAILVKDADKLTLGQNITVIAPHALENIVRQPPDRWMTNARMTHYQSLLLTERVTFAPPAALNPATLLPEETDEPVTHDCHQLLIEETGVRKDLTDIPLTGEVLTWFTDGSSYVVEGKRMAGAAVVDGTRTIWASSLPEGTSAQKAELMALTQALRLAEGKSINIYTDSRYAFATAHVHGAIYKQRGWLTSAGREIKNKEEILSLLEALHLPKRLAIIHCPGHQKAKDPISRGNQMADRVAKQAAQGVNLLAGKRTADGSEFEKRTADGSEFESPKKKAKVE

SEQ ID NO: 139 - protein, 2090 aa, synthetic construct
MPAAKRVKLDGGDKKYSIGLDIGTNSVGWAVITDEYKVPSKKFKVLGNTDRHSIKKNLIGALLFDSGETAEATRLKRTARRRYTRRKNRICYLQEIFSNEMAKVDDSFFHRLEESFLVEEDKKHERHPIFGNIVDEVAYHEKYPTIYHLRKKLVDSTDKADLRLIYLALAHMIKFRGHFLIEGDLNPDNSDVDKLFIQLVQTYNQLFEENPINASGVDAKAILSARLSKSRRLENLIAQLPGEKKNGLFGNLIALSLGLTPNFKSNFDLAEDAKLQLSKDTYDDDLDNLLAQIGDQYADLFLAAKNLSDAILLSDILRVNTEITKAPLSASMIKRYDEHHQDLTLLKALVRQQLPEKYKEIFFDQSKNGYAGYIDGGASQEEFYKFIKPILEKMDGTEELLVKLNREDLLRKQRTFDNGSIPHQIHLGELHAILRRQEDFYPFLKDNREKIEKILTFRIPYYVGPLARGNSRFAWMTRKSEETITPWNFEEVVDKGASAQSFIERMTNFDKNLPNEKVLPKHSLLYEYFTVYNELTKVKYVTEGMRKPAFLSGEQKKAIVDLLFKTNRKVTVKQLKEDYFKKIECFDSVEISGVEDRFNASLGTYHDLLKIIKDKDFLDNEENEDILEDIVLTLTLFEDREMIEERLKTYAHLFDDKVMKQLKRRRYTGWGRLSRKLINGIRDKQSGKTILDFLKSDGFANRNFMQLIHDDSLTFKEDIQKAQVSGQGDSLHEHIANLAGSPAIKKGILQTVKVVDELVKVMGRHKPENIVIEMARENQTTQKGQKNSRERMKRIEEGIKELGSQILKEHPVENTQLQNEKLYLYYLQNGRDMYVDQELDINRLSDYDVDHIVPQSFLKDDSIDNKVLTRSDKARGKSDNVPSEEVVKKMKNYWRQLLNAKLITQRKFDNLTKAERGGLSELDKAGFIKRQLVETRQITKHVAQILDSRMNTKYDENDKLIREVKVITLKSKLVSDFRKDFQFYKVREINNYHHAHDAYLNAVVGTALIKKYPKLESEFVYGDYKVYDVRKMIAKSEQEIGKATAKYFFYSNIMNFFKTEITLANGEIRKRPLIETNGETGEIVWDKGRDFATVRKVLSMPQVNIVKKTEVQTGGFSKESILPKRNSDKLIARKKDWDPKKYGGFDSPTVAYSVLVVAKVEKGKSKKLKSVKELLGITIMERSSFEKNPIDFLEAKGYKEVKKDLIIKLPKYSLFELENGRKRMLASAGELQKGNELALPSKYVNFLYLASHYEKLKGSPEDNEQKQLFVEQHKHYLDEIIEQISEFSKRVILADANLDKVLSAYNKHRDKPIREQAENIIHLFTLTNLGAPAAFKYFDTTIDRKRYTSTKEVLDATLIHQSITGLYETRIDLSQLGGDGGGGSGSSEAAAKGGTLQLDDEYRLYSPLVKPDQNIQFWLEQFPQAWAETAGMGLAKQVPPQVIQLKASATPVSVRQYPLSKEAQEGIRPHVQRLIQQGILVPVQSPWNTPLLPVRKPGTNDYRPVQDLREVNKRVQDIHPTVPNPYNLLCALPPQRSWYTVLDLKDAFFCLRLHPTSQPLFAFEWRDPGTGRTGQLTWTRLPQGFKNSPTIFNEALHRDLANFRIQHPQVTLLQYVDDLLLAGATKQDCLEGTKALLLELSDLGYRASAKKAQICRREVTYLGYSLRDGQRWLTEARKKTVVQIPAPTTAKQVREFLGTAGFCRLWIPGFATLAAPLYPLTKPKGEFSWAPEHQKAFDAIKKALLSAPALALPDVTKPFTLYVDERKGVARGVLTQTLGPWRRPVAYLSKKLDPVASGWPVCLKAIAAVAILVKDADKLTLGQNITVIAPHALENIVRQPPDRWMTNARMTHYQSLLLTERVTFAPPAALNPATLLPEETDEPVTHDCHQLLIEETGVRKDLTDIPLTGEVLTWFTDGSSYVVEGKRMAGAAVVDGTRTIWASSLPEGTSAQKAELMALTQALRLAEGKSINIYTDSRYAFATAHVHGAIYKQRGWLTSAGREIKNKEEILSLLEALHLPKRLAIIHCPGHQKAKDPISRGNQMADRVAKQAAQGVNLLAGKRTADGSEFEKRTADGSEFESPKKKAKVE

SEQ ID NO: 140 - protein, 2112 aa, synthetic construct
MPAAKRVKLDGGDKKYSIGLDIGTNSVGWAVITDEYKVPSKKFKVLGNTDRHSIKKNLIGALLFDSGETAEATRLKRTARRRYTRRKNRICYLQEIFSNEMAKVDDSFFHRLEESFLVEEDKKHERHPIFGNIVDEVAYHEKYPTIYHLRKKLVDSTDKADLRLIYLALAHMIKFRGHFLIEGDLNPDNSDVDKLFIQLVQTYNQLFEENPINASGVDAKAILSARLSKSRRLENLIAQLPGEKKNGLFGNLIALSLGLTPNFKSNFDLAEDAKLQLSKDTYDDDLDNLLAQIGDQYADLFLAAKNLSDAILLSDILRVNTEITKAPLSASMIKRYDEHHQDLTLLKALVRQQLPEKYKEIFFDQSKNGYAGYIDGGASQEEFYKFIKPILEKMDGTEELLVKLNREDLLRKQRTFDNGSIPHQIHLGELHAILRRQEDFYPFLKDNREKIEKILTFRIPYYVGPLARGNSRFAWMTRKSEETITPWNFEEVVDKGASAQSFIERMTNFDKNLPNEKVLPKHSLLYEYFTVYNELTKVKYVTEGMRKPAFLSGEQKKAIVDLLFKTNRKVTVKQLKEDYFKKIECFDSVEISGVEDRFNASLGTYHDLLKIIKDKDFLDNEENEDILEDIVLTLTLFEDREMIEERLKTYAHLFDDKVMKQLKRRRYTGWGRLSRKLINGIRDKQSGKTILDFLKSDGFANRNFMQLIHDDSLTFKEDIQKAQVSGQGDSLHEHIANLAGSPAIKKGILQTVKVVDELVKVMGRHKPENIVIEMARENQTTQKGQKNSRERMKRIEEGIKELGSQILKEHPVENTQLQNEKLYLYYLQNGRDMYVDQELDINRLSDYDVDHIVPQSFLKDDSIDNKVLTRSDKARGKSDNVPSEEVVKKMKNYWRQLLNAKLITQRKFDNLTKAERGGLSELDKAGFIKRQLVETRQITKHVAQILDSRMNTKYDENDKLIREVKVITLKSKLVSDFRKDFQFYKVREINNYHHAHDAYLNAVVGTALIKKYPKLESEFVYGDYKVYDVRKMIAKSEQEIGKATAKYFFYSNIMNFFKTEITLANGEIRKRPLIETNGETGEIVWDKGRDFATVRKVLSMPQVNIVKKTEVQTGGFSKESILPKRNSDKLIARKKDWDPKKYGGFDSPTVAYSVLVVAKVEKGKSKKLKSVKELLGITIMERSSFEKNPIDFLEAKGYKEVKKDLIIKLPKYSLFELENGRKRMLASAGELQKGNELALPSKYVNFLYLASHYEKLKGSPEDNEQKQLFVEQHKHYLDEIIEQISEFSKRVILADANLDKVLSAYNKHRDKPIREQAENIIHLFTLTNLGAPAAFKYFDTTIDRKRYTSTKEVLDATLIHQSITGLYETRIDLSQLGGDGGSGGSSGGSSGSETPGTSESATPESSGGSSGGSSGGTLQLDDEYRLYSPLVKPDQNIQFWLEQFPQAWAETAGMGLAKQVPPQVIQLKASATPVSVRQYPLSKEAQEGIRPHVQRLIQQGILVPVQSPWNTPLLPVRKPGTNDYRPVQDLREVNKRVQDIHPTVPNPYNLLCALPPQRSWYTVLDLKDAFFCLRLHPTSQPLFAFEWRDPGTGRTGQLTWTRLPQGFKNSPTIFNEALHRDLANFRIQHPQVTLLQYVDDLLLAGATKQDCLEGTKALLLELSDLGYRASAKKAQICRREVTYLGYSLRDGQRWLTEARKKTVVQIPAPTTAKQVREFLGTAGFCRLWIPGFATLAAPLYPLTKPKGEFSWAPEHQKAFDAIKKALLSAPALALPDVTKPFTLYVDERKGVARGVLTQTLGPWRRPVAYLSKKLDPVASGWPVCLKAIAAVAILVKDADKLTLGQNITVIAPHALENIVRQPPDRWMTNARMTHYQSLLLTERVTFAPPAALNPATLLPEETDEPVTHDCHQLLIEETGVRKDLTDIPLTGEVLTWFTDGSSYVVEGKRMAGAAVVDGTRTIWASSLPEGTSAQKAELMALTQALRLAEGKSINIYTDSRYAFATAHVHGAIYKQRGWLTSAGREIKNKEEILSLLEALHLPKRLAIIHCPGHQKAKDPISRGNQMADRVAKQAAQGVNLLAGKRTADGSEFEKRTADGSEFESPKKKAKVE

SEQ ID NO: 141 - protein, 2090 aa, synthetic construct
MPAAKRVKLDGGDKKYSIGLDIGTNSVGWAVITDEYKVPSKKFKVLGNTDRHSIKKNLIGALLFDSGETAEATRLKRTARRRYTRRKNRICYLQEIFSNEMAKVDDSFFHRLEESFLVEEDKKHERHPIFGNIVDEVAYHEKYPTIYHLRKKLVDSTDKADLRLIYLALAHMIKFRGHFLIEGDLNPDNSDVDKLFIQLVQTYNQLFEENPINASGVDAKAILSARLSKSRRLENLIAQLPGEKKNGLFGNLIALSLGLTPNFKSNFDLAEDAKLQLSKDTYDDDLDNLLAQIGDQYADLFLAAKNLSDAILLSDILRVNTEITKAPLSASMIKRYDEHHQDLTLLKALVRQQLPEKYKEIFFDQSKNGYAGYIDGGASQEEFYKFIKPILEKMDGTEELLVKLNREDLLRKQRTFDNGSIPHQIHLGELHAILRRQEDFYPFLKDNREKIEKILTFRIPYYVGPLARGNSRFAWMTRKSEETITPWNFEEVVDKGASAQSFIERMTNFDKNLPNEKVLPKHSLLYEYFTVYNELTKVKYVTEGMRKPAFLSGEQKKAIVDLLFKTNRKVTVKQLKEDYFKKIECFDSVEISGVEDRFNASLGTYHDLLKIIKDKDFLDNEENEDILEDIVLTLTLFEDREMIEERLKTYAHLFDDKVMKQLKRRRYTGWGRLSRKLINGIRDKQSGKTILDFLKSDGFANRNFMQLIHDDSLTFKEDIQKAQVSGQGDSLHEHIANLAGSPAIKKGILQTVKVVDELVKVMGRHKPENIVIEMARENQTTQKGQKNSRERMKRIEEGIKELGSQILKEHPVENTQLQNEKLYLYYLQNGRDMYVDQELDINRLSDYDVDHIVPQSFLKDDSIDNKVLTRSDKARGKSDNVPSEEVVKKMKNYWRQLLNAKLITQRKFDNLTKAERGGLSELDKAGFIKRQLVETRQITKHVAQILDSRMNTKYDENDKLIREVKVITLKSKLVSDFRKDFQFYKVREINNYHHAHDAYLNAVVGTALIKKYPKLESEFVYGDYKVYDVRKMIAKSEQEIGKATAKYFFYSNIMNFFKTEITLANGEIRKRPLIETNGETGEIVWDKGRDFATVRKVLSMPQVNIVKKTEVQTGGFSKESILPKRNSDKLIARKKDWDPKKYGGFDSPTVAYSVLVVAKVEKGKSKKLKSVKELLGITIMERSSFEKNPIDFLEAKGYKEVKKDLIIKLPKYSLFELENGRKRMLASAGELQKGNELALPSKYVNFLYLASHYEKLKGSPEDNEQKQLFVEQHKHYLDEIIEQISEFSKRVILADANLDKVLSAYNKHRDKPIREQAENIIHLFTLTNLGAPAAFKYFDTTIDRKRYTSTKEVLDATLIHQSITGLYETRIDLSQLGGDGGEAAAKGGSPAPGGTLQLDDEYRLYSPLVKPDQNIQFWLEQFPQAWAETAGMGLAKQVPPQVIQLKASATPVSVRQYPLSKEAQEGIRPHVQRLIQQGILVPVQSPWNTPLLPVRKPGTNDYRPVQDLREVNKRVQDIHPTVPNPYNLLCALPPQRSWYTVLDLKDAFFCLRLHPTSQPLFAFEWRDPGTGRTGQLTWTRLPQGFKNSPTIFNEALHRDLANFRIQHPQVTLLQYVDDLLLAGATKQDCLEGTKALLLELSDLGYRASAKKAQICRREVTYLGYSLRDGQRWLTEARKKTVVQIPAPTTAKQVREFLGTAGFCRLWIPGFATLAAPLYPLTKPKGEFSWAPEHQKAFDAIKKALLSAPALALPDVTKPFTLYVDERKGVARGVLTQTLGPWRRPVAYLSKKLDPVASGWPVCLKAIAAVAILVKDADKLTLGQNITVIAPHALENIVRQPPDRWMTNARMTHYQSLLLTERVTFAPPAALNPATLLPEETDEPVTHDCHQLLIEETGVRKDLTDIPLTGEVLTWFTDGSSYVVEGKRMAGAAVVDGTRTIWASSLPEGTSAQKAELMALTQALRLAEGKSINIYTDSRYAFATAHVHGAIYKQRGWLTSAGREIKNKEEILSLLEALHLPKRLAIIHCPGHQKAKDPISRGNQMADRVAKQAAQGVNLLAGKRTADGSEFEKRTADGSEFESPKKKAKVE

SEQ ID NO: 142 - protein, 2097 aa, synthetic construct
MPAAKRVKLDGGDKKYSIGLDIGTNSVGWAVITDEYKVPSKKFKVLGNTDRHSIKKNLIGALLFDSGETAEATRLKRTARRRYTRRKNRICYLQEIFSNEMAKVDDSFFHRLEESFLVEEDKKHERHPIFGNIVDEVAYHEKYPTIYHLRKKLVDSTDKADLRLIYLALAHMIKFRGHFLIEGDLNPDNSDVDKLFIQLVQTYNQLFEENPINASGVDAKAILSARLSKSRRLENLIAQLPGEKKNGLFGNLIALSLGLTPNFKSNFDLAEDAKLQLSKDTYDDDLDNLLAQIGDQYADLFLAAKNLSDAILLSDILRVNTEITKAPLSASMIKRYDEHHQDLTLLKALVRQQLPEKYKEIFFDQSKNGYAGYIDGGASQEEFYKFIKPILEKMDGTEELLVKLNREDLLRKQRTFDNGSIPHQIHLGELHAILRRQEDFYPFLKDNREKIEKILTFRIPYYVGPLARGNSRFAWMTRKSEETITPWNFEEVVDKGASAQSFIERMTNFDKNLPNEKVLPKHSLLYEYFTVYNELTKVKYVTEGMRKPAFLSGEQKKAIVDLLFKTNRKVTVKQLKEDYFKKIECFDSVEISGVEDRFNASLGTYHDLLKIIKDKDFLDNEENEDILEDIVLTLTLFEDREMIEERLKTYAHLFDDKVMKQLKRRRYTGWGRLSRKLINGIRDKQSGKTILDFLKSDGFANRNFMQLIHDDSLTFKEDIQKAQVSGQGDSLHEHIANLAGSPAIKKGILQTVKVVDELVKVMGRHKPENIVIEMARENQTTQKGQKNSRERMKRIEEGIKELGSQILKEHPVENTQLQNEKLYLYYLQNGRDMYVDQELDINRLSDYDVDHIVPQSFLKDDSIDNKVLTRSDKARGKSDNVPSEEVVKKMKNYWRQLLNAKLITQRKFDNLTKAERGGLSELDKAGFIKRQLVETRQITKHVAQILDSRMNTKYDENDKLIREVKVITLKSKLVSDFRKDFQFYKVREINNYHHAHDAYLNAVVGTALIKKYPKLESEFVYGDYKVYDVRKMIAKSEQEIGKATAKYFFYSNIMNFFKTEITLANGEIRKRPLIETNGETGEIVWDKGRDFATVRKVLSMPQVNIVKKTEVQTGGFSKESILPKRNSDKLIARKKDWDPKKYGGFDSPTVAYSVLVVAKVEKGKSKKLKSVKELLGITIMERSSFEKNPIDFLEAKGYKEVKKDLIIKLPKYSLFELENGRKRMLASAGELQKGNELALPSKYVNFLYLASHYEKLKGSPEDNEQKQLFVEQHKHYLDEIIEQISEFSKRVILADANLDKVLSAYNKHRDKPIREQAENIIHLFTLTNLGAPAAFKYFDTTIDRKRYTSTKEVLDATLIHQSITGLYETRIDLSQLGGDGGGGSGGSGGSGGSGGSGGSGGTLQLDDEYRLYSPLVKPDQNIQFWLEQFPQAWAETAGMGLAKQVPPQVIQLKASATPVSVRQYPLSKEAQEGIRPHVQRLIQQGILVPVQSPWNTPLLPVRKPGTNDYRPVQDLREVNKRVQDIHPTVPNPYNLLCALPPQRSWYTVLDLKDAFFCLRLHPTSQPLFAFEWRDPGTGRTGQLTWTRLPQGFKNSPTIFNEALHRDLANFRIQHPQVTLLQYVDDLLLAGATKQDCLEGTKALLLELSDLGYRASAKKAQICRREVTYLGYSLRDGQRWLTEARKKTVVQIPAPTTAKQVREFLGTAGFCRLWIPGFATLAAPLYPLTKPKGEFSWAPEHQKAFDAIKKALLSAPALALPDVTKPFTLYVDERKGVARGVLTQTLGPWRRPVAYLSKKLDPVASGWPVCLKAIAAVAILVKDADKLTLGQNITVIAPHALENIVRQPPDRWMTNARMTHYQSLLLTERVTFAPPAALNPATLLPEETDEPVTHDCHQLLIEETGVRKDLTDIPLTGEVLTWFTDGSSYVVEGKRMAGAAVVDGTRTIWASSLPEGTSAQKAELMALTQALRLAEGKSINIYTDSRYAFATAHVHGAIYKQRGWLTSAGREIKNKEEILSLLEALHLPKRLAIIHCPGHQKAKDPISRGNQMADRVAKQAAQGVNLLAGKRTADGSEFEKRTADGSEFESPKKKAKVE

SEQ ID NO: 143 - protein, 2085 aa, synthetic construct
MPAAKRVKLDGGDKKYSIGLDIGTNSVGWAVITDEYKVPSKKFKVLGNTDRHSIKKNLIGALLFDSGETAEATRLKRTARRRYTRRKNRICYLQEIFSNEMAKVDDSFFHRLEESFLVEEDKKHERHPIFGNIVDEVAYHEKYPTIYHLRKKLVDSTDKADLRLIYLALAHMIKFRGHFLIEGDLNPDNSDVDKLFIQLVQTYNQLFEENPINASGVDAKAILSARLSKSRRLENLIAQLPGEKKNGLFGNLIALSLGLTPNFKSNFDLAEDAKLQLSKDTYDDDLDNLLAQIGDQYADLFLAAKNLSDAILLSDILRVNTEITKAPLSASMIKRYDEHHQDLTLLKALVRQQLPEKYKEIFFDQSKNGYAGYIDGGASQEEFYKFIKPILEKMDGTEELLVKLNREDLLRKQRTFDNGSIPHQIHLGELHAILRRQEDFYPFLKDNREKIEKILTFRIPYYVGPLARGNSRFAWMTRKSEETITPWNFEEVVDKGASAQSFIERMTNFDKNLPNEKVLPKHSLLYEYFTVYNELTKVKYVTEGMRKPAFLSGEQKKAIVDLLFKTNRKVTVKQLKEDYFKKIECFDSVEISGVEDRFNASLGTYHDLLKIIKDKDFLDNEENEDILEDIVLTLTLFEDREMIEERLKTYAHLFDDKVMKQLKRRRYTGWGRLSRKLINGIRDKQSGKTILDFLKSDGFANRNFMQLIHDDSLTFKEDIQKAQVSGQGDSLHEHIANLAGSPAIKKGILQTVKVVDELVKVMGRHKPENIVIEMARENQTTQKGQKNSRERMKRIEEGIKELGSQILKEHPVENTQLQNEKLYLYYLQNGRDMYVDQELDINRLSDYDVDHIVPQSFLKDDSIDNKVLTRSDKARGKSDNVPSEEVVKKMKNYWRQLLNAKLITQRKFDNLTKAERGGLSELDKAGFIKRQLVETRQITKHVAQILDSRMNTKYDENDKLIREVKVITLKSKLVSDFRKDFQFYKVREINNYHHAHDAYLNAVVGTALIKKYPKLESEFVYGDYKVYDVRKMIAKSEQEIGKATAKYFFYSNIMNFFKTEITLANGEIRKRPLIETNGETGEIVWDKGRDFATVRKVLSMPQVNIVKKTEVQTGGFSKESILPKRNSDKLIARKKDWDPKKYGGFDSPTVAYSVLVVAKVEKGKSKKLKSVKELLGITIMERSSFEKNPIDFLEAKGYKEVKKDLIIKLPKYSLFELENGRKRMLASAGELQKGNELALPSKYVNFLYLASHYEKLKGSPEDNEQKQLFVEQHKHYLDEIIEQISEFSKRVILADANLDKVLSAYNKHRDKPIREQAENIIHLFTLTNLGAPAAFKYFDTTIDRKRYTSTKEVLDATLIHQSITGLYETRIDLSQLGGDGGGGGPAPGGTLQLDDEYRLYSPLVKPDQNIQFWLEQFPQAWAETAGMGLAKQVPPQVIQLKASATPVSVRQYPLSKEAQEGIRPHVQRLIQQGILVPVQSPWNTPLLPVRKPGTNDYRPVQDLREVNKRVQDIHPTVPNPYNLLCALPPQRSWYTVLDLKDAFFCLRLHPTSQPLFAFEWRDPGTGRTGQLTWTRLPQGFKNSPTIFNEALHRDLANFRIQHPQVTLLQYVDDLLLAGATKQDCLEGTKALLLELSDLGYRASAKKAQICRREVTYLGYSLRDGQRWLTEARKKTVVQIPAPTTAKQVREFLGTAGFCRLWIPGFATLAAPLYPLTKPKGEFSWAPEHQKAFDAIKKALLSAPALALPDVTKPFTLYVDERKGVARGVLTQTLGPWRRPVAYLSKKLDPVASGWPVCLKAIAAVAILVKDADKLTLGQNITVIAPHALENIVRQPPDRWMTNARMTHYQSLLLTERVTFAPPAALNPATLLPEETDEPVTHDCHQLLIEETGVRKDLTDIPLTGEVLTWFTDGSSYVVEGKRMAGAAVVDGTRTIWASSLPEGTSAQKAELMALTQALRLAEGKSINIYTDSRYAFATAHVHGAIYKQRGWLTSAGREIKNKEEILSLLEALHLPKRLAIIHCPGHQKAKDPISRGNQMADRVAKQAAQGVNLLAGKRTADGSEFEKRTADGSEFESPKKKAKVE

SEQ ID NO: 144 - protein, 2088 aa, synthetic construct
MPAAKRVKLDGGDKKYSIGLDIGTNSVGWAVITDEYKVPSKKFKVLGNTDRHSIKKNLIGALLFDSGETAEATRLKRTARRRYTRRKNRICYLQEIFSNEMAKVDDSFFHRLEESFLVEEDKKHERHPIFGNIVDEVAYHEKYPTIYHLRKKLVDSTDKADLRLIYLALAHMIKFRGHFLIEGDLNPDNSDVDKLFIQLVQTYNQLFEENPINASGVDAKAILSARLSKSRRLENLIAQLPGEKKNGLFGNLIALSLGLTPNFKSNFDLAEDAKLQLSKDTYDDDLDNLLAQIGDQYADLFLAAKNLSDAILLSDILRVNTEITKAPLSASMIKRYDEHHQDLTLLKALVRQQLPEKYKEIFFDQSKNGYAGYIDGGASQEEFYKFIKPILEKMDGTEELLVKLNREDLLRKQRTFDNGSIPHQIHLGELHAILRRQEDFYPFLKDNREKIEKILTFRIPYYVGPLARGNSRFAWMTRKSEETITPWNFEEVVDKGASAQSFIERMTNFDKNLPNEKVLPKHSLLYEYFTVYNELTKVKYVTEGMRKPAFLSGEQKKAIVDLLFKTNRKVTVKQLKEDYFKKIECFDSVEISGVEDRFNASLGTYHDLLKIIKDKDFLDNEENEDILEDIVLTLTLFEDREMIEERLKTYAHLFDDKVMKQLKRRRYTGWGRLSRKLINGIRDKQSGKTILDFLKSDGFANRNFMQLIHDDSLTFKEDIQKAQVSGQGDSLHEHIANLAGSPAIKKGILQTVKVVDELVKVMGRHKPENIVIEMARENQTTQKGQKNSRERMKRIEEGIKELGSQILKEHPVENTQLQNEKLYLYYLQNGRDMYVDQELDINRLSDYDVDHIVPQSFLKDDSIDNKVLTRSDKARGKSDNVPSEEVVKKMKNYWRQLLNAKLITQRKFDNLTKAERGGLSELDKAGFIKRQLVETRQITKHVAQILDSRMNTKYDENDKLIREVKVITLKSKLVSDFRKDFQFYKVREINNYHHAHDAYLNAVVGTALIKKYPKLESEFVYGDYKVYDVRKMIAKSEQEIGKATAKYFFYSNIMNFFKTEITLANGEIRKRPLIETNGETGEIVWDKGRDFATVRKVLSMPQVNIVKKTEVQTGGFSKESILPKRNSDKLIARKKDWDPKKYGGFDSPTVAYSVLVVAKVEKGKSKKLKSVKELLGITIMERSSFEKNPIDFLEAKGYKEVKKDLIIKLPKYSLFELENGRKRMLASAGELQKGNELALPSKYVNFLYLASHYEKLKGSPEDNEQKQLFVEQHKHYLDEIIEQISEFSKRVILADANLDKVLSAYNKHRDKPIREQAENIIHLFTLTNLGAPAAFKYFDTTIDRKRYTSTKEVLDATLIHQSITGLYETRIDLSQLGGDGGGGSGSSGGGGGTLQLDDEYRLYSPLVKPDQNIQFWLEQFPQAWAETAGMGLAKQVPPQVIQLKASATPVSVRQYPLSKEAQEGIRPHVQRLIQQGILVPVQSPWNTPLLPVRKPGTNDYRPVQDLREVNKRVQDIHPTVPNPYNLLCALPPQRSWYTVLDLKDAFFCLRLHPTSQPLFAFEWRDPGTGRTGQLTWTRLPQGFKNSPTIFNEALHRDLANFRIQHPQVTLLQYVDDLLLAGATKQDCLEGTKALLLELSDLGYRASAKKAQICRREVTYLGYSLRDGQRWLTEARKKTVVQIPAPTTAKQVREFLGTAGFCRLWIPGFATLAAPLYPLTKPKGEFSWAPEHQKAFDAIKKALLSAPALALPDVTKPFTLYVDERKGVARGVLTQTLGPWRRPVAYLSKKLDPVASGWPVCLKAIAAVAILVKDADKLTLGQNITVIAPHALENIVRQPPDRWMTNARMTHYQSLLLTERVTFAPPAALNPATLLPEETDEPVTHDCHQLLIEETGVRKDLTDIPLTGEVLTWFTDGSSYVVEGKRMAGAAVVDGTRTIWASSLPEGTSAQKAELMALTQALRLAEGKSINIYTDSRYAFATAHVHGAIYKQRGWLTSAGREIKNKEEILSLLEALHLPKRLAIIHCPGHQKAKDPISRGNQMADRVAKQAAQGVNLLAGKRTADGSEFEKRTADGSEFESPKKKAKVE

SEQ ID NO: 145 - protein, 2091 aa, synthetic construct
MPAAKRVKLDGGDKKYSIGLDIGTNSVGWAVITDEYKVPSKKFKVLGNTDRHSIKKNLIGALLFDSGETAEATRLKRTARRRYTRRKNRICYLQEIFSNEMAKVDDSFFHRLEESFLVEEDKKHERHPIFGNIVDEVAYHEKYPTIYHLRKKLVDSTDKADLRLIYLALAHMIKFRGHFLIEGDLNPDNSDVDKLFIQLVQTYNQLFEENPINASGVDAKAILSARLSKSRRLENLIAQLPGEKKNGLFGNLIALSLGLTPNFKSNFDLAEDAKLQLSKDTYDDDLDNLLAQIGDQYADLFLAAKNLSDAILLSDILRVNTEITKAPLSASMIKRYDEHHQDLTLLKALVRQQLPEKYKEIFFDQSKNGYAGYIDGGASQEEFYKFIKPILEKMDGTEELLVKLNREDLLRKQRTFDNGSIPHQIHLGELHAILRRQEDFYPFLKDNREKIEKILTFRIPYYVGPLARGNSRFAWMTRKSEETITPWNFEEVVDKGASAQSFIERMTNFDKNLPNEKVLPKHSLLYEYFTVYNELTKVKYVTEGMRKPAFLSGEQKKAIVDLLFKTNRKVTVKQLKEDYFKKIECFDSVEISGVEDRFNASLGTYHDLLKIIKDKDFLDNEENEDILEDIVLTLTLFEDREMIEERLKTYAHLFDDKVMKQLKRRRYTGWGRLSRKLINGIRDKQSGKTILDFLKSDGFANRNFMQLIHDDSLTFKEDIQKAQVSGQGDSLHEHIANLAGSPAIKKGILQTVKVVDELVKVMGRHKPENIVIEMARENQTTQKGQKNSRERMKRIEEGIKELGSQILKEHPVENTQLQNEKLYLYYLQNGRDMYVDQELDINRLSDYDVDHIVPQSFLKDDSIDNKVLTRSDKARGKSDNVPSEEVVKKMKNYWRQLLNAKLITQRKFDNLTKAERGGLSELDKAGFIKRQLVETRQITKHVAQILDSRMNTKYDENDKLIREVKVITLKSKLVSDFRKDFQFYKVREINNYHHAHDAYLNAVVGTALIKKYPKLESEFVYGDYKVYDVRKMIAKSEQEIGKATAKYFFYSNIMNFFKTEITLANGEIRKRPLIETNGETGEIVWDKGRDFATVRKVLSMPQVNIVKKTEVQTGGFSKESILPKRNSDKLIARKKDWDPKKYGGFDSPTVAYSVLVVAKVEKGKSKKLKSVKELLGITIMERSSFEKNPIDFLEAKGYKEVKKDLIIKLPKYSLFELENGRKRMLASAGELQKGNELALPSKYVNFLYLASHYEKLKGSPEDNEQKQLFVEQHKHYLDEIIEQISEFSKRVILADANLDKVLSAYNKHRDKPIREQAENIIHLFTLTNLGAPAAFKYFDTTIDRKRYTSTKEVLDATLIHQSITGLYETRIDLSQLGGDGGGGSGGSGGSGGSGGTLQLDDEYRLYSPLVKPDQNIQFWLEQFPQAWAETAGMGLAKQVPPQVIQLKASATPVSVRQYPLSKEAQEGIRPHVQRLIQQGILVPVQSPWNTPLLPVRKPGTNDYRPVQDLREVNKRVQDIHPTVPNPYNLLCALPPQRSWYTVLDLKDAFFCLRLHPTSQPLFAFEWRDPGTGRTGQLTWTRLPQGFKNSPTIFNEALHRDLANFRIQHPQVTLLQYVDDLLLAGATKQDCLEGTKALLLELSDLGYRASAKKAQICRREVTYLGYSLRDGQRWLTEARKKTVVQIPAPTTAKQVREFLGTAGFCRLWIPGFATLAAPLYPLTKPKGEFSWAPEHQKAFDAIKKALLSAPALALPDVTKPFTLYVDERKGVARGVLTQTLGPWRRPVAYLSKKLDPVASGWPVCLKAIAAVAILVKDADKLTLGQNITVIAPHALENIVRQPPDRWMTNARMTHYQSLLLTERVTFAPPAALNPATLLPEETDEPVTHDCHQLLIEETGVRKDLTDIPLTGEVLTWFTDGSSYVVEGKRMAGAAVVDGTRTIWASSLPEGTSAQKAELMALTQALRLAEGKSINIYTDSRYAFATAHVHGAIYKQRGWLTSAGREIKNKEEILSLLEALHLPKRLAIIHCPGHQKAKDPISRGNQMADRVAKQAAQGVNLLAGKRTADGSEFEKRTADGSEFESPKKKAKVE

SEQ ID NO: 146 - protein, 2090 aa, synthetic construct
MPAAKRVKLDGGDKKYSIGLDIGTNSVGWAVITDEYKVPSKKFKVLGNTDRHSIKKNLIGALLFDSGETAEATRLKRTARRRYTRRKNRICYLQEIFSNEMAKVDDSFFHRLEESFLVEEDKKHERHPIFGNIVDEVAYHEKYPTIYHLRKKLVDSTDKADLRLIYLALAHMIKFRGHFLIEGDLNPDNSDVDKLFIQLVQTYNQLFEENPINASGVDAKAILSARLSKSRRLENLIAQLPGEKKNGLFGNLIALSLGLTPNFKSNFDLAEDAKLQLSKDTYDDDLDNLLAQIGDQYADLFLAAKNLSDAILLSDILRVNTEITKAPLSASMIKRYDEHHQDLTLLKALVRQQLPEKYKEIFFDQSKNGYAGYIDGGASQEEFYKFIKPILEKMDGTEELLVKLNREDLLRKQRTFDNGSIPHQIHLGELHAILRRQEDFYPFLKDNREKIEKILTFRIPYYVGPLARGNSRFAWMTRKSEETITPWNFEEVVDKGASAQSFIERMTNFDKNLPNEKVLPKHSLLYEYFTVYNELTKVKYVTEGMRKPAFLSGEQKKAIVDLLFKTNRKVTVKQLKEDYFKKIECFDSVEISGVEDRFNASLGTYHDLLKIIKDKDFLDNEENEDILEDIVLTLTLFEDREMIEERLKTYAHLFDDKVMKQLKRRRYTGWGRLSRKLINGIRDKQSGKTILDFLKSDGFANRNFMQLIHDDSLTFKEDIQKAQVSGQGDSLHEHIANLAGSPAIKKGILQTVKVVDELVKVMGRHKPENIVIEMARENQTTQKGQKNSRERMKRIEEGIKELGSQILKEHPVENTQLQNEKLYLYYLQNGRDMYVDQELDINRLSDYDVDHIVPQSFLKDDSIDNKVLTRSDKARGKSDNVPSEEVVKKMKNYWRQLLNAKLITQRKFDNLTKAERGGLSELDKAGFIKRQLVETRQITKHVAQILDSRMNTKYDENDKLIREVKVITLKSKLVSDFRKDFQFYKVREINNYHHAHDAYLNAVVGTALIKKYPKLESEFVYGDYKVYDVRKMIAKSEQEIGKATAKYFFYSNIMNFFKTEITLANGEIRKRPLIETNGETGEIVWDKGRDFATVRKVLSMPQVNIVKKTEVQTGGFSKESILPKRNSDKLIARKKDWDPKKYGGFDSPTVAYSVLVVAKVEKGKSKKLKSVKELLGITIMERSSFEKNPIDFLEAKGYKEVKKDLIIKLPKYSLFELENGRKRMLASAGELQKGNELALPSKYVNFLYLASHYEKLKGSPEDNEQKQLFVEQHKHYLDEIIEQISEFSKRVILADANLDKVLSAYNKHRDKPIREQAENIIHLFTLTNLGAPAAFKYFDTTIDRKRYTSTKEVLDATLIHQSITGLYETRIDLSQLGGDGGEAAAKGGGGSSGGTLQLDDEYRLYSPLVKPDQNIQFWLEQFPQAWAETAGMGLAKQVPPQVIQLKASATPVSVRQYPLSKEAQEGIRPHVQRLIQQGILVPVQSPWNTPLLPVRKPGTNDYRPVQDLREVNKRVQDIHPTVPNPYNLLCALPPQRSWYTVLDLKDAFFCLRLHPTSQPLFAFEWRDPGTGRTGQLTWTRLPQGFKNSPTIFNEALHRDLANFRIQHPQVTLLQYVDDLLLAGATKQDCLEGTKALLLELSDLGYRASAKKAQICRREVTYLGYSLRDGQRWLTEARKKTVVQIPAPTTAKQVREFLGTAGFCRLWIPGFATLAAPLYPLTKPKGEFSWAPEHQKAFDAIKKALLSAPALALPDVTKPFTLYVDERKGVARGVLTQTLGPWRRPVAYLSKKLDPVASGWPVCLKAIAAVAILVKDADKLTLGQNITVIAPHALENIVRQPPDRWMTNARMTHYQSLLLTERVTFAPPAALNPATLLPEETDEPVTHDCHQLLIEETGVRKDLTDIPLTGEVLTWFTDGSSYVVEGKRMAGAAVVDGTRTIWASSLPEGTSAQKAELMALTQALRLAEGKSINIYTDSRYAFATAHVHGAIYKQRGWLTSAGREIKNKEEILSLLEALHLPKRLAIIHCPGHQKAKDPISRGNQMADRVAKQAAQGVNLLAGKRTADGSEFEKRTADGSEFESPKKKAKVE

SEQ ID NO: 147 - protein, 2084 aa, synthetic construct
MPAAKRVKLDGGDKKYSIGLDIGTNSVGWAVITDEYKVPSKKFKVLGNTDRHSIKKNLIGALLFDSGETAEATRLKRTARRRYTRRKNRICYLQEIFSNEMAKVDDSFFHRLEESFLVEEDKKHERHPIFGNIVDEVAYHEKYPTIYHLRKKLVDSTDKADLRLIYLALAHMIKFRGHFLIEGDLNPDNSDVDKLFIQLVQTYNQLFEENPINASGVDAKAILSARLSKSRRLENLIAQLPGEKKNGLFGNLIALSLGLTPNFKSNFDLAEDAKLQLSKDTYDDDLDNLLAQIGDQYADLFLAAKNLSDAILLSDILRVNTEITKAPLSASMIKRYDEHHQDLTLLKALVRQQLPEKYKEIFFDQSKNGYAGYIDGGASQEEFYKFIKPILEKMDGTEELLVKLNREDLLRKQRTFDNGSIPHQIHLGELHAILRRQEDFYPFLKDNREKIEKILTFRIPYYVGPLARGNSRFAWMTRKSEETITPWNFEEVVDKGASAQSFIERMTNFDKNLPNEKVLPKHSLLYEYFTVYNELTKVKYVTEGMRKPAFLSGEQKKAIVDLLFKTNRKVTVKQLKEDYFKKIECFDSVEISGVEDRFNASLGTYHDLLKIIKDKDFLDNEENEDILEDIVLTLTLFEDREMIEERLKTYAHLFDDKVMKQLKRRRYTGWGRLSRKLINGIRDKQSGKTILDFLKSDGFANRNFMQLIHDDSLTFKEDIQKAQVSGQGDSLHEHIANLAGSPAIKKGILQTVKVVDELVKVMGRHKPENIVIEMARENQTTQKGQKNSRERMKRIEEGIKELGSQILKEHPVENTQLQNEKLYLYYLQNGRDMYVDQELDINRLSDYDVDHIVPQSFLKDDSIDNKVLTRSDKARGKSDNVPSEEVVKKMKNYWRQLLNAKLITQRKFDNLTKAERGGLSELDKAGFIKRQLVETRQITKHVAQILDSRMNTKYDENDKLIREVKVITLKSKLVSDFRKDFQFYKVREINNYHHAHDAYLNAVVGTALIKKYPKLESEFVYGDYKVYDVRKMIAKSEQEIGKATAKYFFYSNIMNFFKTEITLANGEIRKRPLIETNGETGEIVWDKGRDFATVRKVLSMPQVNIVKKTEVQTGGFSKESILPKRNSDKLIARKKDWDPKKYGGFDSPTVAYSVLVVAKVEKGKSKKLKSVKELLGITIMERSSFEKNPIDFLEAKGYKEVKKDLIIKLPKYSLFELENGRKRMLASAGELQKGNELALPSKYVNFLYLASHYEKLKGSPEDNEQKQLFVEQHKHYLDEIIEQISEFSKRVILADANLDKVLSAYNKHRDKPIREQAENIIHLFTLTNLGAPAAFKYFDTTIDRKRYTSTKEVLDATLIHQSITGLYETRIDLSQLGGDGGGGGGSGGTLQLDDEYRLYSPLVKPDQNIQFWLEQFPQAWAETAGMGLAKQVPPQVIQLKASATPVSVRQYPLSKEAQEGIRPHVQRLIQQGILVPVQSPWNTPLLPVRKPGTNDYRPVQDLREVNKRVQDIHPTVPNPYNLLCALPPQRSWYTVLDLKDAFFCLRLHPTSQPLFAFEWRDPGTGRTGQLTWTRLPQGFKNSPTIFNEALHRDLANFRIQHPQVTLLQYVDDLLLAGATKQDCLEGTKALLLELSDLGYRASAKKAQICRREVTYLGYSLRDGQRWLTEARKKTVVQIPAPTTAKQVREFLGTAGFCRLWIPGFATLAAPLYPLTKPKGEFSWAPEHQKAFDAIKKALLSAPALALPDVTKPFTLYVDERKGVARGVLTQTLGPWRRPVAYLSKKLDPVASGWPVCLKAIAAVAILVKDADKLTLGQNITVIAPHALENIVRQPPDRWMTNARMTHYQSLLLTERVTFAPPAALNPATLLPEETDEPVTHDCHQLLIEETGVRKDLTDIPLTGEVLTWFTDGSSYVVEGKRMAGAAVVDGTRTIWASSLPEGTSAQKAELMALTQALRLAEGKSINIYTDSRYAFATAHVHGAIYKQRGWLTSAGREIKNKEEILSLLEALHLPKRLAIIHCPGHQKAKDPISRGNQMADRVAKQAAQGVNLLAGKRTADGSEFEKRTADGSEFESPKKKAKVE

SEQ ID NO: 148 - protein, 2085 aa, synthetic construct
MPAAKRVKLDGGDKKYSIGLDIGTNSVGWAVITDEYKVPSKKFKVLGNTDRHSIKKNLIGALLFDSGETAEATRLKRTARRRYTRRKNRICYLQEIFSNEMAKVDDSFFHRLEESFLVEEDKKHERHPIFGNIVDEVAYHEKYPTIYHLRKKLVDSTDKADLRLIYLALAHMIKFRGHFLIEGDLNPDNSDVDKLFIQLVQTYNQLFEENPINASGVDAKAILSARLSKSRRLENLIAQLPGEKKNGLFGNLIALSLGLTPNFKSNFDLAEDAKLQLSKDTYDDDLDNLLAQIGDQYADLFLAAKNLSDAILLSDILRVNTEITKAPLSASMIKRYDEHHQDLTLLKALVRQQLPEKYKEIFFDQSKNGYAGYIDGGASQEEFYKFIKPILEKMDGTEELLVKLNREDLLRKQRTFDNGSIPHQIHLGELHAILRRQEDFYPFLKDNREKIEKILTFRIPYYVGPLARGNSRFAWMTRKSEETITPWNFEEVVDKGASAQSFIERMTNFDKNLPNEKVLPKHSLLYEYFTVYNELTKVKYVTEGMRKPAFLSGEQKKAIVDLLFKTNRKVTVKQLKEDYFKKIECFDSVEISGVEDRFNASLGTYHDLLKIIKDKDFLDNEENEDILEDIVLTLTLFEDREMIEERLKTYAHLFDDKVMKQLKRRRYTGWGRLSRKLINGIRDKQSGKTILDFLKSDGFANRNFMQLIHDDSLTFKEDIQKAQVSGQGDSLHEHIANLAGSPAIKKGILQTVKVVDELVKVMGRHKPENIVIEMARENQTTQKGQKNSRERMKRIEEGIKELGSQILKEHPVENTQLQNEKLYLYYLQNGRDMYVDQELDINRLSDYDVDHIVPQSFLKDDSIDNKVLTRSDKARGKSDNVPSEEVVKKMKNYWRQLLNAKLITQRKFDNLTKAERGGLSELDKAGFIKRQLVETRQITKHVAQILDSRMNTKYDENDKLIREVKVITLKSKLVSDFRKDFQFYKVREINNYHHAHDAYLNAVVGTALIKKYPKLESEFVYGDYKVYDVRKMIAKSEQEIGKATAKYFFYSNIMNFFKTEITLANGEIRKRPLIETNGETGEIVWDKGRDFATVRKVLSMPQVNIVKKTEVQTGGFSKESILPKRNSDKLIARKKDWDPKKYGGFDSPTVAYSVLVVAKVEKGKSKKLKSVKELLGITIMERSSFEKNPIDFLEAKGYKEVKKDLIIKLPKYSLFELENGRKRMLASAGELQKGNELALPSKYVNFLYLASHYEKLKGSPEDNEQKQLFVEQHKHYLDEIIEQISEFSKRVILADANLDKVLSAYNKHRDKPIREQAENIIHLFTLTNLGAPAAFKYFDTTIDRKRYTSTKEVLDATLIHQSITGLYETRIDLSQLGGDGGGSSPAPGGTLQLDDEYRLYSPLVKPDQNIQFWLEQFPQAWAETAGMGLAKQVPPQVIQLKASATPVSVRQYPLSKEAQEGIRPHVQRLIQQGILVPVQSPWNTPLLPVRKPGTNDYRPVQDLREVNKRVQDIHPTVPNPYNLLCALPPQRSWYTVLDLKDAFFCLRLHPTSQPLFAFEWRDPGTGRTGQLTWTRLPQGFKNSPTIFNEALHRDLANFRIQHPQVTLLQYVDDLLLAGATKQDCLEGTKALLLELSDLGYRASAKKAQICRREVTYLGYSLRDGQRWLTEARKKTVVQIPAPTTAKQVREFLGTAGFCRLWIPGFATLAAPLYPLTKPKGEFSWAPEHQKAFDAIKKALLSAPALALPDVTKPFTLYVDERKGVARGVLTQTLGPWRRPVAYLSKKLDPVASGWPVCLKAIAAVAILVKDADKLTLGQNITVIAPHALENIVRQPPDRWMTNARMTHYQSLLLTERVTFAPPAALNPATLLPEETDEPVTHDCHQLLIEETGVRKDLTDIPLTGEVLTWFTDGSSYVVEGKRMAGAAVVDGTRTIWASSLPEGTSAQKAELMALTQALRLAEGKSINIYTDSRYAFATAHVHGAIYKQRGWLTSAGREIKNKEEILSLLEALHLPKRLAIIHCPGHQKAKDPISRGNQMADRVAKQAAQGVNLLAGKRTADGSEFEKRTADGSEFESPKKKAKVE

SEQ ID NO: 149 - protein, 2083 aa, synthetic construct
MPAAKRVKLDGGDKKYSIGLDIGTNSVGWAVITDEYKVPSKKFKVLGNTDRHSIKKNLIGALLFDSGETAEATRLKRTARRRYTRRKNRICYLQEIFSNEMAKVDDSFFHRLEESFLVEEDKKHERHPIFGNIVDEVAYHEKYPTIYHLRKKLVDSTDKADLRLIYLALAHMIKFRGHFLIEGDLNPDNSDVDKLFIQLVQTYNQLFEENPINASGVDAKAILSARLSKSRRLENLIAQLPGEKKNGLFGNLIALSLGLTPNFKSNFDLAEDAKLQLSKDTYDDDLDNLLAQIGDQYADLFLAAKNLSDAILLSDILRVNTEITKAPLSASMIKRYDEHHQDLTLLKALVRQQLPEKYKEIFFDQSKNGYAGYIDGGASQEEFYKFIKPILEKMDGTEELLVKLNREDLLRKQRTFDNGSIPHQIHLGELHAILRRQEDFYPFLKDNREKIEKILTFRIPYYVGPLARGNSRFAWMTRKSEETITPWNFEEVVDKGASAQSFIERMTNFDKNLPNEKVLPKHSLLYEYFTVYNELTKVKYVTEGMRKPAFLSGEQKKAIVDLLFKTNRKVTVKQLKEDYFKKIECFDSVEISGVEDRFNASLGTYHDLLKIIKDKDFLDNEENEDILEDIVLTLTLFEDREMIEERLKTYAHLFDDKVMKQLKRRRYTGWGRLSRKLINGIRDKQSGKTILDFLKSDGFANRNFMQLIHDDSLTFKEDIQKAQVSGQGDSLHEHIANLAGSPAIKKGILQTVKVVDELVKVMGRHKPENIVIEMARENQTTQKGQKNSRERMKRIEEGIKELGSQILKEHPVENTQLQNEKLYLYYLQNGRDMYVDQELDINRLSDYDVDHIVPQSFLKDDSIDNKVLTRSDKARGKSDNVPSEEVVKKMKNYWRQLLNAKLITQRKFDNLTKAERGGLSELDKAGFIKRQLVETRQITKHVAQILDSRMNTKYDENDKLIREVKVITLKSKLVSDFRKDFQFYKVREINNYHHAHDAYLNAVVGTALIKKYPKLESEFVYGDYKVYDVRKMIAKSEQEIGKATAKYFFYSNIMNFFKTEITLANGEIRKRPLIETNGETGEIVWDKGRDFATVRKVLSMPQVNIVKKTEVQTGGFSKESILPKRNSDKLIARKKDWDPKKYGGFDSPTVAYSVLVVAKVEKGKSKKLKSVKELLGITIMERSSFEKNPIDFLEAKGYKEVKKDLIIKLPKYSLFELENGRKRMLASAGELQKGNELALPSKYVNFLYLASHYEKLKGSPEDNEQKQLFVEQHKHYLDEIIEQISEFSKRVILADANLDKVLSAYNKHRDKPIREQAENIIHLFTLTNLGAPAAFKYFDTTIDRKRYTSTKEVLDATLIHQSITGLYETRIDLSQLGGDGGGGGGGGTLQLDDEYRLYSPLVKPDQNIQFWLEQFPQAWAETAGMGLAKQVPPQVIQLKASATPVSVRQYPLSKEAQEGIRPHVQRLIQQGILVPVQSPWNTPLLPVRKPGTNDYRPVQDLREVNKRVQDIHPTVPNPYNLLCALPPQRSWYTVLDLKDAFFCLRLHPTSQPLFAFEWRDPGTGRTGQLTWTRLPQGFKNSPTIFNEALHRDLANFRIQHPQVTLLQYVDDLLLAGATKQDCLEGTKALLLELSDLGYRASAKKAQICRREVTYLGYSLRDGQRWLTEARKKTVVQIPAPTTAKQVREFLGTAGFCRLWIPGFATLAAPLYPLTKPKGEFSWAPEHQKAFDAIKKALLSAPALALPDVTKPFTLYVDERKGVARGVLTQTLGPWRRPVAYLSKKLDPVASGWPVCLKAIAAVAILVKDADKLTLGQNITVIAPHALENIVRQPPDRWMTNARMTHYQSLLLTERVTFAPPAALNPATLLPEETDEPVTHDCHQLLIEETGVRKDLTDIPLTGEVLTWFTDGSSYVVEGKRMAGAAVVDGTRTIWASSLPEGTSAQKAELMALTQALRLAEGKSINIYTDSRYAFATAHVHGAIYKQRGWLTSAGREIKNKEEILSLLEALHLPKRLAIIHCPGHQKAKDPISRGNQMADRVAKQAAQGVNLLAGKRTADGSEFEKRTADGSEFESPKKKAKVE

SEQ ID NO: 150 - protein, 2104 aa, synthetic construct
MPAAKRVKLDGGDKKYSIGLDIGTNSVGWAVITDEYKVPSKKFKVLGNTDRHSIKKNLIGALLFDSGETAEATRLKRTARRRYTRRKNRICYLQEIFSNEMAKVDDSFFHRLEESFLVEEDKKHERHPIFGNIVDEVAYHEKYPTIYHLRKKLVDSTDKADLRLIYLALAHMIKFRGHFLIEGDLNPDNSDVDKLFIQLVQTYNQLFEENPINASGVDAKAILSARLSKSRRLENLIAQLPGEKKNGLFGNLIALSLGLTPNFKSNFDLAEDAKLQLSKDTYDDDLDNLLAQIGDQYADLFLAAKNLSDAILLSDILRVNTEITKAPLSASMIKRYDEHHQDLTLLKALVRQQLPEKYKEIFFDQSKNGYAGYIDGGASQEEFYKFIKPILEKMDGTEELLVKLNREDLLRKQRTFDNGSIPHQIHLGELHAILRRQEDFYPFLKDNREKIEKILTFRIPYYVGPLARGNSRFAWMTRKSEETITPWNFEEVVDKGASAQSFIERMTNFDKNLPNEKVLPKHSLLYEYFTVYNELTKVKYVTEGMRKPAFLSGEQKKAIVDLLFKTNRKVTVKQLKEDYFKKIECFDSVEISGVEDRFNASLGTYHDLLKIIKDKDFLDNEENEDILEDIVLTLTLFEDREMIEERLKTYAHLFDDKVMKQLKRRRYTGWGRLSRKLINGIRDKQSGKTILDFLKSDGFANRNFMQLIHDDSLTFKEDIQKAQVSGQGDSLHEHIANLAGSPAIKKGILQTVKVVDELVKVMGRHKPENIVIEMARENQTTQKGQKNSRERMKRIEEGIKELGSQILKEHPVENTQLQNEKLYLYYLQNGRDMYVDQELDINRLSDYDVDHIVPQSFLKDDSIDNKVLTRSDKARGKSDNVPSEEVVKKMKNYWRQLLNAKLITQRKFDNLTKAERGGLSELDKAGFIKRQLVETRQITKHVAQILDSRMNTKYDENDKLIREVKVITLKSKLVSDFRKDFQFYKVREINNYHHAHDAYLNAVVGTALIKKYPKLESEFVYGDYKVYDVRKMIAKSEQEIGKATAKYFFYSNIMNFFKTEITLANGEIRKRPLIETNGETGEIVWDKGRDFATVRKVLSMPQVNIVKKTEVQTGGFSKESILPKRNSDKLIARKKDWDPKKYGGFDSPTVAYSVLVVAKVEKGKSKKLKSVKELLGITIMERSSFEKNPIDFLEAKGYKEVKKDLIIKLPKYSLFELENGRKRMLASAGELQKGNELALPSKYVNFLYLASHYEKLKGSPEDNEQKQLFVEQHKHYLDEIIEQISEFSKRVILADANLDKVLSAYNKHRDKPIREQAENIIHLFTLTNLGAPAAFKYFDTTIDRKRYTSTKEVLDATLIHQSITGLYETRIDLSQLGGDGGEAAAKEAAAKEAAAKEAAAKEAAAKGGTLQLDDEYRLYSPLVKPDQNIQFWLEQFPQAWAETAGMGLAKQVPPQVIQLKASATPVSVRQYPLSKEAQEGIRPHVQRLIQQGILVPVQSPWNTPLLPVRKPGTNDYRPVQDLREVNKRVQDIHPTVPNPYNLLCALPPQRSWYTVLDLKDAFFCLRLHPTSQPLFAFEWRDPGTGRTGQLTWTRLPQGFKNSPTIFNEALHRDLANFRIQHPQVTLLQYVDDLLLAGATKQDCLEGTKALLLELSDLGYRASAKKAQICRREVTYLGYSLRDGQRWLTEARKKTVVQIPAPTTAKQVREFLGTAGFCRLWIPGFATLAAPLYPLTKPKGEFSWAPEHQKAFDAIKKALLSAPALALPDVTKPFTLYVDERKGVARGVLTQTLGPWRRPVAYLSKKLDPVASGWPVCLKAIAAVAILVKDADKLTLGQNITVIAPHALENIVRQPPDRWMTNARMTHYQSLLLTERVTFAPPAALNPATLLPEETDEPVTHDCHQLLIEETGVRKDLTDIPLTGEVLTWFTDGSSYVVEGKRMAGAAVVDGTRTIWASSLPEGTSAQKAELMALTQALRLAEGKSINIYTDSRYAFATAHVHGAIYKQRGWLTSAGREIKNKEEILSLLEALHLPKRLAIIHCPGHQKAKDPISRGNQMADRVAKQAAQGVNLLAGKRTADGSEFEKRTADGSEFESPKKKAKVE

SEQ ID NO: 151 - protein, 2084 aa, synthetic construct
MPAAKRVKLDGGDKKYSIGLDIGTNSVGWAVITDEYKVPSKKFKVLGNTDRHSIKKNLIGALLFDSGETAEATRLKRTARRRYTRRKNRICYLQEIFSNEMAKVDDSFFHRLEESFLVEEDKKHERHPIFGNIVDEVAYHEKYPTIYHLRKKLVDSTDKADLRLIYLALAHMIKFRGHFLIEGDLNPDNSDVDKLFIQLVQTYNQLFEENPINASGVDAKAILSARLSKSRRLENLIAQLPGEKKNGLFGNLIALSLGLTPNFKSNFDLAEDAKLQLSKDTYDDDLDNLLAQIGDQYADLFLAAKNLSDAILLSDILRVNTEITKAPLSASMIKRYDEHHQDLTLLKALVRQQLPEKYKEIFFDQSKNGYAGYIDGGASQEEFYKFIKPILEKMDGTEELLVKLNREDLLRKQRTFDNGSIPHQIHLGELHAILRRQEDFYPFLKDNREKIEKILTFRIPYYVGPLARGNSRFAWMTRKSEETITPWNFEEVVDKGASAQSFIERMTNFDKNLPNEKVLPKHSLLYEYFTVYNELTKVKYVTEGMRKPAFLSGEQKKAIVDLLFKTNRKVTVKQLKEDYFKKIECFDSVEISGVEDRFNASLGTYHDLLKIIKDKDFLDNEENEDILEDIVLTLTLFEDREMIEERLKTYAHLFDDKVMKQLKRRRYTGWGRLSRKLINGIRDKQSGKTILDFLKSDGFANRNFMQLIHDDSLTFKEDIQKAQVSGQGDSLHEHIANLAGSPAIKKGILQTVKVVDELVKVMGRHKPENIVIEMARENQTTQKGQKNSRERMKRIEEGIKELGSQILKEHPVENTQLQNEKLYLYYLQNGRDMYVDQELDINRLSDYDVDHIVPQSFLKDDSIDNKVLTRSDKARGKSDNVPSEEVVKKMKNYWRQLLNAKLITQRKFDNLTKAERGGLSELDKAGFIKRQLVETRQITKHVAQILDSRMNTKYDENDKLIREVKVITLKSKLVSDFRKDFQFYKVREINNYHHAHDAYLNAVVGTALIKKYPKLESEFVYGDYKVYDVRKMIAKSEQEIGKATAKYFFYSNIMNFFKTEITLANGEIRKRPLIETNGETGEIVWDKGRDFATVRKVLSMPQVNIVKKTEVQTGGFSKESILPKRNSDKLIARKKDWDPKKYGGFDSPTVAYSVLVVAKVEKGKSKKLKSVKELLGITIMERSSFEKNPIDFLEAKGYKEVKKDLIIKLPKYSLFELENGRKRMLASAGELQKGNELALPSKYVNFLYLASHYEKLKGSPEDNEQKQLFVEQHKHYLDEIIEQISEFSKRVILADANLDKVLSAYNKHRDKPIREQAENIIHLFTLTNLGAPAAFKYFDTTIDRKRYTSTKEVLDATLIHQSITGLYETRIDLSQLGGDGGEAAAKGGTLQLDDEYRLYSPLVKPDQNIQFWLEQFPQAWAETAGMGLAKQVPPQVIQLKASATPVSVRQYPLSKEAQEGIRPHVQRLIQQGILVPVQSPWNTPLLPVRKPGTNDYRPVQDLREVNKRVQDIHPTVPNPYNLLCALPPQRSWYTVLDLKDAFFCLRLHPTSQPLFAFEWRDPGTGRTGQLTWTRLPQGFKNSPTIFNEALHRDLANFRIQHPQVTLLQYVDDLLLAGATKQDCLEGTKALLLELSDLGYRASAKKAQICRREVTYLGYSLRDGQRWLTEARKKTVVQIPAPTTAKQVREFLGTAGFCRLWIPGFATLAAPLYPLTKPKGEFSWAPEHQKAFDAIKKALLSAPALALPDVTKPFTLYVDERKGVARGVLTQTLGPWRRPVAYLSKKLDPVASGWPVCLKAIAAVAILVKDADKLTLGQNITVIAPHALENIVRQPPDRWMTNARMTHYQSLLLTERVTFAPPAALNPATLLPEETDEPVTHDCHQLLIEETGVRKDLTDIPLTGEVLTWFTDGSSYVVEGKRMAGAAVVDGTRTIWASSLPEGTSAQKAELMALTQALRLAEGKSINIYTDSRYAFATAHVHGAIYKQRGWLTSAGREIKNKEEILSLLEALHLPKRLAIIHCPGHQKAKDPISRGNQMADRVAKQAAQGVNLLAGKRTADGSEFEKRTADGSEFESPKKKAKVE

SEQ ID NO: 152 - protein, 2086 aa, synthetic construct
MPAAKRVKLDGGDKKYSIGLDIGTNSVGWAVITDEYKVPSKKFKVLGNTDRHSIKKNLIGALLFDSGETAEATRLKRTARRRYTRRKNRICYLQEIFSNEMAKVDDSFFHRLEESFLVEEDKKHERHPIFGNIVDEVAYHEKYPTIYHLRKKLVDSTDKADLRLIYLALAHMIKFRGHFLIEGDLNPDNSDVDKLFIQLVQTYNQLFEENPINASGVDAKAILSARLSKSRRLENLIAQLPGEKKNGLFGNLIALSLGLTPNFKSNFDLAEDAKLQLSKDTYDDDLDNLLAQIGDQYADLFLAAKNLSDAILLSDILRVNTEITKAPLSASMIKRYDEHHQDLTLLKALVRQQLPEKYKEIFFDQSKNGYAGYIDGGASQEEFYKFIKPILEKMDGTEELLVKLNREDLLRKQRTFDNGSIPHQIHLGELHAILRRQEDFYPFLKDNREKIEKILTFRIPYYVGPLARGNSRFAWMTRKSEETITPWNFEEVVDKGASAQSFIERMTNFDKNLPNEKVLPKHSLLYEYFTVYNELTKVKYVTEGMRKPAFLSGEQKKAIVDLLFKTNRKVTVKQLKEDYFKKIECFDSVEISGVEDRFNASLGTYHDLLKIIKDKDFLDNEENEDILEDIVLTLTLFEDREMIEERLKTYAHLFDDKVMKQLKRRRYTGWGRLSRKLINGIRDKQSGKTILDFLKSDGFANRNFMQLIHDDSLTFKEDIQKAQVSGQGDSLHEHIANLAGSPAIKKGILQTVKVVDELVKVMGRHKPENIVIEMARENQTTQKGQKNSRERMKRIEEGIKELGSQILKEHPVENTQLQNEKLYLYYLQNGRDMYVDQELDINRLSDYDVDHIVPQSFLKDDSIDNKVLTRSDKARGKSDNVPSEEVVKKMKNYWRQLLNAKLITQRKFDNLTKAERGGLSELDKAGFIKRQLVETRQITKHVAQILDSRMNTKYDENDKLIREVKVITLKSKLVSDFRKDFQFYKVREINNYHHAHDAYLNAVVGTALIKKYPKLESEFVYGDYKVYDVRKMIAKSEQEIGKATAKYFFYSNIMNFFKTEITLANGEIRKRPLIETNGETGEIVWDKGRDFATVRKVLSMPQVNIVKKTEVQTGGFSKESILPKRNSDKLIARKKDWDPKKYGGFDSPTVAYSVLVVAKVEKGKSKKLKSVKELLGITIMERSSFEKNPIDFLEAKGYKEVKKDLIIKLPKYSLFELENGRKRMLASAGELQKGNELALPSKYVNFLYLASHYEKLKGSPEDNEQKQLFVEQHKHYLDEIIEQISEFSKRVILADANLDKVLSAYNKHRDKPIREQAENIIHLFTLTNLGAPAAFKYFDTTIDRKRYTSTKEVLDATLIHQSITGLYETRIDLSQLGGDGGGGGGGGGGGTLQLDDEYRLYSPLVKPDQNIQFWLEQFPQAWAETAGMGLAKQVPPQVIQLKASATPVSVRQYPLSKEAQEGIRPHVQRLIQQGILVPVQSPWNTPLLPVRKPGTNDYRPVQDLREVNKRVQDIHPTVPNPYNLLCALPPQRSWYTVLDLKDAFFCLRLHPTSQPLFAFEWRDPGTGRTGQLTWTRLPQGFKNSPTIFNEALHRDLANFRIQHPQVTLLQYVDDLLLAGATKQDCLEGTKALLLELSDLGYRASAKKAQICRREVTYLGYSLRDGQRWLTEARKKTVVQIPAPTTAKQVREFLGTAGFCRLWIPGFATLAAPLYPLTKPKGEFSWAPEHQKAFDAIKKALLSAPALALPDVTKPFTLYVDERKGVARGVLTQTLGPWRRPVAYLSKKLDPVASGWPVCLKAIAAVAILVKDADKLTLGQNITVIAPHALENIVRQPPDRWMTNARMTHYQSLLLTERVTFAPPAALNPATLLPEETDEPVTHDCHQLLIEETGVRKDLTDIPLTGEVLTWFTDGSSYVVEGKRMAGAAVVDGTRTIWASSLPEGTSAQKAELMALTQALRLAEGKSINIYTDSRYAFATAHVHGAIYKQRGWLTSAGREIKNKEEILSLLEALHLPKRLAIIHCPGHQKAKDPISRGNQMADRVAKQAAQGVNLLAGKRTADGSEFEKRTADGSEFESPKKKAKVE

SEQ ID NO: 153 - protein, 2091 aa, synthetic construct
MPAAKRVKLDGGDKKYSIGLDIGTNSVGWAVITDEYKVPSKKFKVLGNTDRHSIKKNLIGALLFDSGETAEATRLKRTARRRYTRRKNRICYLQEIFSNEMAKVDDSFFHRLEESFLVEEDKKHERHPIFGNIVDEVAYHEKYPTIYHLRKKLVDSTDKADLRLIYLALAHMIKFRGHFLIEGDLNPDNSDVDKLFIQLVQTYNQLFEENPINASGVDAKAILSARLSKSRRLENLIAQLPGEKKNGLFGNLIALSLGLTPNFKSNFDLAEDAKLQLSKDTYDDDLDNLLAQIGDQYADLFLAAKNLSDAILLSDILRVNTEITKAPLSASMIKRYDEHHQDLTLLKALVRQQLPEKYKEIFFDQSKNGYAGYIDGGASQEEFYKFIKPILEKMDGTEELLVKLNREDLLRKQRTFDNGSIPHQIHLGELHAILRRQEDFYPFLKDNREKIEKILTFRIPYYVGPLARGNSRFAWMTRKSEETITPWNFEEVVDKGASAQSFIERMTNFDKNLPNEKVLPKHSLLYEYFTVYNELTKVKYVTEGMRKPAFLSGEQKKAIVDLLFKTNRKVTVKQLKEDYFKKIECFDSVEISGVEDRFNASLGTYHDLLKIIKDKDFLDNEENEDILEDIVLTLTLFEDREMIEERLKTYAHLFDDKVMKQLKRRRYTGWGRLSRKLINGIRDKQSGKTILDFLKSDGFANRNFMQLIHDDSLTFKEDIQKAQVSGQGDSLHEHIANLAGSPAIKKGILQTVKVVDELVKVMGRHKPENIVIEMARENQTTQKGQKNSRERMKRIEEGIKELGSQILKEHPVENTQLQNEKLYLYYLQNGRDMYVDQELDINRLSDYDVDHIVPQSFLKDDSIDNKVLTRSDKARGKSDNVPSEEVVKKMKNYWRQLLNAKLITQRKFDNLTKAERGGLSELDKAGFIKRQLVETRQITKHVAQILDSRMNTKYDENDKLIREVKVITLKSKLVSDFRKDFQFYKVREINNYHHAHDAYLNAVVGTALIKKYPKLESEFVYGDYKVYDVRKMIAKSEQEIGKATAKYFFYSNIMNFFKTEITLANGEIRKRPLIETNGETGEIVWDKGRDFATVRKVLSMPQVNIVKKTEVQTGGFSKESILPKRNSDKLIARKKDWDPKKYGGFDSPTVAYSVLVVAKVEKGKSKKLKSVKELLGITIMERSSFEKNPIDFLEAKGYKEVKKDLIIKLPKYSLFELENGRKRMLASAGELQKGNELALPSKYVNFLYLASHYEKLKGSPEDNEQKQLFVEQHKHYLDEIIEQISEFSKRVILADANLDKVLSAYNKHRDKPIREQAENIIHLFTLTNLGAPAAFKYFDTTIDRKRYTSTKEVLDATLIHQSITGLYETRIDLSQLGGDGGGSAGSAAGSGEFGGTLQLDDEYRLYSPLVKPDQNIQFWLEQFPQAWAETAGMGLAKQVPPQVIQLKASATPVSVRQYPLSKEAQEGIRPHVQRLIQQGILVPVQSPWNTPLLPVRKPGTNDYRPVQDLREVNKRVQDIHPTVPNPYNLLCALPPQRSWYTVLDLKDAFFCLRLHPTSQPLFAFEWRDPGTGRTGQLTWTRLPQGFKNSPTIFNEALHRDLANFRIQHPQVTLLQYVDDLLLAGATKQDCLEGTKALLLELSDLGYRASAKKAQICRREVTYLGYSLRDGQRWLTEARKKTVVQIPAPTTAKQVREFLGTAGFCRLWIPGFATLAAPLYPLTKPKGEFSWAPEHQKAFDAIKKALLSAPALALPDVTKPFTLYVDERKGVARGVLTQTLGPWRRPVAYLSKKLDPVASGWPVCLKAIAAVAILVKDADKLTLGQNITVIAPHALENIVRQPPDRWMTNARMTHYQSLLLTERVTFAPPAALNPATLLPEETDEPVTHDCHQLLIEETGVRKDLTDIPLTGEVLTWFTDGSSYVVEGKRMAGAAVVDGTRTIWASSLPEGTSAQKAELMALTQALRLAEGKSINIYTDSRYAFATAHVHGAIYKQRGWLTSAGREIKNKEEILSLLEALHLPKRLAIIHCPGHQKAKDPISRGNQMADRVAKQAAQGVNLLAGKRTADGSEFEKRTADGSEFESPKKKAKVE

SEQ ID NO: 154 - protein, 2090 aa, synthetic construct
MPAAKRVKLDGGDKKYSIGLDIGTNSVGWAVITDEYKVPSKKFKVLGNTDRHSIKKNLIGALLFDSGETAEATRLKRTARRRYTRRKNRICYLQEIFSNEMAKVDDSFFHRLEESFLVEEDKKHERHPIFGNIVDEVAYHEKYPTIYHLRKKLVDSTDKADLRLIYLALAHMIKFRGHFLIEGDLNPDNSDVDKLFIQLVQTYNQLFEENPINASGVDAKAILSARLSKSRRLENLIAQLPGEKKNGLFGNLIALSLGLTPNFKSNFDLAEDAKLQLSKDTYDDDLDNLLAQIGDQYADLFLAAKNLSDAILLSDILRVNTEITKAPLSASMIKRYDEHHQDLTLLKALVRQQLPEKYKEIFFDQSKNGYAGYIDGGASQEEFYKFIKPILEKMDGTEELLVKLNREDLLRKQRTFDNGSIPHQIHLGELHAILRRQEDFYPFLKDNREKIEKILTFRIPYYVGPLARGNSRFAWMTRKSEETITPWNFEEVVDKGASAQSFIERMTNFDKNLPNEKVLPKHSLLYEYFTVYNELTKVKYVTEGMRKPAFLSGEQKKAIVDLLFKTNRKVTVKQLKEDYFKKIECFDSVEISGVEDRFNASLGTYHDLLKIIKDKDFLDNEENEDILEDIVLTLTLFEDREMIEERLKTYAHLFDDKVMKQLKRRRYTGWGRLSRKLINGIRDKQSGKTILDFLKSDGFANRNFMQLIHDDSLTFKEDIQKAQVSGQGDSLHEHIANLAGSPAIKKGILQTVKVVDELVKVMGRHKPENIVIEMARENQTTQKGQKNSRERMKRIEEGIKELGSQILKEHPVENTQLQNEKLYLYYLQNGRDMYVDQELDINRLSDYDVDHIVPQSFLKDDSIDNKVLTRSDKARGKSDNVPSEEVVKKMKNYWRQLLNAKLITQRKFDNLTKAERGGLSELDKAGFIKRQLVETRQITKHVAQILDSRMNTKYDENDKLIREVKVITLKSKLVSDFRKDFQFYKVREINNYHHAHDAYLNAVVGTALIKKYPKLESEFVYGDYKVYDVRKMIAKSEQEIGKATAKYFFYSNIMNFFKTEITLANGEIRKRPLIETNGETGEIVWDKGRDFATVRKVLSMPQVNIVKKTEVQTGGFSKESILPKRNSDKLIARKKDWDPKKYGGFDSPTVAYSVLVVAKVEKGKSKKLKSVKELLGITIMERSSFEKNPIDFLEAKGYKEVKKDLIIKLPKYSLFELENGRKRMLASAGELQKGNELALPSKYVNFLYLASHYEKLKGSPEDNEQKQLFVEQHKHYLDEIIEQISEFSKRVILADANLDKVLSAYNKHRDKPIREQAENIIHLFTLTNLGAPAAFKYFDTTIDRKRYTSTKEVLDATLIHQSITGLYETRIDLSQLGGDGGGGSEAAAKPAPGGTLQLDDEYRLYSPLVKPDQNIQFWLEQFPQAWAETAGMGLAKQVPPQVIQLKASATPVSVRQYPLSKEAQEGIRPHVQRLIQQGILVPVQSPWNTPLLPVRKPGTNDYRPVQDLREVNKRVQDIHPTVPNPYNLLCALPPQRSWYTVLDLKDAFFCLRLHPTSQPLFAFEWRDPGTGRTGQLTWTRLPQGFKNSPTIFNEALHRDLANFRIQHPQVTLLQYVDDLLLAGATKQDCLEGTKALLLELSDLGYRASAKKAQICRREVTYLGYSLRDGQRWLTEARKKTVVQIPAPTTAKQVREFLGTAGFCRLWIPGFATLAAPLYPLTKPKGEFSWAPEHQKAFDAIKKALLSAPALALPDVTKPFTLYVDERKGVARGVLTQTLGPWRRPVAYLSKKLDPVASGWPVCLKAIAAVAILVKDADKLTLGQNITVIAPHALENIVRQPPDRWMTNARMTHYQSLLLTERVTFAPPAALNPATLLPEETDEPVTHDCHQLLIEETGVRKDLTDIPLTGEVLTWFTDGSSYVVEGKRMAGAAVVDGTRTIWASSLPEGTSAQKAELMALTQALRLAEGKSINIYTDSRYAFATAHVHGAIYKQRGWLTSAGREIKNKEEILSLLEALHLPKRLAIIHCPGHQKAKDPISRGNQMADRVAKQAAQGVNLLAGKRTADGSEFEKRTADGSEFESPKKKAKVE

SEQ ID NO: 155 - protein, 2088 aa, synthetic construct
MPAAKRVKLDGGDKKYSIGLDIGTNSVGWAVITDEYKVPSKKFKVLGNTDRHSIKKNLIGALLFDSGETAEATRLKRTARRRYTRRKNRICYLQEIFSNEMAKVDDSFFHRLEESFLVEEDKKHERHPIFGNIVDEVAYHEKYPTIYHLRKKLVDSTDKADLRLIYLALAHMIKFRGHFLIEGDLNPDNSDVDKLFIQLVQTYNQLFEENPINASGVDAKAILSARLSKSRRLENLIAQLPGEKKNGLFGNLIALSLGLTPNFKSNFDLAEDAKLQLSKDTYDDDLDNLLAQIGDQYADLFLAAKNLSDAILLSDILRVNTEITKAPLSASMIKRYDEHHQDLTLLKALVRQQLPEKYKEIFFDQSKNGYAGYIDGGASQEEFYKFIKPILEKMDGTEELLVKLNREDLLRKQRTFDNGSIPHQIHLGELHAILRRQEDFYPFLKDNREKIEKILTFRIPYYVGPLARGNSRFAWMTRKSEETITPWNFEEVVDKGASAQSFIERMTNFDKNLPNEKVLPKHSLLYEYFTVYNELTKVKYVTEGMRKPAFLSGEQKKAIVDLLFKTNRKVTVKQLKEDYFKKIECFDSVEISGVEDRFNASLGTYHDLLKIIKDKDFLDNEENEDILEDIVLTLTLFEDREMIEERLKTYAHLFDDKVMKQLKRRRYTGWGRLSRKLINGIRDKQSGKTILDFLKSDGFANRNFMQLIHDDSLTFKEDIQKAQVSGQGDSLHEHIANLAGSPAIKKGILQTVKVVDELVKVMGRHKPENIVIEMARENQTTQKGQKNSRERMKRIEEGIKELGSQILKEHPVENTQLQNEKLYLYYLQNGRDMYVDQELDINRLSDYDVDHIVPQSFLKDDSIDNKVLTRSDKARGKSDNVPSEEVVKKMKNYWRQLLNAKLITQRKFDNLTKAERGGLSELDKAGFIKRQLVETRQITKHVAQILDSRMNTKYDENDKLIREVKVITLKSKLVSDFRKDFQFYKVREINNYHHAHDAYLNAVVGTALIKKYPKLESEFVYGDYKVYDVRKMIAKSEQEIGKATAKYFFYSNIMNFFKTEITLANGEIRKRPLIETNGETGEIVWDKGRDFATVRKVLSMPQVNIVKKTEVQTGGFSKESILPKRNSDKLIARKKDWDPKKYGGFDSPTVAYSVLVVAKVEKGKSKKLKSVKELLGITIMERSSFEKNPIDFLEAKGYKEVKKDLIIKLPKYSLFELENGRKRMLASAGELQKGNELALPSKYVNFLYLASHYEKLKGSPEDNEQKQLFVEQHKHYLDEIIEQISEFSKRVILADANLDKVLSAYNKHRDKPIREQAENIIHLFTLTNLGAPAAFKYFDTTIDRKRYTSTKEVLDATLIHQSITGLYETRIDLSQLGGDGGGGSGSSPAPGGTLQLDDEYRLYSPLVKPDQNIQFWLEQFPQAWAETAGMGLAKQVPPQVIQLKASATPVSVRQYPLSKEAQEGIRPHVQRLIQQGILVPVQSPWNTPLLPVRKPGTNDYRPVQDLREVNKRVQDIHPTVPNPYNLLCALPPQRSWYTVLDLKDAFFCLRLHPTSQPLFAFEWRDPGTGRTGQLTWTRLPQGFKNSPTIFNEALHRDLANFRIQHPQVTLLQYVDDLLLAGATKQDCLEGTKALLLELSDLGYRASAKKAQICRREVTYLGYSLRDGQRWLTEARKKTVVQIPAPTTAKQVREFLGTAGFCRLWIPGFATLAAPLYPLTKPKGEFSWAPEHQKAFDAIKKALLSAPALALPDVTKPFTLYVDERKGVARGVLTQTLGPWRRPVAYLSKKLDPVASGWPVCLKAIAAVAILVKDADKLTLGQNITVIAPHALENIVRQPPDRWMTNARMTHYQSLLLTERVTFAPPAALNPATLLPEETDEPVTHDCHQLLIEETGVRKDLTDIPLTGEVLTWFTDGSSYVVEGKRMAGAAVVDGTRTIWASSLPEGTSAQKAELMALTQALRLAEGKSINIYTDSRYAFATAHVHGAIYKQRGWLTSAGREIKNKEEILSLLEALHLPKRLAIIHCPGHQKAKDPISRGNQMADRVAKQAAQGVNLLAGKRTADGSEFEKRTADGSEFESPKKKAKVE

SEQ ID NO: 156 - protein, 2125 aa, synthetic construct
MPAAKRVKLDGGDKKYSIGLDIGTNSVGWAVITDEYKVPSKKFKVLGNTDRHSIKKNLIGALLFDSGETAEATRLKRTARRRYTRRKNRICYLQEIFSNEMAKVDDSFFHRLEESFLVEEDKKHERHPIFGNIVDEVAYHEKYPTIYHLRKKLVDSTDKADLRLIYLALAHMIKFRGHFLIEGDLNPDNSDVDKLFIQLVQTYNQLFEENPINASGVDAKAILSARLSKSRRLENLIAQLPGEKKNGLFGNLIALSLGLTPNFKSNFDLAEDAKLQLSKDTYDDDLDNLLAQIGDQYADLFLAAKNLSDAILLSDILRVNTEITKAPLSASMIKRYDEHHQDLTLLKALVRQQLPEKYKEIFFDQSKNGYAGYIDGGASQEEFYKFIKPILEKMDGTEELLVKLNREDLLRKQRTFDNGSIPHQIHLGELHAILRRQEDFYPFLKDNREKIEKILTFRIPYYVGPLARGNSRFAWMTRKSEETITPWNFEEVVDKGASAQSFIERMTNFDKNLPNEKVLPKHSLLYEYFTVYNELTKVKYVTEGMRKPAFLSGEQKKAIVDLLFKTNRKVTVKQLKEDYFKKIECFDSVEISGVEDRFNASLGTYHDLLKIIKDKDFLDNEENEDILEDIVLTLTLFEDREMIEERLKTYAHLFDDKVMKQLKRRRYTGWGRLSRKLINGIRDKQSGKTILDFLKSDGFANRNFMQLIHDDSLTFKEDIQKAQVSGQGDSLHEHIANLAGSPAIKKGILQTVKVVDELVKVMGRHKPENIVIEMARENQTTQKGQKNSRERMKRIEEGIKELGSQILKEHPVENTQLQNEKLYLYYLQNGRDMYVDQELDINRLSDYDVDHIVPQSFLKDDSIDNKVLTRSDKARGKSDNVPSEEVVKKMKNYWRQLLNAKLITQRKFDNLTKAERGGLSELDKAGFIKRQLVETRQITKHVAQILDSRMNTKYDENDKLIREVKVITLKSKLVSDFRKDFQFYKVREINNYHHAHDAYLNAVVGTALIKKYPKLESEFVYGDYKVYDVRKMIAKSEQEIGKATAKYFFYSNIMNFFKTEITLANGEIRKRPLIETNGETGEIVWDKGRDFATVRKVLSMPQVNIVKKTEVQTGGFSKESILPKRNSDKLIARKKDWDPKKYGGFDSPTVAYSVLVVAKVEKGKSKKLKSVKELLGITIMERSSFEKNPIDFLEAKGYKEVKKDLIIKLPKYSLFELENGRKRMLASAGELQKGNELALPSKYVNFLYLASHYEKLKGSPEDNEQKQLFVEQHKHYLDEIIEQISEFSKRVILADANLDKVLSAYNKHRDKPIREQAENIIHLFTLTNLGAPAAFKYFDTTIDRKRYTSTKEVLDATLIHQSITGLYETRIDLSQLGGDGGAEAAAKEAAAKEAAAKEAAAKALEAEAAAKEAAAKEAAAKEAAAKAGGTLQLDDEYRLYSPLVKPDQNIQFWLEQFPQAWAETAGMGLAKQVPPQVIQLKASATPVSVRQYPLSKEAQEGIRPHVQRLIQQGILVPVQSPWNTPLLPVRKPGTNDYRPVQDLREVNKRVQDIHPTVPNPYNLLCALPPQRSWYTVLDLKDAFFCLRLHPTSQPLFAFEWRDPGTGRTGQLTWTRLPQGFKNSPTIFNEALHRDLANFRIQHPQVTLLQYVDDLLLAGATKQDCLEGTKALLLELSDLGYRASAKKAQICRREVTYLGYSLRDGQRWLTEARKKTVVQIPAPTTAKQVREFLGTAGFCRLWIPGFATLAAPLYPLTKPKGEFSWAPEHQKAFDAIKKALLSAPALALPDVTKPFTLYVDERKGVARGVLTQTLGPWRRPVAYLSKKLDPVASGWPVCLKAIAAVAILVKDADKLTLGQNITVIAPHALENIVRQPPDRWMTNARMTHYQSLLLTERVTFAPPAALNPATLLPEETDEPVTHDCHQLLIEETGVRKDLTDIPLTGEVLTWFTDGSSYVVEGKRMAGAAVVDGTRTIWASSLPEGTSAQKAELMALTQALRLAEGKSINIYTDSRYAFATAHVHGAIYKQRGWLTSAGREIKNKEEILSLLEALHLPKRLAIIHCPGHQKAKDPISRGNQMADRVAKQAAQGVNLLAGKRTADGSEFEKRTADGSEFESPKKKAKVE

SEQ ID NO: 157 - protein, 2092 aa, synthetic construct
MPAAKRVKLDGGDKKYSIGLDIGTNSVGWAVITDEYKVPSKKFKVLGNTDRHSIKKNLIGALLFDSGETAEATRLKRTARRRYTRRKNRICYLQEIFSNEMAKVDDSFFHRLEESFLVEEDKKHERHPIFGNIVDEVAYHEKYPTIYHLRKKLVDSTDKADLRLIYLALAHMIKFRGHFLIEGDLNPDNSDVDKLFIQLVQTYNQLFEENPINASGVDAKAILSARLSKSRRLENLIAQLPGEKKNGLFGNLIALSLGLTPNFKSNFDLAEDAKLQLSKDTYDDDLDNLLAQIGDQYADLFLAAKNLSDAILLSDILRVNTEITKAPLSASMIKRYDEHHQDLTLLKALVRQQLPEKYKEIFFDQSKNGYAGYIDGGASQEEFYKFIKPILEKMDGTEELLVKLNREDLLRKQRTFDNGSIPHQIHLGELHAILRRQEDFYPFLKDNREKIEKILTFRIPYYVGPLARGNSRFAWMTRKSEETITPWNFEEVVDKGASAQSFIERMTNFDKNLPNEKVLPKHSLLYEYFTVYNELTKVKYVTEGMRKPAFLSGEQKKAIVDLLFKTNRKVTVKQLKEDYFKKIECFDSVEISGVEDRFNASLGTYHDLLKIIKDKDFLDNEENEDILEDIVLTLTLFEDREMIEERLKTYAHLFDDKVMKQLKRRRYTGWGRLSRKLINGIRDKQSGKTILDFLKSDGFANRNFMQLIHDDSLTFKEDIQKAQVSGQGDSLHEHIANLAGSPAIKKGILQTVKVVDELVKVMGRHKPENIVIEMARENQTTQKGQKNSRERMKRIEEGIKELGSQILKEHPVENTQLQNEKLYLYYLQNGRDMYVDQELDINRLSDYDVDHIVPQSFLKDDSIDNKVLTRSDKARGKSDNVPSEEVVKKMKNYWRQLLNAKLITQRKFDNLTKAERGGLSELDKAGFIKRQLVETRQITKHVAQILDSRMNTKYDENDKLIREVKVITLKSKLVSDFRKDFQFYKVREINNYHHAHDAYLNAVVGTALIKKYPKLESEFVYGDYKVYDVRKMIAKSEQEIGKATAKYFFYSNIMNFFKTEITLANGEIRKRPLIETNGETGEIVWDKGRDFATVRKVLSMPQVNIVKKTEVQTGGFSKESILPKRNSDKLIARKKDWDPKKYGGFDSPTVAYSVLVVAKVEKGKSKKLKSVKELLGITIMERSSFEKNPIDFLEAKGYKEVKKDLIIKLPKYSLFELENGRKRMLASAGELQKGNELALPSKYVNFLYLASHYEKLKGSPEDNEQKQLFVEQHKHYLDEIIEQISEFSKRVILADANLDKVLSAYNKHRDKPIREQAENIIHLFTLTNLGAPAAFKYFDTTIDRKRYTSTKEVLDATLIHQSITGLYETRIDLSQLGGDGGPAPAPAPAPAPAPGGTLQLDDEYRLYSPLVKPDQNIQFWLEQFPQAWAETAGMGLAKQVPPQVIQLKASATPVSVRQYPLSKEAQEGIRPHVQRLIQQGILVPVQSPWNTPLLPVRKPGTNDYRPVQDLREVNKRVQDIHPTVPNPYNLLCALPPQRSWYTVLDLKDAFFCLRLHPTSQPLFAFEWRDPGTGRTGQLTWTRLPQGFKNSPTIFNEALHRDLANFRIQHPQVTLLQYVDDLLLAGATKQDCLEGTKALLLELSDLGYRASAKKAQICRREVTYLGYSLRDGQRWLTEARKKTVVQIPAPTTAKQVREFLGTAGFCRLWIPGFATLAAPLYPLTKPKGEFSWAPEHQKAFDAIKKALLSAPALALPDVTKPFTLYVDERKGVARGVLTQTLGPWRRPVAYLSKKLDPVASGWPVCLKAIAAVAILVKDADKLTLGQNITVIAPHALENIVRQPPDRWMTNARMTHYQSLLLTERVTFAPPAALNPATLLPEETDEPVTHDCHQLLIEETGVRKDLTDIPLTGEVLTWFTDGSSYVVEGKRMAGAAVVDGTRTIWASSLPEGTSAQKAELMALTQALRLAEGKSINIYTDSRYAFATAHVHGAIYKQRGWLTSAGREIKNKEEILSLLEALHLPKRLAIIHCPGHQKAKDPISRGNQMADRVAKQAAQGVNLLAGKRTADGSEFEKRTADGSEFESPKKKAKVE

SEQ ID NO: 158 - protein, 2087 aa, synthetic construct
MPAAKRVKLDGGDKKYSIGLDIGTNSVGWAVITDEYKVPSKKFKVLGNTDRHSIKKNLIGALLFDSGETAEATRLKRTARRRYTRRKNRICYLQEIFSNEMAKVDDSFFHRLEESFLVEEDKKHERHPIFGNIVDEVAYHEKYPTIYHLRKKLVDSTDKADLRLIYLALAHMIKFRGHFLIEGDLNPDNSDVDKLFIQLVQTYNQLFEENPINASGVDAKAILSARLSKSRRLENLIAQLPGEKKNGLFGNLIALSLGLTPNFKSNFDLAEDAKLQLSKDTYDDDLDNLLAQIGDQYADLFLAAKNLSDAILLSDILRVNTEITKAPLSASMIKRYDEHHQDLTLLKALVRQQLPEKYKEIFFDQSKNGYAGYIDGGASQEEFYKFIKPILEKMDGTEELLVKLNREDLLRKQRTFDNGSIPHQIHLGELHAILRRQEDFYPFLKDNREKIEKILTFRIPYYVGPLARGNSRFAWMTRKSEETITPWNFEEVVDKGASAQSFIERMTNFDKNLPNEKVLPKHSLLYEYFTVYNELTKVKYVTEGMRKPAFLSGEQKKAIVDLLFKTNRKVTVKQLKEDYFKKIECFDSVEISGVEDRFNASLGTYHDLLKIIKDKDFLDNEENEDILEDIVLTLTLFEDREMIEERLKTYAHLFDDKVMKQLKRRRYTGWGRLSRKLINGIRDKQSGKTILDFLKSDGFANRNFMQLIHDDSLTFKEDIQKAQVSGQGDSLHEHIANLAGSPAIKKGILQTVKVVDELVKVMGRHKPENIVIEMARENQTTQKGQKNSRERMKRIEEGIKELGSQILKEHPVENTQLQNEKLYLYYLQNGRDMYVDQELDINRLSDYDVDHIVPQSFLKDDSIDNKVLTRSDKARGKSDNVPSEEVVKKMKNYWRQLLNAKLITQRKFDNLTKAERGGLSELDKAGFIKRQLVETRQITKHVAQILDSRMNTKYDENDKLIREVKVITLKSKLVSDFRKDFQFYKVREINNYHHAHDAYLNAVVGTALIKKYPKLESEFVYGDYKVYDVRKMIAKSEQEIGKATAKYFFYSNIMNFFKTEITLANGEIRKRPLIETNGETGEIVWDKGRDFATVRKVLSMPQVNIVKKTEVQTGGFSKESILPKRNSDKLIARKKDWDPKKYGGFDSPTVAYSVLVVAKVEKGKSKKLKSVKELLGITIMERSSFEKNPIDFLEAKGYKEVKKDLIIKLPKYSLFELENGRKRMLASAGELQKGNELALPSKYVNFLYLASHYEKLKGSPEDNEQKQLFVEQHKHYLDEIIEQISEFSKRVILADANLDKVLSAYNKHRDKPIREQAENIIHLFTLTNLGAPAAFKYFDTTIDRKRYTSTKEVLDATLIHQSITGLYETRIDLSQLGGDGGEAAAKGGSGGTLQLDDEYRLYSPLVKPDQNIQFWLEQFPQAWAETAGMGLAKQVPPQVIQLKASATPVSVRQYPLSKEAQEGIRPHVQRLIQQGILVPVQSPWNTPLLPVRKPGTNDYRPVQDLREVNKRVQDIHPTVPNPYNLLCALPPQRSWYTVLDLKDAFFCLRLHPTSQPLFAFEWRDPGTGRTGQLTWTRLPQGFKNSPTIFNEALHRDLANFRIQHPQVTLLQYVDDLLLAGATKQDCLEGTKALLLELSDLGYRASAKKAQICRREVTYLGYSLRDGQRWLTEARKKTVVQIPAPTTAKQVREFLGTAGFCRLWIPGFATLAAPLYPLTKPKGEFSWAPEHQKAFDAIKKALLSAPALALPDVTKPFTLYVDERKGVARGVLTQTLGPWRRPVAYLSKKLDPVASGWPVCLKAIAAVAILVKDADKLTLGQNITVIAPHALENIVRQPPDRWMTNARMTHYQSLLLTERVTFAPPAALNPATLLPEETDEPVTHDCHQLLIEETGVRKDLTDIPLTGEVLTWFTDGSSYVVEGKRMAGAAVVDGTRTIWASSLPEGTSAQKAELMALTQALRLAEGKSINIYTDSRYAFATAHVHGAIYKQRGWLTSAGREIKNKEEILSLLEALHLPKRLAIIHCPGHQKAKDPISRGNQMADRVAKQAAQGVNLLAGKRTADGSEFEKRTADGSEFESPKKKAKVE

SEQ ID NO: 159 - protein, 2094 aa, synthetic construct
MPAAKRVKLDGGDKKYSIGLDIGTNSVGWAVITDEYKVPSKKFKVLGNTDRHSIKKNLIGALLFDSGETAEATRLKRTARRRYTRRKNRICYLQEIFSNEMAKVDDSFFHRLEESFLVEEDKKHERHPIFGNIVDEVAYHEKYPTIYHLRKKLVDSTDKADLRLIYLALAHMIKFRGHFLIEGDLNPDNSDVDKLFIQLVQTYNQLFEENPINASGVDAKAILSARLSKSRRLENLIAQLPGEKKNGLFGNLIALSLGLTPNFKSNFDLAEDAKLQLSKDTYDDDLDNLLAQIGDQYADLFLAAKNLSDAILLSDILRVNTEITKAPLSASMIKRYDEHHQDLTLLKALVRQQLPEKYKEIFFDQSKNGYAGYIDGGASQEEFYKFIKPILEKMDGTEELLVKLNREDLLRKQRTFDNGSIPHQIHLGELHAILRRQEDFYPFLKDNREKIEKILTFRIPYYVGPLARGNSRFAWMTRKSEETITPWNFEEVVDKGASAQSFIERMTNFDKNLPNEKVLPKHSLLYEYFTVYNELTKVKYVTEGMRKPAFLSGEQKKAIVDLLFKTNRKVTVKQLKEDYFKKIECFDSVEISGVEDRFNASLGTYHDLLKIIKDKDFLDNEENEDILEDIVLTLTLFEDREMIEERLKTYAHLFDDKVMKQLKRRRYTGWGRLSRKLINGIRDKQSGKTILDFLKSDGFANRNFMQLIHDDSLTFKEDIQKAQVSGQGDSLHEHIANLAGSPAIKKGILQTVKVVDELVKVMGRHKPENIVIEMARENQTTQKGQKNSRERMKRIEEGIKELGSQILKEHPVENTQLQNEKLYLYYLQNGRDMYVDQELDINRLSDYDVDHIVPQSFLKDDSIDNKVLTRSDKARGKSDNVPSEEVVKKMKNYWRQLLNAKLITQRKFDNLTKAERGGLSELDKAGFIKRQLVETRQITKHVAQILDSRMNTKYDENDKLIREVKVITLKSKLVSDFRKDFQFYKVREINNYHHAHDAYLNAVVGTALIKKYPKLESEFVYGDYKVYDVRKMIAKSEQEIGKATAKYFFYSNIMNFFKTEITLANGEIRKRPLIETNGETGEIVWDKGRDFATVRKVLSMPQVNIVKKTEVQTGGFSKESILPKRNSDKLIARKKDWDPKKYGGFDSPTVAYSVLVVAKVEKGKSKKLKSVKELLGITIMERSSFEKNPIDFLEAKGYKEVKKDLIIKLPKYSLFELENGRKRMLASAGELQKGNELALPSKYVNFLYLASHYEKLKGSPEDNEQKQLFVEQHKHYLDEIIEQISEFSKRVILADANLDKVLSAYNKHRDKPIREQAENIIHLFTLTNLGAPAAFKYFDTTIDRKRYTSTKEVLDATLIHQSITGLYETRIDLSQLGGDGGGGGGSGGGGSGGGGSGGTLQLDDEYRLYSPLVKPDQNIQFWLEQFPQAWAETAGMGLAKQVPPQVIQLKASATPVSVRQYPLSKEAQEGIRPHVQRLIQQGILVPVQSPWNTPLLPVRKPGTNDYRPVQDLREVNKRVQDIHPTVPNPYNLLCALPPQRSWYTVLDLKDAFFCLRLHPTSQPLFAFEWRDPGTGRTGQLTWTRLPQGFKNSPTIFNEALHRDLANFRIQHPQVTLLQYVDDLLLAGATKQDCLEGTKALLLELSDLGYRASAKKAQICRREVTYLGYSLRDGQRWLTEARKKTVVQIPAPTTAKQVREFLGTAGFCRLWIPGFATLAAPLYPLTKPKGEFSWAPEHQKAFDAIKKALLSAPALALPDVTKPFTLYVDERKGVARGVLTQTLGPWRRPVAYLSKKLDPVASGWPVCLKAIAAVAILVKDADKLTLGQNITVIAPHALENIVRQPPDRWMTNARMTHYQSLLLTERVTFAPPAALNPATLLPEETDEPVTHDCHQLLIEETGVRKDLTDIPLTGEVLTWFTDGSSYVVEGKRMAGAAVVDGTRTIWASSLPEGTSAQKAELMALTQALRLAEGKSINIYTDSRYAFATAHVHGAIYKQRGWLTSAGREIKNKEEILSLLEALHLPKRLAIIHCPGHQKAKDPISRGNQMADRVAKQAAQGVNLLAGKRTADGSEFEKRTADGSEFESPKKKAKVE

SEQ ID NO: 160 - protein, 2090 aa, synthetic construct
MPAAKRVKLDGGDKKYSIGLDIGTNSVGWAVITDEYKVPSKKFKVLGNTDRHSIKKNLIGALLFDSGETAEATRLKRTARRRYTRRKNRICYLQEIFSNEMAKVDDSFFHRLEESFLVEEDKKHERHPIFGNIVDEVAYHEKYPTIYHLRKKLVDSTDKADLRLIYLALAHMIKFRGHFLIEGDLNPDNSDVDKLFIQLVQTYNQLFEENPINASGVDAKAILSARLSKSRRLENLIAQLPGEKKNGLFGNLIALSLGLTPNFKSNFDLAEDAKLQLSKDTYDDDLDNLLAQIGDQYADLFLAAKNLSDAILLSDILRVNTEITKAPLSASMIKRYDEHHQDLTLLKALVRQQLPEKYKEIFFDQSKNGYAGYIDGGASQEEFYKFIKPILEKMDGTEELLVKLNREDLLRKQRTFDNGSIPHQIHLGELHAILRRQEDFYPFLKDNREKIEKILTFRIPYYVGPLARGNSRFAWMTRKSEETITPWNFEEVVDKGASAQSFIERMTNFDKNLPNEKVLPKHSLLYEYFTVYNELTKVKYVTEGMRKPAFLSGEQKKAIVDLLFKTNRKVTVKQLKEDYFKKIECFDSVEISGVEDRFNASLGTYHDLLKIIKDKDFLDNEENEDILEDIVLTLTLFEDREMIEERLKTYAHLFDDKVMKQLKRRRYTGWGRLSRKLINGIRDKQSGKTILDFLKSDGFANRNFMQLIHDDSLTFKEDIQKAQVSGQGDSLHEHIANLAGSPAIKKGILQTVKVVDELVKVMGRHKPENIVIEMARENQTTQKGQKNSRERMKRIEEGIKELGSQILKEHPVENTQLQNEKLYLYYLQNGRDMYVDQELDINRLSDYDVDHIVPQSFLKDDSIDNKVLTRSDKARGKSDNVPSEEVVKKMKNYWRQLLNAKLITQRKFDNLTKAERGGLSELDKAGFIKRQLVETRQITKHVAQILDSRMNTKYDENDKLIREVKVITLKSKLVSDFRKDFQFYKVREINNYHHAHDAYLNAVVGTALIKKYPKLESEFVYGDYKVYDVRKMIAKSEQEIGKATAKYFFYSNIMNFFKTEITLANGEIRKRPLIETNGETGEIVWDKGRDFATVRKVLSMPQVNIVKKTEVQTGGFSKESILPKRNSDKLIARKKDWDPKKYGGFDSPTVAYSVLVVAKVEKGKSKKLKSVKELLGITIMERSSFEKNPIDFLEAKGYKEVKKDLIIKLPKYSLFELENGRKRMLASAGELQKGNELALPSKYVNFLYLASHYEKLKGSPEDNEQKQLFVEQHKHYLDEIIEQISEFSKRVILADANLDKVLSAYNKHRDKPIREQAENIIHLFTLTNLGAPAAFKYFDTTIDRKRYTSTKEVLDATLIHQSITGLYETRIDLSQLGGDGGEAAAKGSSGGGGGTLQLDDEYRLYSPLVKPDQNIQFWLEQFPQAWAETAGMGLAKQVPPQVIQLKASATPVSVRQYPLSKEAQEGIRPHVQRLIQQGILVPVQSPWNTPLLPVRKPGTNDYRPVQDLREVNKRVQDIHPTVPNPYNLLCALPPQRSWYTVLDLKDAFFCLRLHPTSQPLFAFEWRDPGTGRTGQLTWTRLPQGFKNSPTIFNEALHRDLANFRIQHPQVTLLQYVDDLLLAGATKQDCLEGTKALLLELSDLGYRASAKKAQICRREVTYLGYSLRDGQRWLTEARKKTVVQIPAPTTAKQVREFLGTAGFCRLWIPGFATLAAPLYPLTKPKGEFSWAPEHQKAFDAIKKALLSAPALALPDVTKPFTLYVDERKGVARGVLTQTLGPWRRPVAYLSKKLDPVASGWPVCLKAIAAVAILVKDADKLTLGQNITVIAPHALENIVRQPPDRWMTNARMTHYQSLLLTERVTFAPPAALNPATLLPEETDEPVTHDCHQLLIEETGVRKDLTDIPLTGEVLTWFTDGSSYVVEGKRMAGAAVVDGTRTIWASSLPEGTSAQKAELMALTQALRLAEGKSINIYTDSRYAFATAHVHGAIYKQRGWLTSAGREIKNKEEILSLLEALHLPKRLAIIHCPGHQKAKDPISRGNQMADRVAKQAAQGVNLLAGKRTADGSEFEKRTADGSEFESPKKKAKVE

SEQ ID NO: 161 - protein, 2094 aa, synthetic construct
MPAAKRVKLDGGDKKYSIGLDIGTNSVGWAVITDEYKVPSKKFKVLGNTDRHSIKKNLIGALLFDSGETAEATRLKRTARRRYTRRKNRICYLQEIFSNEMAKVDDSFFHRLEESFLVEEDKKHERHPIFGNIVDEVAYHEKYPTIYHLRKKLVDSTDKADLRLIYLALAHMIKFRGHFLIEGDLNPDNSDVDKLFIQLVQTYNQLFEENPINASGVDAKAILSARLSKSRRLENLIAQLPGEKKNGLFGNLIALSLGLTPNFKSNFDLAEDAKLQLSKDTYDDDLDNLLAQIGDQYADLFLAAKNLSDAILLSDILRVNTEITKAPLSASMIKRYDEHHQDLTLLKALVRQQLPEKYKEIFFDQSKNGYAGYIDGGASQEEFYKFIKPILEKMDGTEELLVKLNREDLLRKQRTFDNGSIPHQIHLGELHAILRRQEDFYPFLKDNREKIEKILTFRIPYYVGPLARGNSRFAWMTRKSEETITPWNFEEVVDKGASAQSFIERMTNFDKNLPNEKVLPKHSLLYEYFTVYNELTKVKYVTEGMRKPAFLSGEQKKAIVDLLFKTNRKVTVKQLKEDYFKKIECFDSVEISGVEDRFNASLGTYHDLLKIIKDKDFLDNEENEDILEDIVLTLTLFEDREMIEERLKTYAHLFDDKVMKQLKRRRYTGWGRLSRKLINGIRDKQSGKTILDFLKSDGFANRNFMQLIHDDSLTFKEDIQKAQVSGQGDSLHEHIANLAGSPAIKKGILQTVKVVDELVKVMGRHKPENIVIEMARENQTTQKGQKNSRERMKRIEEGIKELGSQILKEHPVENTQLQNEKLYLYYLQNGRDMYVDQELDINRLSDYDVDHIVPQSFLKDDSIDNKVLTRSDKARGKSDNVPSEEVVKKMKNYWRQLLNAKLITQRKFDNLTKAERGGLSELDKAGFIKRQLVETRQITKHVAQILDSRMNTKYDENDKLIREVKVITLKSKLVSDFRKDFQFYKVREINNYHHAHDAYLNAVVGTALIKKYPKLESEFVYGDYKVYDVRKMIAKSEQEIGKATAKYFFYSNIMNFFKTEITLANGEIRKRPLIETNGETGEIVWDKGRDFATVRKVLSMPQVNIVKKTEVQTGGFSKESILPKRNSDKLIARKKDWDPKKYGGFDSPTVAYSVLVVAKVEKGKSKKLKSVKELLGITIMERSSFEKNPIDFLEAKGYKEVKKDLIIKLPKYSLFELENGRKRMLASAGELQKGNELALPSKYVNFLYLASHYEKLKGSPEDNEQKQLFVEQHKHYLDEIIEQISEFSKRVILADANLDKVLSAYNKHRDKPIREQAENIIHLFTLTNLGAPAAFKYFDTTIDRKRYTSTKEVLDATLIHQSITGLYETRIDLSQLGGDGGGGGGSEAAAKGGGGSGGTLQLDDEYRLYSPLVKPDQNIQFWLEQFPQAWAETAGMGLAKQVPPQVIQLKASATPVSVRQYPLSKEAQEGIRPHVQRLIQQGILVPVQSPWNTPLLPVRKPGTNDYRPVQDLREVNKRVQDIHPTVPNPYNLLCALPPQRSWYTVLDLKDAFFCLRLHPTSQPLFAFEWRDPGTGRTGQLTWTRLPQGFKNSPTIFNEALHRDLANFRIQHPQVTLLQYVDDLLLAGATKQDCLEGTKALLLELSDLGYRASAKKAQICRREVTYLGYSLRDGQRWLTEARKKTVVQIPAPTTAKQVREFLGTAGFCRLWIPGFATLAAPLYPLTKPKGEFSWAPEHQKAFDAIKKALLSAPALALPDVTKPFTLYVDERKGVARGVLTQTLGPWRRPVAYLSKKLDPVASGWPVCLKAIAAVAILVKDADKLTLGQNITVIAPHALENIVRQPPDRWMTNARMTHYQSLLLTERVTFAPPAALNPATLLPEETDEPVTHDCHQLLIEETGVRKDLTDIPLTGEVLTWFTDGSSYVVEGKRMAGAAVVDGTRTIWASSLPEGTSAQKAELMALTQALRLAEGKSINIYTDSRYAFATAHVHGAIYKQRGWLTSAGREIKNKEEILSLLEALHLPKRLAIIHCPGHQKAKDPISRGNQMADRVAKQAAQGVNLLAGKRTADGSEFEKRTADGSEFESPKKKAKVE

SEQ ID NO: 162 - protein, 2088 aa, synthetic construct
MPAAKRVKLDGGDKKYSIGLDIGTNSVGWAVITDEYKVPSKKFKVLGNTDRHSIKKNLIGALLFDSGETAEATRLKRTARRRYTRRKNRICYLQEIFSNEMAKVDDSFFHRLEESFLVEEDKKHERHPIFGNIVDEVAYHEKYPTIYHLRKKLVDSTDKADLRLIYLALAHMIKFRGHFLIEGDLNPDNSDVDKLFIQLVQTYNQLFEENPINASGVDAKAILSARLSKSRRLENLIAQLPGEKKNGLFGNLIALSLGLTPNFKSNFDLAEDAKLQLSKDTYDDDLDNLLAQIGDQYADLFLAAKNLSDAILLSDILRVNTEITKAPLSASMIKRYDEHHQDLTLLKALVRQQLPEKYKEIFFDQSKNGYAGYIDGGASQEEFYKFIKPILEKMDGTEELLVKLNREDLLRKQRTFDNGSIPHQIHLGELHAILRRQEDFYPFLKDNREKIEKILTFRIPYYVGPLARGNSRFAWMTRKSEETITPWNFEEVVDKGASAQSFIERMTNFDKNLPNEKVLPKHSLLYEYFTVYNELTKVKYVTEGMRKPAFLSGEQKKAIVDLLFKTNRKVTVKQLKEDYFKKIECFDSVEISGVEDRFNASLGTYHDLLKIIKDKDFLDNEENEDILEDIVLTLTLFEDREMIEERLKTYAHLFDDKVMKQLKRRRYTGWGRLSRKLINGIRDKQSGKTILDFLKSDGFANRNFMQLIHDDSLTFKEDIQKAQVSGQGDSLHEHIANLAGSPAIKKGILQTVKVVDELVKVMGRHKPENIVIEMARENQTTQKGQKNSRERMKRIEEGIKELGSQILKEHPVENTQLQNEKLYLYYLQNGRDMYVDQELDINRLSDYDVDHIVPQSFLKDDSIDNKVLTRSDKARGKSDNVPSEEVVKKMKNYWRQLLNAKLITQRKFDNLTKAERGGLSELDKAGFIKRQLVETRQITKHVAQILDSRMNTKYDENDKLIREVKVITLKSKLVSDFRKDFQFYKVREINNYHHAHDAYLNAVVGTALIKKYPKLESEFVYGDYKVYDVRKMIAKSEQEIGKATAKYFFYSNIMNFFKTEITLANGEIRKRPLIETNGETGEIVWDKGRDFATVRKVLSMPQVNIVKKTEVQTGGFSKESILPKRNSDKLIARKKDWDPKKYGGFDSPTVAYSVLVVAKVEKGKSKKLKSVKELLGITIMERSSFEKNPIDFLEAKGYKEVKKDLIIKLPKYSLFELENGRKRMLASAGELQKGNELALPSKYVNFLYLASHYEKLKGSPEDNEQKQLFVEQHKHYLDEIIEQISEFSKRVILADANLDKVLSAYNKHRDKPIREQAENIIHLFTLTNLGAPAAFKYFDTTIDRKRYTSTKEVLDATLIHQSITGLYETRIDLSQLGGDGGGSSGGGGGSGGTLQLDDEYRLYSPLVKPDQNIQFWLEQFPQAWAETAGMGLAKQVPPQVIQLKASATPVSVRQYPLSKEAQEGIRPHVQRLIQQGILVPVQSPWNTPLLPVRKPGTNDYRPVQDLREVNKRVQDIHPTVPNPYNLLCALPPQRSWYTVLDLKDAFFCLRLHPTSQPLFAFEWRDPGTGRTGQLTWTRLPQGFKNSPTIFNEALHRDLANFRIQHPQVTLLQYVDDLLLAGATKQDCLEGTKALLLELSDLGYRASAKKAQICRREVTYLGYSLRDGQRWLTEARKKTVVQIPAPTTAKQVREFLGTAGFCRLWIPGFATLAAPLYPLTKPKGEFSWAPEHQKAFDAIKKALLSAPALALPDVTKPFTLYVDERKGVARGVLTQTLGPWRRPVAYLSKKLDPVASGWPVCLKAIAAVAILVKDADKLTLGQNITVIAPHALENIVRQPPDRWMTNARMTHYQSLLLTERVTFAPPAALNPATLLPEETDEPVTHDCHQLLIEETGVRKDLTDIPLTGEVLTWFTDGSSYVVEGKRMAGAAVVDGTRTIWASSLPEGTSAQKAELMALTQALRLAEGKSINIYTDSRYAFATAHVHGAIYKQRGWLTSAGREIKNKEEILSLLEALHLPKRLAIIHCPGHQKAKDPISRGNQMADRVAKQAAQGVNLLAGKRTADGSEFEKRTADGSEFESPKKKAKVE

SEQ ID NO: 163 - protein, 2084 aa, synthetic construct
MPAAKRVKLDGGDKKYSIGLDIGTNSVGWAVITDEYKVPSKKFKVLGNTDRHSIKKNLIGALLFDSGETAEATRLKRTARRRYTRRKNRICYLQEIFSNEMAKVDDSFFHRLEESFLVEEDKKHERHPIFGNIVDEVAYHEKYPTIYHLRKKLVDSTDKADLRLIYLALAHMIKFRGHFLIEGDLNPDNSDVDKLFIQLVQTYNQLFEENPINASGVDAKAILSARLSKSRRLENLIAQLPGEKKNGLFGNLIALSLGLTPNFKSNFDLAEDAKLQLSKDTYDDDLDNLLAQIGDQYADLFLAAKNLSDAILLSDILRVNTEITKAPLSASMIKRYDEHHQDLTLLKALVRQQLPEKYKEIFFDQSKNGYAGYIDGGASQEEFYKFIKPILEKMDGTEELLVKLNREDLLRKQRTFDNGSIPHQIHLGELHAILRRQEDFYPFLKDNREKIEKILTFRIPYYVGPLARGNSRFAWMTRKSEETITPWNFEEVVDKGASAQSFIERMTNFDKNLPNEKVLPKHSLLYEYFTVYNELTKVKYVTEGMRKPAFLSGEQKKAIVDLLFKTNRKVTVKQLKEDYFKKIECFDSVEISGVEDRFNASLGTYHDLLKIIKDKDFLDNEENEDILEDIVLTLTLFEDREMIEERLKTYAHLFDDKVMKQLKRRRYTGWGRLSRKLINGIRDKQSGKTILDFLKSDGFANRNFMQLIHDDSLTFKEDIQKAQVSGQGDSLHEHIANLAGSPAIKKGILQTVKVVDELVKVMGRHKPENIVIEMARENQTTQKGQKNSRERMKRIEEGIKELGSQILKEHPVENTQLQNEKLYLYYLQNGRDMYVDQELDINRLSDYDVDHIVPQSFLKDDSIDNKVLTRSDKARGKSDNVPSEEVVKKMKNYWRQLLNAKLITQRKFDNLTKAERGGLSELDKAGFIKRQLVETRQITKHVAQILDSRMNTKYDENDKLIREVKVITLKSKLVSDFRKDFQFYKVREINNYHHAHDAYLNAVVGTALIKKYPKLESEFVYGDYKVYDVRKMIAKSEQEIGKATAKYFFYSNIMNFFKTEITLANGEIRKRPLIETNGETGEIVWDKGRDFATVRKVLSMPQVNIVKKTEVQTGGFSKESILPKRNSDKLIARKKDWDPKKYGGFDSPTVAYSVLVVAKVEKGKSKKLKSVKELLGITIMERSSFEKNPIDFLEAKGYKEVKKDLIIKLPKYSLFELENGRKRMLASAGELQKGNELALPSKYVNFLYLASHYEKLKGSPEDNEQKQLFVEQHKHYLDEIIEQISEFSKRVILADANLDKVLSAYNKHRDKPIREQAENIIHLFTLTNLGAPAAFKYFDTTIDRKRYTSTKEVLDATLIHQSITGLYETRIDLSQLGGDGGPAPAPGGTLQLDDEYRLYSPLVKPDQNIQFWLEQFPQAWAETAGMGLAKQVPPQVIQLKASATPVSVRQYPLSKEAQEGIRPHVQRLIQQGILVPVQSPWNTPLLPVRKPGTNDYRPVQDLREVNKRVQDIHPTVPNPYNLLCALPPQRSWYTVLDLKDAFFCLRLHPTSQPLFAFEWRDPGTGRTGQLTWTRLPQGFKNSPTIFNEALHRDLANFRIQHPQVTLLQYVDDLLLAGATKQDCLEGTKALLLELSDLGYRASAKKAQICRREVTYLGYSLRDGQRWLTEARKKTVVQIPAPTTAKQVREFLGTAGFCRLWIPGFATLAAPLYPLTKPKGEFSWAPEHQKAFDAIKKALLSAPALALPDVTKPFTLYVDERKGVARGVLTQTLGPWRRPVAYLSKKLDPVASGWPVCLKAIAAVAILVKDADKLTLGQNITVIAPHALENIVRQPPDRWMTNARMTHYQSLLLTERVTFAPPAALNPATLLPEETDEPVTHDCHQLLIEETGVRKDLTDIPLTGEVLTWFTDGSSYVVEGKRMAGAAVVDGTRTIWASSLPEGTSAQKAELMALTQALRLAEGKSINIYTDSRYAFATAHVHGAIYKQRGWLTSAGREIKNKEEILSLLEALHLPKRLAIIHCPGHQKAKDPISRGNQMADRVAKQAAQGVNLLAGKRTADGSEFEKRTADGSEFESPKKKAKVE

SEQ ID NO: 164 - protein, 2090 aa, synthetic construct
MPAAKRVKLDGGDKKYSIGLDIGTNSVGWAVITDEYKVPSKKFKVLGNTDRHSIKKNLIGALLFDSGETAEATRLKRTARRRYTRRKNRICYLQEIFSNEMAKVDDSFFHRLEESFLVEEDKKHERHPIFGNIVDEVAYHEKYPTIYHLRKKLVDSTDKADLRLIYLALAHMIKFRGHFLIEGDLNPDNSDVDKLFIQLVQTYNQLFEENPINASGVDAKAILSARLSKSRRLENLIAQLPGEKKNGLFGNLIALSLGLTPNFKSNFDLAEDAKLQLSKDTYDDDLDNLLAQIGDQYADLFLAAKNLSDAILLSDILRVNTEITKAPLSASMIKRYDEHHQDLTLLKALVRQQLPEKYKEIFFDQSKNGYAGYIDGGASQEEFYKFIKPILEKMDGTEELLVKLNREDLLRKQRTFDNGSIPHQIHLGELHAILRRQEDFYPFLKDNREKIEKILTFRIPYYVGPLARGNSRFAWMTRKSEETITPWNFEEVVDKGASAQSFIERMTNFDKNLPNEKVLPKHSLLYEYFTVYNELTKVKYVTEGMRKPAFLSGEQKKAIVDLLFKTNRKVTVKQLKEDYFKKIECFDSVEISGVEDRFNASLGTYHDLLKIIKDKDFLDNEENEDILEDIVLTLTLFEDREMIEERLKTYAHLFDDKVMKQLKRRRYTGWGRLSRKLINGIRDKQSGKTILDFLKSDGFANRNFMQLIHDDSLTFKEDIQKAQVSGQGDSLHEHIANLAGSPAIKKGILQTVKVVDELVKVMGRHKPENIVIEMARENQTTQKGQKNSRERMKRIEEGIKELGSQILKEHPVENTQLQNEKLYLYYLQNGRDMYVDQELDINRLSDYDVDHIVPQSFLKDDSIDNKVLTRSDKARGKSDNVPSEEVVKKMKNYWRQLLNAKLITQRKFDNLTKAERGGLSELDKAGFIKRQLVETRQITKHVAQILDSRMNTKYDENDKLIREVKVITLKSKLVSDFRKDFQFYKVREINNYHHAHDAYLNAVVGTALIKKYPKLESEFVYGDYKVYDVRKMIAKSEQEIGKATAKYFFYSNIMNFFKTEITLANGEIRKRPLIETNGETGEIVWDKGRDFATVRKVLSMPQVNIVKKTEVQTGGFSKESILPKRNSDKLIARKKDWDPKKYGGFDSPTVAYSVLVVAKVEKGKSKKLKSVKELLGITIMERSSFEKNPIDFLEAKGYKEVKKDLIIKLPKYSLFELENGRKRMLASAGELQKGNELALPSKYVNFLYLASHYEKLKGSPEDNEQKQLFVEQHKHYLDEIIEQISEFSKRVILADANLDKVLSAYNKHRDKPIREQAENIIHLFTLTNLGAPAAFKYFDTTIDRKRYTSTKEVLDATLIHQSITGLYETRIDLSQLGGDGGGGSPAPEAAAKGGTLQLDDEYRLYSPLVKPDQNIQFWLEQFPQAWAETAGMGLAKQVPPQVIQLKASATPVSVRQYPLSKEAQEGIRPHVQRLIQQGILVPVQSPWNTPLLPVRKPGTNDYRPVQDLREVNKRVQDIHPTVPNPYNLLCALPPQRSWYTVLDLKDAFFCLRLHPTSQPLFAFEWRDPGTGRTGQLTWTRLPQGFKNSPTIFNEALHRDLANFRIQHPQVTLLQYVDDLLLAGATKQDCLEGTKALLLELSDLGYRASAKKAQICRREVTYLGYSLRDGQRWLTEARKKTVVQIPAPTTAKQVREFLGTAGFCRLWIPGFATLAAPLYPLTKPKGEFSWAPEHQKAFDAIKKALLSAPALALPDVTKPFTLYVDERKGVARGVLTQTLGPWRRPVAYLSKKLDPVASGWPVCLKAIAAVAILVKDADKLTLGQNITVIAPHALENIVRQPPDRWMTNARMTHYQSLLLTERVTFAPPAALNPATLLPEETDEPVTHDCHQLLIEETGVRKDLTDIPLTGEVLTWFTDGSSYVVEGKRMAGAAVVDGTRTIWASSLPEGTSAQKAELMALTQALRLAEGKSINIYTDSRYAFATAHVHGAIYKQRGWLTSAGREIKNKEEILSLLEALHLPKRLAIIHCPGHQKAKDPISRGNQMADRVAKQAAQGVNLLAGKRTADGSEFEKRTADGSEFESPKKKAKVE

SEQ ID NO: 165 - protein, 2085 aa, synthetic construct
MPAAKRVKLDGGDKKYSIGLDIGTNSVGWAVITDEYKVPSKKFKVLGNTDRHSIKKNLIGALLFDSGETAEATRLKRTARRRYTRRKNRICYLQEIFSNEMAKVDDSFFHRLEESFLVEEDKKHERHPIFGNIVDEVAYHEKYPTIYHLRKKLVDSTDKADLRLIYLALAHMIKFRGHFLIEGDLNPDNSDVDKLFIQLVQTYNQLFEENPINASGVDAKAILSARLSKSRRLENLIAQLPGEKKNGLFGNLIALSLGLTPNFKSNFDLAEDAKLQLSKDTYDDDLDNLLAQIGDQYADLFLAAKNLSDAILLSDILRVNTEITKAPLSASMIKRYDEHHQDLTLLKALVRQQLPEKYKEIFFDQSKNGYAGYIDGGASQEEFYKFIKPILEKMDGTEELLVKLNREDLLRKQRTFDNGSIPHQIHLGELHAILRRQEDFYPFLKDNREKIEKILTFRIPYYVGPLARGNSRFAWMTRKSEETITPWNFEEVVDKGASAQSFIERMTNFDKNLPNEKVLPKHSLLYEYFTVYNELTKVKYVTEGMRKPAFLSGEQKKAIVDLLFKTNRKVTVKQLKEDYFKKIECFDSVEISGVEDRFNASLGTYHDLLKIIKDKDFLDNEENEDILEDIVLTLTLFEDREMIEERLKTYAHLFDDKVMKQLKRRRYTGWGRLSRKLINGIRDKQSGKTILDFLKSDGFANRNFMQLIHDDSLTFKEDIQKAQVSGQGDSLHEHIANLAGSPAIKKGILQTVKVVDELVKVMGRHKPENIVIEMARENQTTQKGQKNSRERMKRIEEGIKELGSQILKEHPVENTQLQNEKLYLYYLQNGRDMYVDQELDINRLSDYDVDHIVPQSFLKDDSIDNKVLTRSDKARGKSDNVPSEEVVKKMKNYWRQLLNAKLITQRKFDNLTKAERGGLSELDKAGFIKRQLVETRQITKHVAQILDSRMNTKYDENDKLIREVKVITLKSKLVSDFRKDFQFYKVREINNYHHAHDAYLNAVVGTALIKKYPKLESEFVYGDYKVYDVRKMIAKSEQEIGKATAKYFFYSNIMNFFKTEITLANGEIRKRPLIETNGETGEIVWDKGRDFATVRKVLSMPQVNIVKKTEVQTGGFSKESILPKRNSDKLIARKKDWDPKKYGGFDSPTVAYSVLVVAKVEKGKSKKLKSVKELLGITIMERSSFEKNPIDFLEAKGYKEVKKDLIIKLPKYSLFELENGRKRMLASAGELQKGNELALPSKYVNFLYLASHYEKLKGSPEDNEQKQLFVEQHKHYLDEIIEQISEFSKRVILADANLDKVLSAYNKHRDKPIREQAENIIHLFTLTNLGAPAAFKYFDTTIDRKRYTSTKEVLDATLIHQSITGLYETRIDLSQLGGDGGGSSGGSGGTLQLDDEYRLYSPLVKPDQNIQFWLEQFPQAWAETAGMGLAKQVPPQVIQLKASATPVSVRQYPLSKEAQEGIRPHVQRLIQQGILVPVQSPWNTPLLPVRKPGTNDYRPVQDLREVNKRVQDIHPTVPNPYNLLCALPPQRSWYTVLDLKDAFFCLRLHPTSQPLFAFEWRDPGTGRTGQLTWTRLPQGFKNSPTIFNEALHRDLANFRIQHPQVTLLQYVDDLLLAGATKQDCLEGTKALLLELSDLGYRASAKKAQICRREVTYLGYSLRDGQRWLTEARKKTVVQIPAPTTAKQVREFLGTAGFCRLWIPGFATLAAPLYPLTKPKGEFSWAPEHQKAFDAIKKALLSAPALALPDVTKPFTLYVDERKGVARGVLTQTLGPWRRPVAYLSKKLDPVASGWPVCLKAIAAVAILVKDADKLTLGQNITVIAPHALENIVRQPPDRWMTNARMTHYQSLLLTERVTFAPPAALNPATLLPEETDEPVTHDCHQLLIEETGVRKDLTDIPLTGEVLTWFTDGSSYVVEGKRMAGAAVVDGTRTIWASSLPEGTSAQKAELMALTQALRLAEGKSINIYTDSRYAFATAHVHGAIYKQRGWLTSAGREIKNKEEILSLLEALHLPKRLAIIHCPGHQKAKDPISRGNQMADRVAKQAAQGVNLLAGKRTADGSEFEKRTADGSEFESPKKKAKVE

SEQ ID NO: 166 - protein, 2084 aa, synthetic construct
MPAAKRVKLDGGDKKYSIGLDIGTNSVGWAVITDEYKVPSKKFKVLGNTDRHSIKKNLIGALLFDSGETAEATRLKRTARRRYTRRKNRICYLQEIFSNEMAKVDDSFFHRLEESFLVEEDKKHERHPIFGNIVDEVAYHEKYPTIYHLRKKLVDSTDKADLRLIYLALAHMIKFRGHFLIEGDLNPDNSDVDKLFIQLVQTYNQLFEENPINASGVDAKAILSARLSKSRRLENLIAQLPGEKKNGLFGNLIALSLGLTPNFKSNFDLAEDAKLQLSKDTYDDDLDNLLAQIGDQYADLFLAAKNLSDAILLSDILRVNTEITKAPLSASMIKRYDEHHQDLTLLKALVRQQLPEKYKEIFFDQSKNGYAGYIDGGASQEEFYKFIKPILEKMDGTEELLVKLNREDLLRKQRTFDNGSIPHQIHLGELHAILRRQEDFYPFLKDNREKIEKILTFRIPYYVGPLARGNSRFAWMTRKSEETITPWNFEEVVDKGASAQSFIERMTNFDKNLPNEKVLPKHSLLYEYFTVYNELTKVKYVTEGMRKPAFLSGEQKKAIVDLLFKTNRKVTVKQLKEDYFKKIECFDSVEISGVEDRFNASLGTYHDLLKIIKDKDFLDNEENEDILEDIVLTLTLFEDREMIEERLKTYAHLFDDKVMKQLKRRRYTGWGRLSRKLINGIRDKQSGKTILDFLKSDGFANRNFMQLIHDDSLTFKEDIQKAQVSGQGDSLHEHIANLAGSPAIKKGILQTVKVVDELVKVMGRHKPENIVIEMARENQTTQKGQKNSRERMKRIEEGIKELGSQILKEHPVENTQLQNEKLYLYYLQNGRDMYVDQELDINRLSDYDVDHIVPQSFLKDDSIDNKVLTRSDKARGKSDNVPSEEVVKKMKNYWRQLLNAKLITQRKFDNLTKAERGGLSELDKAGFIKRQLVETRQITKHVAQILDSRMNTKYDENDKLIREVKVITLKSKLVSDFRKDFQFYKVREINNYHHAHDAYLNAVVGTALIKKYPKLESEFVYGDYKVYDVRKMIAKSEQEIGKATAKYFFYSNIMNFFKTEITLANGEIRKRPLIETNGETGEIVWDKGRDFATVRKVLSMPQVNIVKKTEVQTGGFSKESILPKRNSDKLIARKKDWDPKKYGGFDSPTVAYSVLVVAKVEKGKSKKLKSVKELLGITIMERSSFEKNPIDFLEAKGYKEVKKDLIIKLPKYSLFELENGRKRMLASAGELQKGNELALPSKYVNFLYLASHYEKLKGSPEDNEQKQLFVEQHKHYLDEIIEQISEFSKRVILADANLDKVLSAYNKHRDKPIREQAENIIHLFTLTNLGAPAAFKYFDTTIDRKRYTSTKEVLDATLIHQSITGLYETRIDLSQLGGDGGGGGGGGGTLQLDDEYRLYSPLVKPDQNIQFWLEQFPQAWAETAGMGLAKQVPPQVIQLKASATPVSVRQYPLSKEAQEGIRPHVQRLIQQGILVPVQSPWNTPLLPVRKPGTNDYRPVQDLREVNKRVQDIHPTVPNPYNLLCALPPQRSWYTVLDLKDAFFCLRLHPTSQPLFAFEWRDPGTGRTGQLTWTRLPQGFKNSPTIFNEALHRDLANFRIQHPQVTLLQYVDDLLLAGATKQDCLEGTKALLLELSDLGYRASAKKAQICRREVTYLGYSLRDGQRWLTEARKKTVVQIPAPTTAKQVREFLGTAGFCRLWIPGFATLAAPLYPLTKPKGEFSWAPEHQKAFDAIKKALLSAPALALPDVTKPFTLYVDERKGVARGVLTQTLGPWRRPVAYLSKKLDPVASGWPVCLKAIAAVAILVKDADKLTLGQNITVIAPHALENIVRQPPDRWMTNARMTHYQSLLLTERVTFAPPAALNPATLLPEETDEPVTHDCHQLLIEETGVRKDLTDIPLTGEVLTWFTDGSSYVVEGKRMAGAAVVDGTRTIWASSLPEGTSAQKAELMALTQALRLAEGKSINIYTDSRYAFATAHVHGAIYKQRGWLTSAGREIKNKEEILSLLEALHLPKRLAIIHCPGHQKAKDPISRGNQMADRVAKQAAQGVNLLAGKRTADGSEFEKRTADGSEFESPKKKAKVE

SEQ ID NO: 167 - protein, 2088 aa, synthetic construct
MPAAKRVKLDGGDKKYSIGLDIGTNSVGWAVITDEYKVPSKKFKVLGNTDRHSIKKNLIGALLFDSGETAEATRLKRTARRRYTRRKNRICYLQEIFSNEMAKVDDSFFHRLEESFLVEEDKKHERHPIFGNIVDEVAYHEKYPTIYHLRKKLVDSTDKADLRLIYLALAHMIKFRGHFLIEGDLNPDNSDVDKLFIQLVQTYNQLFEENPINASGVDAKAILSARLSKSRRLENLIAQLPGEKKNGLFGNLIALSLGLTPNFKSNFDLAEDAKLQLSKDTYDDDLDNLLAQIGDQYADLFLAAKNLSDAILLSDILRVNTEITKAPLSASMIKRYDEHHQDLTLLKALVRQQLPEKYKEIFFDQSKNGYAGYIDGGASQEEFYKFIKPILEKMDGTEELLVKLNREDLLRKQRTFDNGSIPHQIHLGELHAILRRQEDFYPFLKDNREKIEKILTFRIPYYVGPLARGNSRFAWMTRKSEETITPWNFEEVVDKGASAQSFIERMTNFDKNLPNEKVLPKHSLLYEYFTVYNELTKVKYVTEGMRKPAFLSGEQKKAIVDLLFKTNRKVTVKQLKEDYFKKIECFDSVEISGVEDRFNASLGTYHDLLKIIKDKDFLDNEENEDILEDIVLTLTLFEDREMIEERLKTYAHLFDDKVMKQLKRRRYTGWGRLSRKLINGIRDKQSGKTILDFLKSDGFANRNFMQLIHDDSLTFKEDIQKAQVSGQGDSLHEHIANLAGSPAIKKGILQTVKVVDELVKVMGRHKPENIVIEMARENQTTQKGQKNSRERMKRIEEGIKELGSQILKEHPVENTQLQNEKLYLYYLQNGRDMYVDQELDINRLSDYDVDHIVPQSFLKDDSIDNKVLTRSDKARGKSDNVPSEEVVKKMKNYWRQLLNAKLITQRKFDNLTKAERGGLSELDKAGFIKRQLVETRQITKHVAQILDSRMNTKYDENDKLIREVKVITLKSKLVSDFRKDFQFYKVREINNYHHAHDAYLNAVVGTALIKKYPKLESEFVYGDYKVYDVRKMIAKSEQEIGKATAKYFFYSNIMNFFKTEITLANGEIRKRPLIETNGETGEIVWDKGRDFATVRKVLSMPQVNIVKKTEVQTGGFSKESILPKRNSDKLIARKKDWDPKKYGGFDSPTVAYSVLVVAKVEKGKSKKLKSVKELLGITIMERSSFEKNPIDFLEAKGYKEVKKDLIIKLPKYSLFELENGRKRMLASAGELQKGNELALPSKYVNFLYLASHYEKLKGSPEDNEQKQLFVEQHKHYLDEIIEQISEFSKRVILADANLDKVLSAYNKHRDKPIREQAENIIHLFTLTNLGAPAAFKYFDTTIDRKRYTSTKEVLDATLIHQSITGLYETRIDLSQLGGDGGPAPGGSGGGGGTLQLDDEYRLYSPLVKPDQNIQFWLEQFPQAWAETAGMGLAKQVPPQVIQLKASATPVSVRQYPLSKEAQEGIRPHVQRLIQQGILVPVQSPWNTPLLPVRKPGTNDYRPVQDLREVNKRVQDIHPTVPNPYNLLCALPPQRSWYTVLDLKDAFFCLRLHPTSQPLFAFEWRDPGTGRTGQLTWTRLPQGFKNSPTIFNEALHRDLANFRIQHPQVTLLQYVDDLLLAGATKQDCLEGTKALLLELSDLGYRASAKKAQICRREVTYLGYSLRDGQRWLTEARKKTVVQIPAPTTAKQVREFLGTAGFCRLWIPGFATLAAPLYPLTKPKGEFSWAPEHQKAFDAIKKALLSAPALALPDVTKPFTLYVDERKGVARGVLTQTLGPWRRPVAYLSKKLDPVASGWPVCLKAIAAVAILVKDADKLTLGQNITVIAPHALENIVRQPPDRWMTNARMTHYQSLLLTERVTFAPPAALNPATLLPEETDEPVTHDCHQLLIEETGVRKDLTDIPLTGEVLTWFTDGSSYVVEGKRMAGAAVVDGTRTIWASSLPEGTSAQKAELMALTQALRLAEGKSINIYTDSRYAFATAHVHGAIYKQRGWLTSAGREIKNKEEILSLLEALHLPKRLAIIHCPGHQKAKDPISRGNQMADRVAKQAAQGVNLLAGKRTADGSEFEKRTADGSEFESPKKKAKVE

SEQ ID NO: 168 - protein, 2090 aa, synthetic construct
MPAAKRVKLDGGDKKYSIGLDIGTNSVGWAVITDEYKVPSKKFKVLGNTDRHSIKKNLIGALLFDSGETAEATRLKRTARRRYTRRKNRICYLQEIFSNEMAKVDDSFFHRLEESFLVEEDKKHERHPIFGNIVDEVAYHEKYPTIYHLRKKLVDSTDKADLRLIYLALAHMIKFRGHFLIEGDLNPDNSDVDKLFIQLVQTYNQLFEENPINASGVDAKAILSARLSKSRRLENLIAQLPGEKKNGLFGNLIALSLGLTPNFKSNFDLAEDAKLQLSKDTYDDDLDNLLAQIGDQYADLFLAAKNLSDAILLSDILRVNTEITKAPLSASMIKRYDEHHQDLTLLKALVRQQLPEKYKEIFFDQSKNGYAGYIDGGASQEEFYKFIKPILEKMDGTEELLVKLNREDLLRKQRTFDNGSIPHQIHLGELHAILRRQEDFYPFLKDNREKIEKILTFRIPYYVGPLARGNSRFAWMTRKSEETITPWNFEEVVDKGASAQSFIERMTNFDKNLPNEKVLPKHSLLYEYFTVYNELTKVKYVTEGMRKPAFLSGEQKKAIVDLLFKTNRKVTVKQLKEDYFKKIECFDSVEISGVEDRFNASLGTYHDLLKIIKDKDFLDNEENEDILEDIVLTLTLFEDREMIEERLKTYAHLFDDKVMKQLKRRRYTGWGRLSRKLINGIRDKQSGKTILDFLKSDGFANRNFMQLIHDDSLTFKEDIQKAQVSGQGDSLHEHIANLAGSPAIKKGILQTVKVVDELVKVMGRHKPENIVIEMARENQTTQKGQKNSRERMKRIEEGIKELGSQILKEHPVENTQLQNEKLYLYYLQNGRDMYVDQELDINRLSDYDVDHIVPQSFLKDDSIDNKVLTRSDKARGKSDNVPSEEVVKKMKNYWRQLLNAKLITQRKFDNLTKAERGGLSELDKAGFIKRQLVETRQITKHVAQILDSRMNTKYDENDKLIREVKVITLKSKLVSDFRKDFQFYKVREINNYHHAHDAYLNAVVGTALIKKYPKLESEFVYGDYKVYDVRKMIAKSEQEIGKATAKYFFYSNIMNFFKTEITLANGEIRKRPLIETNGETGEIVWDKGRDFATVRKVLSMPQVNIVKKTEVQTGGFSKESILPKRNSDKLIARKKDWDPKKYGGFDSPTVAYSVLVVAKVEKGKSKKLKSVKELLGITIMERSSFEKNPIDFLEAKGYKEVKKDLIIKLPKYSLFELENGRKRMLASAGELQKGNELALPSKYVNFLYLASHYEKLKGSPEDNEQKQLFVEQHKHYLDEIIEQISEFSKRVILADANLDKVLSAYNKHRDKPIREQAENIIHLFTLTNLGAPAAFKYFDTTIDRKRYTSTKEVLDATLIHQSITGLYETRIDLSQLGGDGGEAAAKPAPGGSGGTLQLDDEYRLYSPLVKPDQNIQFWLEQFPQAWAETAGMGLAKQVPPQVIQLKASATPVSVRQYPLSKEAQEGIRPHVQRLIQQGILVPVQSPWNTPLLPVRKPGTNDYRPVQDLREVNKRVQDIHPTVPNPYNLLCALPPQRSWYTVLDLKDAFFCLRLHPTSQPLFAFEWRDPGTGRTGQLTWTRLPQGFKNSPTIFNEALHRDLANFRIQHPQVTLLQYVDDLLLAGATKQDCLEGTKALLLELSDLGYRASAKKAQICRREVTYLGYSLRDGQRWLTEARKKTVVQIPAPTTAKQVREFLGTAGFCRLWIPGFATLAAPLYPLTKPKGEFSWAPEHQKAFDAIKKALLSAPALALPDVTKPFTLYVDERKGVARGVLTQTLGPWRRPVAYLSKKLDPVASGWPVCLKAIAAVAILVKDADKLTLGQNITVIAPHALENIVRQPPDRWMTNARMTHYQSLLLTERVTFAPPAALNPATLLPEETDEPVTHDCHQLLIEETGVRKDLTDIPLTGEVLTWFTDGSSYVVEGKRMAGAAVVDGTRTIWASSLPEGTSAQKAELMALTQALRLAEGKSINIYTDSRYAFATAHVHGAIYKQRGWLTSAGREIKNKEEILSLLEALHLPKRLAIIHCPGHQKAKDPISRGNQMADRVAKQAAQGVNLLAGKRTADGSEFEKRTADGSEFESPKKKAKVE

SEQ ID NO: 169 - protein, 2088 aa, synthetic construct
MPAAKRVKLDGGDKKYSIGLDIGTNSVGWAVITDEYKVPSKKFKVLGNTDRHSIKKNLIGALLFDSGETAEATRLKRTARRRYTRRKNRICYLQEIFSNEMAKVDDSFFHRLEESFLVEEDKKHERHPIFGNIVDEVAYHEKYPTIYHLRKKLVDSTDKADLRLIYLALAHMIKFRGHFLIEGDLNPDNSDVDKLFIQLVQTYNQLFEENPINASGVDAKAILSARLSKSRRLENLIAQLPGEKKNGLFGNLIALSLGLTPNFKSNFDLAEDAKLQLSKDTYDDDLDNLLAQIGDQYADLFLAAKNLSDAILLSDILRVNTEITKAPLSASMIKRYDEHHQDLTLLKALVRQQLPEKYKEIFFDQSKNGYAGYIDGGASQEEFYKFIKPILEKMDGTEELLVKLNREDLLRKQRTFDNGSIPHQIHLGELHAILRRQEDFYPFLKDNREKIEKILTFRIPYYVGPLARGNSRFAWMTRKSEETITPWNFEEVVDKGASAQSFIERMTNFDKNLPNEKVLPKHSLLYEYFTVYNELTKVKYVTEGMRKPAFLSGEQKKAIVDLLFKTNRKVTVKQLKEDYFKKIECFDSVEISGVEDRFNASLGTYHDLLKIIKDKDFLDNEENEDILEDIVLTLTLFEDREMIEERLKTYAHLFDDKVMKQLKRRRYTGWGRLSRKLINGIRDKQSGKTILDFLKSDGFANRNFMQLIHDDSLTFKEDIQKAQVSGQGDSLHEHIANLAGSPAIKKGILQTVKVVDELVKVMGRHKPENIVIEMARENQTTQKGQKNSRERMKRIEEGIKELGSQILKEHPVENTQLQNEKLYLYYLQNGRDMYVDQELDINRLSDYDVDHIVPQSFLKDDSIDNKVLTRSDKARGKSDNVPSEEVVKKMKNYWRQLLNAKLITQRKFDNLTKAERGGLSELDKAGFIKRQLVETRQITKHVAQILDSRMNTKYDENDKLIREVKVITLKSKLVSDFRKDFQFYKVREINNYHHAHDAYLNAVVGTALIKKYPKLESEFVYGDYKVYDVRKMIAKSEQEIGKATAKYFFYSNIMNFFKTEITLANGEIRKRPLIETNGETGEIVWDKGRDFATVRKVLSMPQVNIVKKTEVQTGGFSKESILPKRNSDKLIARKKDWDPKKYGGFDSPTVAYSVLVVAKVEKGKSKKLKSVKELLGITIMERSSFEKNPIDFLEAKGYKEVKKDLIIKLPKYSLFELENGRKRMLASAGELQKGNELALPSKYVNFLYLASHYEKLKGSPEDNEQKQLFVEQHKHYLDEIIEQISEFSKRVILADANLDKVLSAYNKHRDKPIREQAENIIHLFTLTNLGAPAAFKYFDTTIDRKRYTSTKEVLDATLIHQSITGLYETRIDLSQLGGDGGGGGPAPGGSGGTLQLDDEYRLYSPLVKPDQNIQFWLEQFPQAWAETAGMGLAKQVPPQVIQLKASATPVSVRQYPLSKEAQEGIRPHVQRLIQQGILVPVQSPWNTPLLPVRKPGTNDYRPVQDLREVNKRVQDIHPTVPNPYNLLCALPPQRSWYTVLDLKDAFFCLRLHPTSQPLFAFEWRDPGTGRTGQLTWTRLPQGFKNSPTIFNEALHRDLANFRIQHPQVTLLQYVDDLLLAGATKQDCLEGTKALLLELSDLGYRASAKKAQICRREVTYLGYSLRDGQRWLTEARKKTVVQIPAPTTAKQVREFLGTAGFCRLWIPGFATLAAPLYPLTKPKGEFSWAPEHQKAFDAIKKALLSAPALALPDVTKPFTLYVDERKGVARGVLTQTLGPWRRPVAYLSKKLDPVASGWPVCLKAIAAVAILVKDADKLTLGQNITVIAPHALENIVRQPPDRWMTNARMTHYQSLLLTERVTFAPPAALNPATLLPEETDEPVTHDCHQLLIEETGVRKDLTDIPLTGEVLTWFTDGSSYVVEGKRMAGAAVVDGTRTIWASSLPEGTSAQKAELMALTQALRLAEGKSINIYTDSRYAFATAHVHGAIYKQRGWLTSAGREIKNKEEILSLLEALHLPKRLAIIHCPGHQKAKDPISRGNQMADRVAKQAAQGVNLLAGKRTADGSEFEKRTADGSEFESPKKKAKVE

SEQ ID NO: 170 - protein, 2090 aa, synthetic construct
MPAAKRVKLDGGDKKYSIGLDIGTNSVGWAVITDEYKVPSKKFKVLGNTDRHSIKKNLIGALLFDSGETAEATRLKRTARRRYTRRKNRICYLQEIFSNEMAKVDDSFFHRLEESFLVEEDKKHERHPIFGNIVDEVAYHEKYPTIYHLRKKLVDSTDKADLRLIYLALAHMIKFRGHFLIEGDLNPDNSDVDKLFIQLVQTYNQLFEENPINASGVDAKAILSARLSKSRRLENLIAQLPGEKKNGLFGNLIALSLGLTPNFKSNFDLAEDAKLQLSKDTYDDDLDNLLAQIGDQYADLFLAAKNLSDAILLSDILRVNTEITKAPLSASMIKRYDEHHQDLTLLKALVRQQLPEKYKEIFFDQSKNGYAGYIDGGASQEEFYKFIKPILEKMDGTEELLVKLNREDLLRKQRTFDNGSIPHQIHLGELHAILRRQEDFYPFLKDNREKIEKILTFRIPYYVGPLARGNSRFAWMTRKSEETITPWNFEEVVDKGASAQSFIERMTNFDKNLPNEKVLPKHSLLYEYFTVYNELTKVKYVTEGMRKPAFLSGEQKKAIVDLLFKTNRKVTVKQLKEDYFKKIECFDSVEISGVEDRFNASLGTYHDLLKIIKDKDFLDNEENEDILEDIVLTLTLFEDREMIEERLKTYAHLFDDKVMKQLKRRRYTGWGRLSRKLINGIRDKQSGKTILDFLKSDGFANRNFMQLIHDDSLTFKEDIQKAQVSGQGDSLHEHIANLAGSPAIKKGILQTVKVVDELVKVMGRHKPENIVIEMARENQTTQKGQKNSRERMKRIEEGIKELGSQILKEHPVENTQLQNEKLYLYYLQNGRDMYVDQELDINRLSDYDVDHIVPQSFLKDDSIDNKVLTRSDKARGKSDNVPSEEVVKKMKNYWRQLLNAKLITQRKFDNLTKAERGGLSELDKAGFIKRQLVETRQITKHVAQILDSRMNTKYDENDKLIREVKVITLKSKLVSDFRKDFQFYKVREINNYHHAHDAYLNAVVGTALIKKYPKLESEFVYGDYKVYDVRKMIAKSEQEIGKATAKYFFYSNIMNFFKTEITLANGEIRKRPLIETNGETGEIVWDKGRDFATVRKVLSMPQVNIVKKTEVQTGGFSKESILPKRNSDKLIARKKDWDPKKYGGFDSPTVAYSVLVVAKVEKGKSKKLKSVKELLGITIMERSSFEKNPIDFLEAKGYKEVKKDLIIKLPKYSLFELENGRKRMLASAGELQKGNELALPSKYVNFLYLASHYEKLKGSPEDNEQKQLFVEQHKHYLDEIIEQISEFSKRVILADANLDKVLSAYNKHRDKPIREQAENIIHLFTLTNLGAPAAFKYFDTTIDRKRYTSTKEVLDATLIHQSITGLYETRIDLSQLGGDGGGSSGGSEAAAKGGTLQLDDEYRLYSPLVKPDQNIQFWLEQFPQAWAETAGMGLAKQVPPQVIQLKASATPVSVRQYPLSKEAQEGIRPHVQRLIQQGILVPVQSPWNTPLLPVRKPGTNDYRPVQDLREVNKRVQDIHPTVPNPYNLLCALPPQRSWYTVLDLKDAFFCLRLHPTSQPLFAFEWRDPGTGRTGQLTWTRLPQGFKNSPTIFNEALHRDLANFRIQHPQVTLLQYVDDLLLAGATKQDCLEGTKALLLELSDLGYRASAKKAQICRREVTYLGYSLRDGQRWLTEARKKTVVQIPAPTTAKQVREFLGTAGFCRLWIPGFATLAAPLYPLTKPKGEFSWAPEHQKAFDAIKKALLSAPALALPDVTKPFTLYVDERKGVARGVLTQTLGPWRRPVAYLSKKLDPVASGWPVCLKAIAAVAILVKDADKLTLGQNITVIAPHALENIVRQPPDRWMTNARMTHYQSLLLTERVTFAPPAALNPATLLPEETDEPVTHDCHQLLIEETGVRKDLTDIPLTGEVLTWFTDGSSYVVEGKRMAGAAVVDGTRTIWASSLPEGTSAQKAELMALTQALRLAEGKSINIYTDSRYAFATAHVHGAIYKQRGWLTSAGREIKNKEEILSLLEALHLPKRLAIIHCPGHQKAKDPISRGNQMADRVAKQAAQGVNLLAGKRTADGSEFEKRTADGSEFESPKKKAKVE

SEQ ID NO: 171 - protein, 2088 aa, synthetic construct
MPAAKRVKLDGGDKKYSIGLDIGTNSVGWAVITDEYKVPSKKFKVLGNTDRHSIKKNLIGALLFDSGETAEATRLKRTARRRYTRRKNRICYLQEIFSNEMAKVDDSFFHRLEESFLVEEDKKHERHPIFGNIVDEVAYHEKYPTIYHLRKKLVDSTDKADLRLIYLALAHMIKFRGHFLIEGDLNPDNSDVDKLFIQLVQTYNQLFEENPINASGVDAKAILSARLSKSRRLENLIAQLPGEKKNGLFGNLIALSLGLTPNFKSNFDLAEDAKLQLSKDTYDDDLDNLLAQIGDQYADLFLAAKNLSDAILLSDILRVNTEITKAPLSASMIKRYDEHHQDLTLLKALVRQQLPEKYKEIFFDQSKNGYAGYIDGGASQEEFYKFIKPILEKMDGTEELLVKLNREDLLRKQRTFDNGSIPHQIHLGELHAILRRQEDFYPFLKDNREKIEKILTFRIPYYVGPLARGNSRFAWMTRKSEETITPWNFEEVVDKGASAQSFIERMTNFDKNLPNEKVLPKHSLLYEYFTVYNELTKVKYVTEGMRKPAFLSGEQKKAIVDLLFKTNRKVTVKQLKEDYFKKIECFDSVEISGVEDRFNASLGTYHDLLKIIKDKDFLDNEENEDILEDIVLTLTLFEDREMIEERLKTYAHLFDDKVMKQLKRRRYTGWGRLSRKLINGIRDKQSGKTILDFLKSDGFANRNFMQLIHDDSLTFKEDIQKAQVSGQGDSLHEHIANLAGSPAIKKGILQTVKVVDELVKVMGRHKPENIVIEMARENQTTQKGQKNSRERMKRIEEGIKELGSQILKEHPVENTQLQNEKLYLYYLQNGRDMYVDQELDINRLSDYDVDHIVPQSFLKDDSIDNKVLTRSDKARGKSDNVPSEEVVKKMKNYWRQLLNAKLITQRKFDNLTKAERGGLSELDKAGFIKRQLVETRQITKHVAQILDSRMNTKYDENDKLIREVKVITLKSKLVSDFRKDFQFYKVREINNYHHAHDAYLNAVVGTALIKKYPKLESEFVYGDYKVYDVRKMIAKSEQEIGKATAKYFFYSNIMNFFKTEITLANGEIRKRPLIETNGETGEIVWDKGRDFATVRKVLSMPQVNIVKKTEVQTGGFSKESILPKRNSDKLIARKKDWDPKKYGGFDSPTVAYSVLVVAKVEKGKSKKLKSVKELLGITIMERSSFEKNPIDFLEAKGYKEVKKDLIIKLPKYSLFELENGRKRMLASAGELQKGNELALPSKYVNFLYLASHYEKLKGSPEDNEQKQLFVEQHKHYLDEIIEQISEFSKRVILADANLDKVLSAYNKHRDKPIREQAENIIHLFTLTNLGAPAAFKYFDTTIDRKRYTSTKEVLDATLIHQSITGLYETRIDLSQLGGDGGGSSPAPGGSGGTLQLDDEYRLYSPLVKPDQNIQFWLEQFPQAWAETAGMGLAKQVPPQVIQLKASATPVSVRQYPLSKEAQEGIRPHVQRLIQQGILVPVQSPWNTPLLPVRKPGTNDYRPVQDLREVNKRVQDIHPTVPNPYNLLCALPPQRSWYTVLDLKDAFFCLRLHPTSQPLFAFEWRDPGTGRTGQLTWTRLPQGFKNSPTIFNEALHRDLANFRIQHPQVTLLQYVDDLLLAGATKQDCLEGTKALLLELSDLGYRASAKKAQICRREVTYLGYSLRDGQRWLTEARKKTVVQIPAPTTAKQVREFLGTAGFCRLWIPGFATLAAPLYPLTKPKGEFSWAPEHQKAFDAIKKALLSAPALALPDVTKPFTLYVDERKGVARGVLTQTLGPWRRPVAYLSKKLDPVASGWPVCLKAIAAVAILVKDADKLTLGQNITVIAPHALENIVRQPPDRWMTNARMTHYQSLLLTERVTFAPPAALNPATLLPEETDEPVTHDCHQLLIEETGVRKDLTDIPLTGEVLTWFTDGSSYVVEGKRMAGAAVVDGTRTIWASSLPEGTSAQKAELMALTQALRLAEGKSINIYTDSRYAFATAHVHGAIYKQRGWLTSAGREIKNKEEILSLLEALHLPKRLAIIHCPGHQKAKDPISRGNQMADRVAKQAAQGVNLLAGKRTADGSEFEKRTADGSEFESPKKKAKVE

SEQ ID NO: 172 - protein, 2090 aa, synthetic construct
MPAAKRVKLDGGDKKYSIGLDIGTNSVGWAVITDEYKVPSKKFKVLGNTDRHSIKKNLIGALLFDSGETAEATRLKRTARRRYTRRKNRICYLQEIFSNEMAKVDDSFFHRLEESFLVEEDKKHERHPIFGNIVDEVAYHEKYPTIYHLRKKLVDSTDKADLRLIYLALAHMIKFRGHFLIEGDLNPDNSDVDKLFIQLVQTYNQLFEENPINASGVDAKAILSARLSKSRRLENLIAQLPGEKKNGLFGNLIALSLGLTPNFKSNFDLAEDAKLQLSKDTYDDDLDNLLAQIGDQYADLFLAAKNLSDAILLSDILRVNTEITKAPLSASMIKRYDEHHQDLTLLKALVRQQLPEKYKEIFFDQSKNGYAGYIDGGASQEEFYKFIKPILEKMDGTEELLVKLNREDLLRKQRTFDNGSIPHQIHLGELHAILRRQEDFYPFLKDNREKIEKILTFRIPYYVGPLARGNSRFAWMTRKSEETITPWNFEEVVDKGASAQSFIERMTNFDKNLPNEKVLPKHSLLYEYFTVYNELTKVKYVTEGMRKPAFLSGEQKKAIVDLLFKTNRKVTVKQLKEDYFKKIECFDSVEISGVEDRFNASLGTYHDLLKIIKDKDFLDNEENEDILEDIVLTLTLFEDREMIEERLKTYAHLFDDKVMKQLKRRRYTGWGRLSRKLINGIRDKQSGKTILDFLKSDGFANRNFMQLIHDDSLTFKEDIQKAQVSGQGDSLHEHIANLAGSPAIKKGILQTVKVVDELVKVMGRHKPENIVIEMARENQTTQKGQKNSRERMKRIEEGIKELGSQILKEHPVENTQLQNEKLYLYYLQNGRDMYVDQELDINRLSDYDVDHIVPQSFLKDDSIDNKVLTRSDKARGKSDNVPSEEVVKKMKNYWRQLLNAKLITQRKFDNLTKAERGGLSELDKAGFIKRQLVETRQITKHVAQILDSRMNTKYDENDKLIREVKVITLKSKLVSDFRKDFQFYKVREINNYHHAHDAYLNAVVGTALIKKYPKLESEFVYGDYKVYDVRKMIAKSEQEIGKATAKYFFYSNIMNFFKTEITLANGEIRKRPLIETNGETGEIVWDKGRDFATVRKVLSMPQVNIVKKTEVQTGGFSKESILPKRNSDKLIARKKDWDPKKYGGFDSPTVAYSVLVVAKVEKGKSKKLKSVKELLGITIMERSSFEKNPIDFLEAKGYKEVKKDLIIKLPKYSLFELENGRKRMLASAGELQKGNELALPSKYVNFLYLASHYEKLKGSPEDNEQKQLFVEQHKHYLDEIIEQISEFSKRVILADANLDKVLSAYNKHRDKPIREQAENIIHLFTLTNLGAPAAFKYFDTTIDRKRYTSTKEVLDATLIHQSITGLYETRIDLSQLGGDGGGGSGGGEAAAKGGTLQLDDEYRLYSPLVKPDQNIQFWLEQFPQAWAETAGMGLAKQVPPQVIQLKASATPVSVRQYPLSKEAQEGIRPHVQRLIQQGILVPVQSPWNTPLLPVRKPGTNDYRPVQDLREVNKRVQDIHPTVPNPYNLLCALPPQRSWYTVLDLKDAFFCLRLHPTSQPLFAFEWRDPGTGRTGQLTWTRLPQGFKNSPTIFNEALHRDLANFRIQHPQVTLLQYVDDLLLAGATKQDCLEGTKALLLELSDLGYRASAKKAQICRREVTYLGYSLRDGQRWLTEARKKTVVQIPAPTTAKQVREFLGTAGFCRLWIPGFATLAAPLYPLTKPKGEFSWAPEHQKAFDAIKKALLSAPALALPDVTKPFTLYVDERKGVARGVLTQTLGPWRRPVAYLSKKLDPVASGWPVCLKAIAAVAILVKDADKLTLGQNITVIAPHALENIVRQPPDRWMTNARMTHYQSLLLTERVTFAPPAALNPATLLPEETDEPVTHDCHQLLIEETGVRKDLTDIPLTGEVLTWFTDGSSYVVEGKRMAGAAVVDGTRTIWASSLPEGTSAQKAELMALTQALRLAEGKSINIYTDSRYAFATAHVHGAIYKQRGWLTSAGREIKNKEEILSLLEALHLPKRLAIIHCPGHQKAKDPISRGNQMADRVAKQAAQGVNLLAGKRTADGSEFEKRTADGSEFESPKKKAKVE

SEQ ID NO: 173 - protein, 2088 aa, synthetic construct
MPAAKRVKLDGGDKKYSIGLDIGTNSVGWAVITDEYKVPSKKFKVLGNTDRHSIKKNLIGALLFDSGETAEATRLKRTARRRYTRRKNRICYLQEIFSNEMAKVDDSFFHRLEESFLVEEDKKHERHPIFGNIVDEVAYHEKYPTIYHLRKKLVDSTDKADLRLIYLALAHMIKFRGHFLIEGDLNPDNSDVDKLFIQLVQTYNQLFEENPINASGVDAKAILSARLSKSRRLENLIAQLPGEKKNGLFGNLIALSLGLTPNFKSNFDLAEDAKLQLSKDTYDDDLDNLLAQIGDQYADLFLAAKNLSDAILLSDILRVNTEITKAPLSASMIKRYDEHHQDLTLLKALVRQQLPEKYKEIFFDQSKNGYAGYIDGGASQEEFYKFIKPILEKMDGTEELLVKLNREDLLRKQRTFDNGSIPHQIHLGELHAILRRQEDFYPFLKDNREKIEKILTFRIPYYVGPLARGNSRFAWMTRKSEETITPWNFEEVVDKGASAQSFIERMTNFDKNLPNEKVLPKHSLLYEYFTVYNELTKVKYVTEGMRKPAFLSGEQKKAIVDLLFKTNRKVTVKQLKEDYFKKIECFDSVEISGVEDRFNASLGTYHDLLKIIKDKDFLDNEENEDILEDIVLTLTLFEDREMIEERLKTYAHLFDDKVMKQLKRRRYTGWGRLSRKLINGIRDKQSGKTILDFLKSDGFANRNFMQLIHDDSLTFKEDIQKAQVSGQGDSLHEHIANLAGSPAIKKGILQTVKVVDELVKVMGRHKPENIVIEMARENQTTQKGQKNSRERMKRIEEGIKELGSQILKEHPVENTQLQNEKLYLYYLQNGRDMYVDQELDINRLSDYDVDHIVPQSFLKDDSIDNKVLTRSDKARGKSDNVPSEEVVKKMKNYWRQLLNAKLITQRKFDNLTKAERGGLSELDKAGFIKRQLVETRQITKHVAQILDSRMNTKYDENDKLIREVKVITLKSKLVSDFRKDFQFYKVREINNYHHAHDAYLNAVVGTALIKKYPKLESEFVYGDYKVYDVRKMIAKSEQEIGKATAKYFFYSNIMNFFKTEITLANGEIRKRPLIETNGETGEIVWDKGRDFATVRKVLSMPQVNIVKKTEVQTGGFSKESILPKRNSDKLIARKKDWDPKKYGGFDSPTVAYSVLVVAKVEKGKSKKLKSVKELLGITIMERSSFEKNPIDFLEAKGYKEVKKDLIIKLPKYSLFELENGRKRMLASAGELQKGNELALPSKYVNFLYLASHYEKLKGSPEDNEQKQLFVEQHKHYLDEIIEQISEFSKRVILADANLDKVLSAYNKHRDKPIREQAENIIHLFTLTNLGAPAAFKYFDTTIDRKRYTSTKEVLDATLIHQSITGLYETRIDLSQLGGDGGPAPGGGGGSGGTLQLDDEYRLYSPLVKPDQNIQFWLEQFPQAWAETAGMGLAKQVPPQVIQLKASATPVSVRQYPLSKEAQEGIRPHVQRLIQQGILVPVQSPWNTPLLPVRKPGTNDYRPVQDLREVNKRVQDIHPTVPNPYNLLCALPPQRSWYTVLDLKDAFFCLRLHPTSQPLFAFEWRDPGTGRTGQLTWTRLPQGFKNSPTIFNEALHRDLANFRIQHPQVTLLQYVDDLLLAGATKQDCLEGTKALLLELSDLGYRASAKKAQICRREVTYLGYSLRDGQRWLTEARKKTVVQIPAPTTAKQVREFLGTAGFCRLWIPGFATLAAPLYPLTKPKGEFSWAPEHQKAFDAIKKALLSAPALALPDVTKPFTLYVDERKGVARGVLTQTLGPWRRPVAYLSKKLDPVASGWPVCLKAIAAVAILVKDADKLTLGQNITVIAPHALENIVRQPPDRWMTNARMTHYQSLLLTERVTFAPPAALNPATLLPEETDEPVTHDCHQLLIEETGVRKDLTDIPLTGEVLTWFTDGSSYVVEGKRMAGAAVVDGTRTIWASSLPEGTSAQKAELMALTQALRLAEGKSINIYTDSRYAFATAHVHGAIYKQRGWLTSAGREIKNKEEILSLLEALHLPKRLAIIHCPGHQKAKDPISRGNQMADRVAKQAAQGVNLLAGKRTADGSEFEKRTADGSEFESPKKKAKVE

SEQ ID NO: 174 - protein, 2085 aa, synthetic construct
MPAAKRVKLDGGDKKYSIGLDIGTNSVGWAVITDEYKVPSKKFKVLGNTDRHSIKKNLIGALLFDSGETAEATRLKRTARRRYTRRKNRICYLQEIFSNEMAKVDDSFFHRLEESFLVEEDKKHERHPIFGNIVDEVAYHEKYPTIYHLRKKLVDSTDKADLRLIYLALAHMIKFRGHFLIEGDLNPDNSDVDKLFIQLVQTYNQLFEENPINASGVDAKAILSARLSKSRRLENLIAQLPGEKKNGLFGNLIALSLGLTPNFKSNFDLAEDAKLQLSKDTYDDDLDNLLAQIGDQYADLFLAAKNLSDAILLSDILRVNTEITKAPLSASMIKRYDEHHQDLTLLKALVRQQLPEKYKEIFFDQSKNGYAGYIDGGASQEEFYKFIKPILEKMDGTEELLVKLNREDLLRKQRTFDNGSIPHQIHLGELHAILRRQEDFYPFLKDNREKIEKILTFRIPYYVGPLARGNSRFAWMTRKSEETITPWNFEEVVDKGASAQSFIERMTNFDKNLPNEKVLPKHSLLYEYFTVYNELTKVKYVTEGMRKPAFLSGEQKKAIVDLLFKTNRKVTVKQLKEDYFKKIECFDSVEISGVEDRFNASLGTYHDLLKIIKDKDFLDNEENEDILEDIVLTLTLFEDREMIEERLKTYAHLFDDKVMKQLKRRRYTGWGRLSRKLINGIRDKQSGKTILDFLKSDGFANRNFMQLIHDDSLTFKEDIQKAQVSGQGDSLHEHIANLAGSPAIKKGILQTVKVVDELVKVMGRHKPENIVIEMARENQTTQKGQKNSRERMKRIEEGIKELGSQILKEHPVENTQLQNEKLYLYYLQNGRDMYVDQELDINRLSDYDVDHIVPQSFLKDDSIDNKVLTRSDKARGKSDNVPSEEVVKKMKNYWRQLLNAKLITQRKFDNLTKAERGGLSELDKAGFIKRQLVETRQITKHVAQILDSRMNTKYDENDKLIREVKVITLKSKLVSDFRKDFQFYKVREINNYHHAHDAYLNAVVGTALIKKYPKLESEFVYGDYKVYDVRKMIAKSEQEIGKATAKYFFYSNIMNFFKTEITLANGEIRKRPLIETNGETGEIVWDKGRDFATVRKVLSMPQVNIVKKTEVQTGGFSKESILPKRNSDKLIARKKDWDPKKYGGFDSPTVAYSVLVVAKVEKGKSKKLKSVKELLGITIMERSSFEKNPIDFLEAKGYKEVKKDLIIKLPKYSLFELENGRKRMLASAGELQKGNELALPSKYVNFLYLASHYEKLKGSPEDNEQKQLFVEQHKHYLDEIIEQISEFSKRVILADANLDKVLSAYNKHRDKPIREQAENIIHLFTLTNLGAPAAFKYFDTTIDRKRYTSTKEVLDATLIHQSITGLYETRIDLSQLGGDGGGSSGGGGGTLQLDDEYRLYSPLVKPDQNIQFWLEQFPQAWAETAGMGLAKQVPPQVIQLKASATPVSVRQYPLSKEAQEGIRPHVQRLIQQGILVPVQSPWNTPLLPVRKPGTNDYRPVQDLREVNKRVQDIHPTVPNPYNLLCALPPQRSWYTVLDLKDAFFCLRLHPTSQPLFAFEWRDPGTGRTGQLTWTRLPQGFKNSPTIFNEALHRDLANFRIQHPQVTLLQYVDDLLLAGATKQDCLEGTKALLLELSDLGYRASAKKAQICRREVTYLGYSLRDGQRWLTEARKKTVVQIPAPTTAKQVREFLGTAGFCRLWIPGFATLAAPLYPLTKPKGEFSWAPEHQKAFDAIKKALLSAPALALPDVTKPFTLYVDERKGVARGVLTQTLGPWRRPVAYLSKKLDPVASGWPVCLKAIAAVAILVKDADKLTLGQNITVIAPHALENIVRQPPDRWMTNARMTHYQSLLLTERVTFAPPAALNPATLLPEETDEPVTHDCHQLLIEETGVRKDLTDIPLTGEVLTWFTDGSSYVVEGKRMAGAAVVDGTRTIWASSLPEGTSAQKAELMALTQALRLAEGKSINIYTDSRYAFATAHVHGAIYKQRGWLTSAGREIKNKEEILSLLEALHLPKRLAIIHCPGHQKAKDPISRGNQMADRVAKQAAQGVNLLAGKRTADGSEFEKRTADGSEFESPKKKAKVE

SEQ ID NO: 175 - protein, 2088 aa, synthetic construct
MPAAKRVKLDGGDKKYSIGLDIGTNSVGWAVITDEYKVPSKKFKVLGNTDRHSIKKNLIGALLFDSGETAEATRLKRTARRRYTRRKNRICYLQEIFSNEMAKVDDSFFHRLEESFLVEEDKKHERHPIFGNIVDEVAYHEKYPTIYHLRKKLVDSTDKADLRLIYLALAHMIKFRGHFLIEGDLNPDNSDVDKLFIQLVQTYNQLFEENPINASGVDAKAILSARLSKSRRLENLIAQLPGEKKNGLFGNLIALSLGLTPNFKSNFDLAEDAKLQLSKDTYDDDLDNLLAQIGDQYADLFLAAKNLSDAILLSDILRVNTEITKAPLSASMIKRYDEHHQDLTLLKALVRQQLPEKYKEIFFDQSKNGYAGYIDGGASQEEFYKFIKPILEKMDGTEELLVKLNREDLLRKQRTFDNGSIPHQIHLGELHAILRRQEDFYPFLKDNREKIEKILTFRIPYYVGPLARGNSRFAWMTRKSEETITPWNFEEVVDKGASAQSFIERMTNFDKNLPNEKVLPKHSLLYEYFTVYNELTKVKYVTEGMRKPAFLSGEQKKAIVDLLFKTNRKVTVKQLKEDYFKKIECFDSVEISGVEDRFNASLGTYHDLLKIIKDKDFLDNEENEDILEDIVLTLTLFEDREMIEERLKTYAHLFDDKVMKQLKRRRYTGWGRLSRKLINGIRDKQSGKTILDFLKSDGFANRNFMQLIHDDSLTFKEDIQKAQVSGQGDSLHEHIANLAGSPAIKKGILQTVKVVDELVKVMGRHKPENIVIEMARENQTTQKGQKNSRERMKRIEEGIKELGSQILKEHPVENTQLQNEKLYLYYLQNGRDMYVDQELDINRLSDYDVDHIVPQSFLKDDSIDNKVLTRSDKARGKSDNVPSEEVVKKMKNYWRQLLNAKLITQRKFDNLTKAERGGLSELDKAGFIKRQLVETRQITKHVAQILDSRMNTKYDENDKLIREVKVITLKSKLVSDFRKDFQFYKVREINNYHHAHDAYLNAVVGTALIKKYPKLESEFVYGDYKVYDVRKMIAKSEQEIGKATAKYFFYSNIMNFFKTEITLANGEIRKRPLIETNGETGEIVWDKGRDFATVRKVLSMPQVNIVKKTEVQTGGFSKESILPKRNSDKLIARKKDWDPKKYGGFDSPTVAYSVLVVAKVEKGKSKKLKSVKELLGITIMERSSFEKNPIDFLEAKGYKEVKKDLIIKLPKYSLFELENGRKRMLASAGELQKGNELALPSKYVNFLYLASHYEKLKGSPEDNEQKQLFVEQHKHYLDEIIEQISEFSKRVILADANLDKVLSAYNKHRDKPIREQAENIIHLFTLTNLGAPAAFKYFDTTIDRKRYTSTKEVLDATLIHQSITGLYETRIDLSQLGGDGGGGSPAPGSSGGTLQLDDEYRLYSPLVKPDQNIQFWLEQFPQAWAETAGMGLAKQVPPQVIQLKASATPVSVRQYPLSKEAQEGIRPHVQRLIQQGILVPVQSPWNTPLLPVRKPGTNDYRPVQDLREVNKRVQDIHPTVPNPYNLLCALPPQRSWYTVLDLKDAFFCLRLHPTSQPLFAFEWRDPGTGRTGQLTWTRLPQGFKNSPTIFNEALHRDLANFRIQHPQVTLLQYVDDLLLAGATKQDCLEGTKALLLELSDLGYRASAKKAQICRREVTYLGYSLRDGQRWLTEARKKTVVQIPAPTTAKQVREFLGTAGFCRLWIPGFATLAAPLYPLTKPKGEFSWAPEHQKAFDAIKKALLSAPALALPDVTKPFTLYVDERKGVARGVLTQTLGPWRRPVAYLSKKLDPVASGWPVCLKAIAAVAILVKDADKLTLGQNITVIAPHALENIVRQPPDRWMTNARMTHYQSLLLTERVTFAPPAALNPATLLPEETDEPVTHDCHQLLIEETGVRKDLTDIPLTGEVLTWFTDGSSYVVEGKRMAGAAVVDGTRTIWASSLPEGTSAQKAELMALTQALRLAEGKSINIYTDSRYAFATAHVHGAIYKQRGWLTSAGREIKNKEEILSLLEALHLPKRLAIIHCPGHQKAKDPISRGNQMADRVAKQAAQGVNLLAGKRTADGSEFEKRTADGSEFESPKKKAKVE

SEQ ID NO: 176 - protein, 2085 aa, synthetic construct
MPAAKRVKLDGGDKKYSIGLDIGTNSVGWAVITDEYKVPSKKFKVLGNTDRHSIKKNLIGALLFDSGETAEATRLKRTARRRYTRRKNRICYLQEIFSNEMAKVDDSFFHRLEESFLVEEDKKHERHPIFGNIVDEVAYHEKYPTIYHLRKKLVDSTDKADLRLIYLALAHMIKFRGHFLIEGDLNPDNSDVDKLFIQLVQTYNQLFEENPINASGVDAKAILSARLSKSRRLENLIAQLPGEKKNGLFGNLIALSLGLTPNFKSNFDLAEDAKLQLSKDTYDDDLDNLLAQIGDQYADLFLAAKNLSDAILLSDILRVNTEITKAPLSASMIKRYDEHHQDLTLLKALVRQQLPEKYKEIFFDQSKNGYAGYIDGGASQEEFYKFIKPILEKMDGTEELLVKLNREDLLRKQRTFDNGSIPHQIHLGELHAILRRQEDFYPFLKDNREKIEKILTFRIPYYVGPLARGNSRFAWMTRKSEETITPWNFEEVVDKGASAQSFIERMTNFDKNLPNEKVLPKHSLLYEYFTVYNELTKVKYVTEGMRKPAFLSGEQKKAIVDLLFKTNRKVTVKQLKEDYFKKIECFDSVEISGVEDRFNASLGTYHDLLKIIKDKDFLDNEENEDILEDIVLTLTLFEDREMIEERLKTYAHLFDDKVMKQLKRRRYTGWGRLSRKLINGIRDKQSGKTILDFLKSDGFANRNFMQLIHDDSLTFKEDIQKAQVSGQGDSLHEHIANLAGSPAIKKGILQTVKVVDELVKVMGRHKPENIVIEMARENQTTQKGQKNSRERMKRIEEGIKELGSQILKEHPVENTQLQNEKLYLYYLQNGRDMYVDQELDINRLSDYDVDHIVPQSFLKDDSIDNKVLTRSDKARGKSDNVPSEEVVKKMKNYWRQLLNAKLITQRKFDNLTKAERGGLSELDKAGFIKRQLVETRQITKHVAQILDSRMNTKYDENDKLIREVKVITLKSKLVSDFRKDFQFYKVREINNYHHAHDAYLNAVVGTALIKKYPKLESEFVYGDYKVYDVRKMIAKSEQEIGKATAKYFFYSNIMNFFKTEITLANGEIRKRPLIETNGETGEIVWDKGRDFATVRKVLSMPQVNIVKKTEVQTGGFSKESILPKRNSDKLIARKKDWDPKKYGGFDSPTVAYSVLVVAKVEKGKSKKLKSVKELLGITIMERSSFEKNPIDFLEAKGYKEVKKDLIIKLPKYSLFELENGRKRMLASAGELQKGNELALPSKYVNFLYLASHYEKLKGSPEDNEQKQLFVEQHKHYLDEIIEQISEFSKRVILADANLDKVLSAYNKHRDKPIREQAENIIHLFTLTNLGAPAAFKYFDTTIDRKRYTSTKEVLDATLIHQSITGLYETRIDLSQLGGDGGGGSGSSGGTLQLDDEYRLYSPLVKPDQNIQFWLEQFPQAWAETAGMGLAKQVPPQVIQLKASATPVSVRQYPLSKEAQEGIRPHVQRLIQQGILVPVQSPWNTPLLPVRKPGTNDYRPVQDLREVNKRVQDIHPTVPNPYNLLCALPPQRSWYTVLDLKDAFFCLRLHPTSQPLFAFEWRDPGTGRTGQLTWTRLPQGFKNSPTIFNEALHRDLANFRIQHPQVTLLQYVDDLLLAGATKQDCLEGTKALLLELSDLGYRASAKKAQICRREVTYLGYSLRDGQRWLTEARKKTVVQIPAPTTAKQVREFLGTAGFCRLWIPGFATLAAPLYPLTKPKGEFSWAPEHQKAFDAIKKALLSAPALALPDVTKPFTLYVDERKGVARGVLTQTLGPWRRPVAYLSKKLDPVASGWPVCLKAIAAVAILVKDADKLTLGQNITVIAPHALENIVRQPPDRWMTNARMTHYQSLLLTERVTFAPPAALNPATLLPEETDEPVTHDCHQLLIEETGVRKDLTDIPLTGEVLTWFTDGSSYVVEGKRMAGAAVVDGTRTIWASSLPEGTSAQKAELMALTQALRLAEGKSINIYTDSRYAFATAHVHGAIYKQRGWLTSAGREIKNKEEILSLLEALHLPKRLAIIHCPGHQKAKDPISRGNQMADRVAKQAAQGVNLLAGKRTADGSEFEKRTADGSEFESPKKKAKVE

SEQ ID NO: 177 - protein, 2082 aa, synthetic construct
MPAAKRVKLDGGDKKYSIGLDIGTNSVGWAVITDEYKVPSKKFKVLGNTDRHSIKKNLIGALLFDSGETAEATRLKRTARRRYTRRKNRICYLQEIFSNEMAKVDDSFFHRLEESFLVEEDKKHERHPIFGNIVDEVAYHEKYPTIYHLRKKLVDSTDKADLRLIYLALAHMIKFRGHFLIEGDLNPDNSDVDKLFIQLVQTYNQLFEENPINASGVDAKAILSARLSKSRRLENLIAQLPGEKKNGLFGNLIALSLGLTPNFKSNFDLAEDAKLQLSKDTYDDDLDNLLAQIGDQYADLFLAAKNLSDAILLSDILRVNTEITKAPLSASMIKRYDEHHQDLTLLKALVRQQLPEKYKEIFFDQSKNGYAGYIDGGASQEEFYKFIKPILEKMDGTEELLVKLNREDLLRKQRTFDNGSIPHQIHLGELHAILRRQEDFYPFLKDNREKIEKILTFRIPYYVGPLARGNSRFAWMTRKSEETITPWNFEEVVDKGASAQSFIERMTNFDKNLPNEKVLPKHSLLYEYFTVYNELTKVKYVTEGMRKPAFLSGEQKKAIVDLLFKTNRKVTVKQLKEDYFKKIECFDSVEISGVEDRFNASLGTYHDLLKIIKDKDFLDNEENEDILEDIVLTLTLFEDREMIEERLKTYAHLFDDKVMKQLKRRRYTGWGRLSRKLINGIRDKQSGKTILDFLKSDGFANRNFMQLIHDDSLTFKEDIQKAQVSGQGDSLHEHIANLAGSPAIKKGILQTVKVVDELVKVMGRHKPENIVIEMARENQTTQKGQKNSRERMKRIEEGIKELGSQILKEHPVENTQLQNEKLYLYYLQNGRDMYVDQELDINRLSDYDVDHIVPQSFLKDDSIDNKVLTRSDKARGKSDNVPSEEVVKKMKNYWRQLLNAKLITQRKFDNLTKAERGGLSELDKAGFIKRQLVETRQITKHVAQILDSRMNTKYDENDKLIREVKVITLKSKLVSDFRKDFQFYKVREINNYHHAHDAYLNAVVGTALIKKYPKLESEFVYGDYKVYDVRKMIAKSEQEIGKATAKYFFYSNIMNFFKTEITLANGEIRKRPLIETNGETGEIVWDKGRDFATVRKVLSMPQVNIVKKTEVQTGGFSKESILPKRNSDKLIARKKDWDPKKYGGFDSPTVAYSVLVVAKVEKGKSKKLKSVKELLGITIMERSSFEKNPIDFLEAKGYKEVKKDLIIKLPKYSLFELENGRKRMLASAGELQKGNELALPSKYVNFLYLASHYEKLKGSPEDNEQKQLFVEQHKHYLDEIIEQISEFSKRVILADANLDKVLSAYNKHRDKPIREQAENIIHLFTLTNLGAPAAFKYFDTTIDRKRYTSTKEVLDATLIHQSITGLYETRIDLSQLGGDGGPAPGGTLQLDDEYRLYSPLVKPDQNIQFWLEQFPQAWAETAGMGLAKQVPPQVIQLKASATPVSVRQYPLSKEAQEGIRPHVQRLIQQGILVPVQSPWNTPLLPVRKPGTNDYRPVQDLREVNKRVQDIHPTVPNPYNLLCALPPQRSWYTVLDLKDAFFCLRLHPTSQPLFAFEWRDPGTGRTGQLTWTRLPQGFKNSPTIFNEALHRDLANFRIQHPQVTLLQYVDDLLLAGATKQDCLEGTKALLLELSDLGYRASAKKAQICRREVTYLGYSLRDGQRWLTEARKKTVVQIPAPTTAKQVREFLGTAGFCRLWIPGFATLAAPLYPLTKPKGEFSWAPEHQKAFDAIKKALLSAPALALPDVTKPFTLYVDERKGVARGVLTQTLGPWRRPVAYLSKKLDPVASGWPVCLKAIAAVAILVKDADKLTLGQNITVIAPHALENIVRQPPDRWMTNARMTHYQSLLLTERVTFAPPAALNPATLLPEETDEPVTHDCHQLLIEETGVRKDLTDIPLTGEVLTWFTDGSSYVVEGKRMAGAAVVDGTRTIWASSLPEGTSAQKAELMALTQALRLAEGKSINIYTDSRYAFATAHVHGAIYKQRGWLTSAGREIKNKEEILSLLEALHLPKRLAIIHCPGHQKAKDPISRGNQMADRVAKQAAQGVNLLAGKRTADGSEFEKRTADGSEFESPKKKAKVE

SEQ ID NO: 178 - protein, 2085 aa, synthetic construct
MPAAKRVKLDGGDKKYSIGLDIGTNSVGWAVITDEYKVPSKKFKVLGNTDRHSIKKNLIGALLFDSGETAEATRLKRTARRRYTRRKNRICYLQEIFSNEMAKVDDSFFHRLEESFLVEEDKKHERHPIFGNIVDEVAYHEKYPTIYHLRKKLVDSTDKADLRLIYLALAHMIKFRGHFLIEGDLNPDNSDVDKLFIQLVQTYNQLFEENPINASGVDAKAILSARLSKSRRLENLIAQLPGEKKNGLFGNLIALSLGLTPNFKSNFDLAEDAKLQLSKDTYDDDLDNLLAQIGDQYADLFLAAKNLSDAILLSDILRVNTEITKAPLSASMIKRYDEHHQDLTLLKALVRQQLPEKYKEIFFDQSKNGYAGYIDGGASQEEFYKFIKPILEKMDGTEELLVKLNREDLLRKQRTFDNGSIPHQIHLGELHAILRRQEDFYPFLKDNREKIEKILTFRIPYYVGPLARGNSRFAWMTRKSEETITPWNFEEVVDKGASAQSFIERMTNFDKNLPNEKVLPKHSLLYEYFTVYNELTKVKYVTEGMRKPAFLSGEQKKAIVDLLFKTNRKVTVKQLKEDYFKKIECFDSVEISGVEDRFNASLGTYHDLLKIIKDKDFLDNEENEDILEDIVLTLTLFEDREMIEERLKTYAHLFDDKVMKQLKRRRYTGWGRLSRKLINGIRDKQSGKTILDFLKSDGFANRNFMQLIHDDSLTFKEDIQKAQVSGQGDSLHEHIANLAGSPAIKKGILQTVKVVDELVKVMGRHKPENIVIEMARENQTTQKGQKNSRERMKRIEEGIKELGSQILKEHPVENTQLQNEKLYLYYLQNGRDMYVDQELDINRLSDYDVDHIVPQSFLKDDSIDNKVLTRSDKARGKSDNVPSEEVVKKMKNYWRQLLNAKLITQRKFDNLTKAERGGLSELDKAGFIKRQLVETRQITKHVAQILDSRMNTKYDENDKLIREVKVITLKSKLVSDFRKDFQFYKVREINNYHHAHDAYLNAVVGTALIKKYPKLESEFVYGDYKVYDVRKMIAKSEQEIGKATAKYFFYSNIMNFFKTEITLANGEIRKRPLIETNGETGEIVWDKGRDFATVRKVLSMPQVNIVKKTEVQTGGFSKESILPKRNSDKLIARKKDWDPKKYGGFDSPTVAYSVLVVAKVEKGKSKKLKSVKELLGITIMERSSFEKNPIDFLEAKGYKEVKKDLIIKLPKYSLFELENGRKRMLASAGELQKGNELALPSKYVNFLYLASHYEKLKGSPEDNEQKQLFVEQHKHYLDEIIEQISEFSKRVILADANLDKVLSAYNKHRDKPIREQAENIIHLFTLTNLGAPAAFKYFDTTIDRKRYTSTKEVLDATLIHQSITGLYETRIDLSQLGGDGGGSSGSSGGTLQLDDEYRLYSPLVKPDQNIQFWLEQFPQAWAETAGMGLAKQVPPQVIQLKASATPVSVRQYPLSKEAQEGIRPHVQRLIQQGILVPVQSPWNTPLLPVRKPGTNDYRPVQDLREVNKRVQDIHPTVPNPYNLLCALPPQRSWYTVLDLKDAFFCLRLHPTSQPLFAFEWRDPGTGRTGQLTWTRLPQGFKNSPTIFNEALHRDLANFRIQHPQVTLLQYVDDLLLAGATKQDCLEGTKALLLELSDLGYRASAKKAQICRREVTYLGYSLRDGQRWLTEARKKTVVQIPAPTTAKQVREFLGTAGFCRLWIPGFATLAAPLYPLTKPKGEFSWAPEHQKAFDAIKKALLSAPALALPDVTKPFTLYVDERKGVARGVLTQTLGPWRRPVAYLSKKLDPVASGWPVCLKAIAAVAILVKDADKLTLGQNITVIAPHALENIVRQPPDRWMTNARMTHYQSLLLTERVTFAPPAALNPATLLPEETDEPVTHDCHQLLIEETGVRKDLTDIPLTGEVLTWFTDGSSYVVEGKRMAGAAVVDGTRTIWASSLPEGTSAQKAELMALTQALRLAEGKSINIYTDSRYAFATAHVHGAIYKQRGWLTSAGREIKNKEEILSLLEALHLPKRLAIIHCPGHQKAKDPISRGNQMADRVAKQAAQGVNLLAGKRTADGSEFEKRTADGSEFESPKKKAKVE

SEQ ID NO: 179 - protein, 2085 aa, synthetic construct
MPAAKRVKLDGGDKKYSIGLDIGTNSVGWAVITDEYKVPSKKFKVLGNTDRHSIKKNLIGALLFDSGETAEATRLKRTARRRYTRRKNRICYLQEIFSNEMAKVDDSFFHRLEESFLVEEDKKHERHPIFGNIVDEVAYHEKYPTIYHLRKKLVDSTDKADLRLIYLALAHMIKFRGHFLIEGDLNPDNSDVDKLFIQLVQTYNQLFEENPINASGVDAKAILSARLSKSRRLENLIAQLPGEKKNGLFGNLIALSLGLTPNFKSNFDLAEDAKLQLSKDTYDDDLDNLLAQIGDQYADLFLAAKNLSDAILLSDILRVNTEITKAPLSASMIKRYDEHHQDLTLLKALVRQQLPEKYKEIFFDQSKNGYAGYIDGGASQEEFYKFIKPILEKMDGTEELLVKLNREDLLRKQRTFDNGSIPHQIHLGELHAILRRQEDFYPFLKDNREKIEKILTFRIPYYVGPLARGNSRFAWMTRKSEETITPWNFEEVVDKGASAQSFIERMTNFDKNLPNEKVLPKHSLLYEYFTVYNELTKVKYVTEGMRKPAFLSGEQKKAIVDLLFKTNRKVTVKQLKEDYFKKIECFDSVEISGVEDRFNASLGTYHDLLKIIKDKDFLDNEENEDILEDIVLTLTLFEDREMIEERLKTYAHLFDDKVMKQLKRRRYTGWGRLSRKLINGIRDKQSGKTILDFLKSDGFANRNFMQLIHDDSLTFKEDIQKAQVSGQGDSLHEHIANLAGSPAIKKGILQTVKVVDELVKVMGRHKPENIVIEMARENQTTQKGQKNSRERMKRIEEGIKELGSQILKEHPVENTQLQNEKLYLYYLQNGRDMYVDQELDINRLSDYDVDHIVPQSFLKDDSIDNKVLTRSDKARGKSDNVPSEEVVKKMKNYWRQLLNAKLITQRKFDNLTKAERGGLSELDKAGFIKRQLVETRQITKHVAQILDSRMNTKYDENDKLIREVKVITLKSKLVSDFRKDFQFYKVREINNYHHAHDAYLNAVVGTALIKKYPKLESEFVYGDYKVYDVRKMIAKSEQEIGKATAKYFFYSNIMNFFKTEITLANGEIRKRPLIETNGETGEIVWDKGRDFATVRKVLSMPQVNIVKKTEVQTGGFSKESILPKRNSDKLIARKKDWDPKKYGGFDSPTVAYSVLVVAKVEKGKSKKLKSVKELLGITIMERSSFEKNPIDFLEAKGYKEVKKDLIIKLPKYSLFELENGRKRMLASAGELQKGNELALPSKYVNFLYLASHYEKLKGSPEDNEQKQLFVEQHKHYLDEIIEQISEFSKRVILADANLDKVLSAYNKHRDKPIREQAENIIHLFTLTNLGAPAAFKYFDTTIDRKRYTSTKEVLDATLIHQSITGLYETRIDLSQLGGDGGGGGGGSGGTLQLDDEYRLYSPLVKPDQNIQFWLEQFPQAWAETAGMGLAKQVPPQVIQLKASATPVSVRQYPLSKEAQEGIRPHVQRLIQQGILVPVQSPWNTPLLPVRKPGTNDYRPVQDLREVNKRVQDIHPTVPNPYNLLCALPPQRSWYTVLDLKDAFFCLRLHPTSQPLFAFEWRDPGTGRTGQLTWTRLPQGFKNSPTIFNEALHRDLANFRIQHPQVTLLQYVDDLLLAGATKQDCLEGTKALLLELSDLGYRASAKKAQICRREVTYLGYSLRDGQRWLTEARKKTVVQIPAPTTAKQVREFLGTAGFCRLWIPGFATLAAPLYPLTKPKGEFSWAPEHQKAFDAIKKALLSAPALALPDVTKPFTLYVDERKGVARGVLTQTLGPWRRPVAYLSKKLDPVASGWPVCLKAIAAVAILVKDADKLTLGQNITVIAPHALENIVRQPPDRWMTNARMTHYQSLLLTERVTFAPPAALNPATLLPEETDEPVTHDCHQLLIEETGVRKDLTDIPLTGEVLTWFTDGSSYVVEGKRMAGAAVVDGTRTIWASSLPEGTSAQKAELMALTQALRLAEGKSINIYTDSRYAFATAHVHGAIYKQRGWLTSAGREIKNKEEILSLLEALHLPKRLAIIHCPGHQKAKDPISRGNQMADRVAKQAAQGVNLLAGKRTADGSEFEKRTADGSEFESPKKKAKVE

SEQ ID NO: 180 - protein, 2088 aa, synthetic construct
MPAAKRVKLDGGDKKYSIGLDIGTNSVGWAVITDEYKVPSKKFKVLGNTDRHSIKKNLIGALLFDSGETAEATRLKRTARRRYTRRKNRICYLQEIFSNEMAKVDDSFFHRLEESFLVEEDKKHERHPIFGNIVDEVAYHEKYPTIYHLRKKLVDSTDKADLRLIYLALAHMIKFRGHFLIEGDLNPDNSDVDKLFIQLVQTYNQLFEENPINASGVDAKAILSARLSKSRRLENLIAQLPGEKKNGLFGNLIALSLGLTPNFKSNFDLAEDAKLQLSKDTYDDDLDNLLAQIGDQYADLFLAAKNLSDAILLSDILRVNTEITKAPLSASMIKRYDEHHQDLTLLKALVRQQLPEKYKEIFFDQSKNGYAGYIDGGASQEEFYKFIKPILEKMDGTEELLVKLNREDLLRKQRTFDNGSIPHQIHLGELHAILRRQEDFYPFLKDNREKIEKILTFRIPYYVGPLARGNSRFAWMTRKSEETITPWNFEEVVDKGASAQSFIERMTNFDKNLPNEKVLPKHSLLYEYFTVYNELTKVKYVTEGMRKPAFLSGEQKKAIVDLLFKTNRKVTVKQLKEDYFKKIECFDSVEISGVEDRFNASLGTYHDLLKIIKDKDFLDNEENEDILEDIVLTLTLFEDREMIEERLKTYAHLFDDKVMKQLKRRRYTGWGRLSRKLINGIRDKQSGKTILDFLKSDGFANRNFMQLIHDDSLTFKEDIQKAQVSGQGDSLHEHIANLAGSPAIKKGILQTVKVVDELVKVMGRHKPENIVIEMARENQTTQKGQKNSRERMKRIEEGIKELGSQILKEHPVENTQLQNEKLYLYYLQNGRDMYVDQELDINRLSDYDVDHIVPQSFLKDDSIDNKVLTRSDKARGKSDNVPSEEVVKKMKNYWRQLLNAKLITQRKFDNLTKAERGGLSELDKAGFIKRQLVETRQITKHVAQILDSRMNTKYDENDKLIREVKVITLKSKLVSDFRKDFQFYKVREINNYHHAHDAYLNAVVGTALIKKYPKLESEFVYGDYKVYDVRKMIAKSEQEIGKATAKYFFYSNIMNFFKTEITLANGEIRKRPLIETNGETGEIVWDKGRDFATVRKVLSMPQVNIVKKTEVQTGGFSKESILPKRNSDKLIARKKDWDPKKYGGFDSPTVAYSVLVVAKVEKGKSKKLKSVKELLGITIMERSSFEKNPIDFLEAKGYKEVKKDLIIKLPKYSLFELENGRKRMLASAGELQKGNELALPSKYVNFLYLASHYEKLKGSPEDNEQKQLFVEQHKHYLDEIIEQISEFSKRVILADANLDKVLSAYNKHRDKPIREQAENIIHLFTLTNLGAPAAFKYFDTTIDRKRYTSTKEVLDATLIHQSITGLYETRIDLSQLGGDGGGGGGSSGGSGGTLQLDDEYRLYSPLVKPDQNIQFWLEQFPQAWAETAGMGLAKQVPPQVIQLKASATPVSVRQYPLSKEAQEGIRPHVQRLIQQGILVPVQSPWNTPLLPVRKPGTNDYRPVQDLREVNKRVQDIHPTVPNPYNLLCALPPQRSWYTVLDLKDAFFCLRLHPTSQPLFAFEWRDPGTGRTGQLTWTRLPQGFKNSPTIFNEALHRDLANFRIQHPQVTLLQYVDDLLLAGATKQDCLEGTKALLLELSDLGYRASAKKAQICRREVTYLGYSLRDGQRWLTEARKKTVVQIPAPTTAKQVREFLGTAGFCRLWIPGFATLAAPLYPLTKPKGEFSWAPEHQKAFDAIKKALLSAPALALPDVTKPFTLYVDERKGVARGVLTQTLGPWRRPVAYLSKKLDPVASGWPVCLKAIAAVAILVKDADKLTLGQNITVIAPHALENIVRQPPDRWMTNARMTHYQSLLLTERVTFAPPAALNPATLLPEETDEPVTHDCHQLLIEETGVRKDLTDIPLTGEVLTWFTDGSSYVVEGKRMAGAAVVDGTRTIWASSLPEGTSAQKAELMALTQALRLAEGKSINIYTDSRYAFATAHVHGAIYKQRGWLTSAGREIKNKEEILSLLEALHLPKRLAIIHCPGHQKAKDPISRGNQMADRVAKQAAQGVNLLAGKRTADGSEFEKRTADGSEFESPKKKAKVE

SEQ ID NO: 181 - protein, 2088 aa, synthetic construct
MPAAKRVKLDGGDKKYSIGLDIGTNSVGWAVITDEYKVPSKKFKVLGNTDRHSIKKNLIGALLFDSGETAEATRLKRTARRRYTRRKNRICYLQEIFSNEMAKVDDSFFHRLEESFLVEEDKKHERHPIFGNIVDEVAYHEKYPTIYHLRKKLVDSTDKADLRLIYLALAHMIKFRGHFLIEGDLNPDNSDVDKLFIQLVQTYNQLFEENPINASGVDAKAILSARLSKSRRLENLIAQLPGEKKNGLFGNLIALSLGLTPNFKSNFDLAEDAKLQLSKDTYDDDLDNLLAQIGDQYADLFLAAKNLSDAILLSDILRVNTEITKAPLSASMIKRYDEHHQDLTLLKALVRQQLPEKYKEIFFDQSKNGYAGYIDGGASQEEFYKFIKPILEKMDGTEELLVKLNREDLLRKQRTFDNGSIPHQIHLGELHAILRRQEDFYPFLKDNREKIEKILTFRIPYYVGPLARGNSRFAWMTRKSEETITPWNFEEVVDKGASAQSFIERMTNFDKNLPNEKVLPKHSLLYEYFTVYNELTKVKYVTEGMRKPAFLSGEQKKAIVDLLFKTNRKVTVKQLKEDYFKKIECFDSVEISGVEDRFNASLGTYHDLLKIIKDKDFLDNEENEDILEDIVLTLTLFEDREMIEERLKTYAHLFDDKVMKQLKRRRYTGWGRLSRKLINGIRDKQSGKTILDFLKSDGFANRNFMQLIHDDSLTFKEDIQKAQVSGQGDSLHEHIANLAGSPAIKKGILQTVKVVDELVKVMGRHKPENIVIEMARENQTTQKGQKNSRERMKRIEEGIKELGSQILKEHPVENTQLQNEKLYLYYLQNGRDMYVDQELDINRLSDYDVDHIVPQSFLKDDSIDNKVLTRSDKARGKSDNVPSEEVVKKMKNYWRQLLNAKLITQRKFDNLTKAERGGLSELDKAGFIKRQLVETRQITKHVAQILDSRMNTKYDENDKLIREVKVITLKSKLVSDFRKDFQFYKVREINNYHHAHDAYLNAVVGTALIKKYPKLESEFVYGDYKVYDVRKMIAKSEQEIGKATAKYFFYSNIMNFFKTEITLANGEIRKRPLIETNGETGEIVWDKGRDFATVRKVLSMPQVNIVKKTEVQTGGFSKESILPKRNSDKLIARKKDWDPKKYGGFDSPTVAYSVLVVAKVEKGKSKKLKSVKELLGITIMERSSFEKNPIDFLEAKGYKEVKKDLIIKLPKYSLFELENGRKRMLASAGELQKGNELALPSKYVNFLYLASHYEKLKGSPEDNEQKQLFVEQHKHYLDEIIEQISEFSKRVILADANLDKVLSAYNKHRDKPIREQAENIIHLFTLTNLGAPAAFKYFDTTIDRKRYTSTKEVLDATLIHQSITGLYETRIDLSQLGGDGGGSSGSSGSSGGTLQLDDEYRLYSPLVKPDQNIQFWLEQFPQAWAETAGMGLAKQVPPQVIQLKASATPVSVRQYPLSKEAQEGIRPHVQRLIQQGILVPVQSPWNTPLLPVRKPGTNDYRPVQDLREVNKRVQDIHPTVPNPYNLLCALPPQRSWYTVLDLKDAFFCLRLHPTSQPLFAFEWRDPGTGRTGQLTWTRLPQGFKNSPTIFNEALHRDLANFRIQHPQVTLLQYVDDLLLAGATKQDCLEGTKALLLELSDLGYRASAKKAQICRREVTYLGYSLRDGQRWLTEARKKTVVQIPAPTTAKQVREFLGTAGFCRLWIPGFATLAAPLYPLTKPKGEFSWAPEHQKAFDAIKKALLSAPALALPDVTKPFTLYVDERKGVARGVLTQTLGPWRRPVAYLSKKLDPVASGWPVCLKAIAAVAILVKDADKLTLGQNITVIAPHALENIVRQPPDRWMTNARMTHYQSLLLTERVTFAPPAALNPATLLPEETDEPVTHDCHQLLIEETGVRKDLTDIPLTGEVLTWFTDGSSYVVEGKRMAGAAVVDGTRTIWASSLPEGTSAQKAELMALTQALRLAEGKSINIYTDSRYAFATAHVHGAIYKQRGWLTSAGREIKNKEEILSLLEALHLPKRLAIIHCPGHQKAKDPISRGNQMADRVAKQAAQGVNLLAGKRTADGSEFEKRTADGSEFESPKKKAKVE

SEQ ID NO: 182 - protein, 2088 aa, synthetic construct
MPAAKRVKLDGGDKKYSIGLDIGTNSVGWAVITDEYKVPSKKFKVLGNTDRHSIKKNLIGALLFDSGETAEATRLKRTARRRYTRRKNRICYLQEIFSNEMAKVDDSFFHRLEESFLVEEDKKHERHPIFGNIVDEVAYHEKYPTIYHLRKKLVDSTDKADLRLIYLALAHMIKFRGHFLIEGDLNPDNSDVDKLFIQLVQTYNQLFEENPINASGVDAKAILSARLSKSRRLENLIAQLPGEKKNGLFGNLIALSLGLTPNFKSNFDLAEDAKLQLSKDTYDDDLDNLLAQIGDQYADLFLAAKNLSDAILLSDILRVNTEITKAPLSASMIKRYDEHHQDLTLLKALVRQQLPEKYKEIFFDQSKNGYAGYIDGGASQEEFYKFIKPILEKMDGTEELLVKLNREDLLRKQRTFDNGSIPHQIHLGELHAILRRQEDFYPFLKDNREKIEKILTFRIPYYVGPLARGNSRFAWMTRKSEETITPWNFEEVVDKGASAQSFIERMTNFDKNLPNEKVLPKHSLLYEYFTVYNELTKVKYVTEGMRKPAFLSGEQKKAIVDLLFKTNRKVTVKQLKEDYFKKIECFDSVEISGVEDRFNASLGTYHDLLKIIKDKDFLDNEENEDILEDIVLTLTLFEDREMIEERLKTYAHLFDDKVMKQLKRRRYTGWGRLSRKLINGIRDKQSGKTILDFLKSDGFANRNFMQLIHDDSLTFKEDIQKAQVSGQGDSLHEHIANLAGSPAIKKGILQTVKVVDELVKVMGRHKPENIVIEMARENQTTQKGQKNSRERMKRIEEGIKELGSQILKEHPVENTQLQNEKLYLYYLQNGRDMYVDQELDINRLSDYDVDHIVPQSFLKDDSIDNKVLTRSDKARGKSDNVPSEEVVKKMKNYWRQLLNAKLITQRKFDNLTKAERGGLSELDKAGFIKRQLVETRQITKHVAQILDSRMNTKYDENDKLIREVKVITLKSKLVSDFRKDFQFYKVREINNYHHAHDAYLNAVVGTALIKKYPKLESEFVYGDYKVYDVRKMIAKSEQEIGKATAKYFFYSNIMNFFKTEITLANGEIRKRPLIETNGETGEIVWDKGRDFATVRKVLSMPQVNIVKKTEVQTGGFSKESILPKRNSDKLIARKKDWDPKKYGGFDSPTVAYSVLVVAKVEKGKSKKLKSVKELLGITIMERSSFEKNPIDFLEAKGYKEVKKDLIIKLPKYSLFELENGRKRMLASAGELQKGNELALPSKYVNFLYLASHYEKLKGSPEDNEQKQLFVEQHKHYLDEIIEQISEFSKRVILADANLDKVLSAYNKHRDKPIREQAENIIHLFTLTNLGAPAAFKYFDTTIDRKRYTSTKEVLDATLIHQSITGLYETRIDLSQLGGDGGGSSGGSGGGGGTLQLDDEYRLYSPLVKPDQNIQFWLEQFPQAWAETAGMGLAKQVPPQVIQLKASATPVSVRQYPLSKEAQEGIRPHVQRLIQQGILVPVQSPWNTPLLPVRKPGTNDYRPVQDLREVNKRVQDIHPTVPNPYNLLCALPPQRSWYTVLDLKDAFFCLRLHPTSQPLFAFEWRDPGTGRTGQLTWTRLPQGFKNSPTIFNEALHRDLANFRIQHPQVTLLQYVDDLLLAGATKQDCLEGTKALLLELSDLGYRASAKKAQICRREVTYLGYSLRDGQRWLTEARKKTVVQIPAPTTAKQVREFLGTAGFCRLWIPGFATLAAPLYPLTKPKGEFSWAPEHQKAFDAIKKALLSAPALALPDVTKPFTLYVDERKGVARGVLTQTLGPWRRPVAYLSKKLDPVASGWPVCLKAIAAVAILVKDADKLTLGQNITVIAPHALENIVRQPPDRWMTNARMTHYQSLLLTERVTFAPPAALNPATLLPEETDEPVTHDCHQLLIEETGVRKDLTDIPLTGEVLTWFTDGSSYVVEGKRMAGAAVVDGTRTIWASSLPEGTSAQKAELMALTQALRLAEGKSINIYTDSRYAFATAHVHGAIYKQRGWLTSAGREIKNKEEILSLLEALHLPKRLAIIHCPGHQKAKDPISRGNQMADRVAKQAAQGVNLLAGKRTADGSEFEKRTADGSEFESPKKKAKVE

SEQ ID NO: 183 - protein, 2085 aa, synthetic construct
MPAAKRVKLDGGDKKYSIGLDIGTNSVGWAVITDEYKVPSKKFKVLGNTDRHSIKKNLIGALLFDSGETAEATRLKRTARRRYTRRKNRICYLQEIFSNEMAKVDDSFFHRLEESFLVEEDKKHERHPIFGNIVDEVAYHEKYPTIYHLRKKLVDSTDKADLRLIYLALAHMIKFRGHFLIEGDLNPDNSDVDKLFIQLVQTYNQLFEENPINASGVDAKAILSARLSKSRRLENLIAQLPGEKKNGLFGNLIALSLGLTPNFKSNFDLAEDAKLQLSKDTYDDDLDNLLAQIGDQYADLFLAAKNLSDAILLSDILRVNTEITKAPLSASMIKRYDEHHQDLTLLKALVRQQLPEKYKEIFFDQSKNGYAGYIDGGASQEEFYKFIKPILEKMDGTEELLVKLNREDLLRKQRTFDNGSIPHQIHLGELHAILRRQEDFYPFLKDNREKIEKILTFRIPYYVGPLARGNSRFAWMTRKSEETITPWNFEEVVDKGASAQSFIERMTNFDKNLPNEKVLPKHSLLYEYFTVYNELTKVKYVTEGMRKPAFLSGEQKKAIVDLLFKTNRKVTVKQLKEDYFKKIECFDSVEISGVEDRFNASLGTYHDLLKIIKDKDFLDNEENEDILEDIVLTLTLFEDREMIEERLKTYAHLFDDKVMKQLKRRRYTGWGRLSRKLINGIRDKQSGKTILDFLKSDGFANRNFMQLIHDDSLTFKEDIQKAQVSGQGDSLHEHIANLAGSPAIKKGILQTVKVVDELVKVMGRHKPENIVIEMARENQTTQKGQKNSRERMKRIEEGIKELGSQILKEHPVENTQLQNEKLYLYYLQNGRDMYVDQELDINRLSDYDVDHIVPQSFLKDDSIDNKVLTRSDKARGKSDNVPSEEVVKKMKNYWRQLLNAKLITQRKFDNLTKAERGGLSELDKAGFIKRQLVETRQITKHVAQILDSRMNTKYDENDKLIREVKVITLKSKLVSDFRKDFQFYKVREINNYHHAHDAYLNAVVGTALIKKYPKLESEFVYGDYKVYDVRKMIAKSEQEIGKATAKYFFYSNIMNFFKTEITLANGEIRKRPLIETNGETGEIVWDKGRDFATVRKVLSMPQVNIVKKTEVQTGGFSKESILPKRNSDKLIARKKDWDPKKYGGFDSPTVAYSVLVVAKVEKGKSKKLKSVKELLGITIMERSSFEKNPIDFLEAKGYKEVKKDLIIKLPKYSLFELENGRKRMLASAGELQKGNELALPSKYVNFLYLASHYEKLKGSPEDNEQKQLFVEQHKHYLDEIIEQISEFSKRVILADANLDKVLSAYNKHRDKPIREQAENIIHLFTLTNLGAPAAFKYFDTTIDRKRYTSTKEVLDATLIHQSITGLYETRIDLSQLGGDGGGGGGGGGGTLQLDDEYRLYSPLVKPDQNIQFWLEQFPQAWAETAGMGLAKQVPPQVIQLKASATPVSVRQYPLSKEAQEGIRPHVQRLIQQGILVPVQSPWNTPLLPVRKPGTNDYRPVQDLREVNKRVQDIHPTVPNPYNLLCALPPQRSWYTVLDLKDAFFCLRLHPTSQPLFAFEWRDPGTGRTGQLTWTRLPQGFKNSPTIFNEALHRDLANFRIQHPQVTLLQYVDDLLLAGATKQDCLEGTKALLLELSDLGYRASAKKAQICRREVTYLGYSLRDGQRWLTEARKKTVVQIPAPTTAKQVREFLGTAGFCRLWIPGFATLAAPLYPLTKPKGEFSWAPEHQKAFDAIKKALLSAPALALPDVTKPFTLYVDERKGVARGVLTQTLGPWRRPVAYLSKKLDPVASGWPVCLKAIAAVAILVKDADKLTLGQNITVIAPHALENIVRQPPDRWMTNARMTHYQSLLLTERVTFAPPAALNPATLLPEETDEPVTHDCHQLLIEETGVRKDLTDIPLTGEVLTWFTDGSSYVVEGKRMAGAAVVDGTRTIWASSLPEGTSAQKAELMALTQALRLAEGKSINIYTDSRYAFATAHVHGAIYKQRGWLTSAGREIKNKEEILSLLEALHLPKRLAIIHCPGHQKAKDPISRGNQMADRVAKQAAQGVNLLAGKRTADGSEFEKRTADGSEFESPKKKAKVE

SEQ ID NO: 184 - protein, 2085 aa, synthetic construct
MPAAKRVKLDGGDKKYSIGLDIGTNSVGWAVITDEYKVPSKKFKVLGNTDRHSIKKNLIGALLFDSGETAEATRLKRTARRRYTRRKNRICYLQEIFSNEMAKVDDSFFHRLEESFLVEEDKKHERHPIFGNIVDEVAYHEKYPTIYHLRKKLVDSTDKADLRLIYLALAHMIKFRGHFLIEGDLNPDNSDVDKLFIQLVQTYNQLFEENPINASGVDAKAILSARLSKSRRLENLIAQLPGEKKNGLFGNLIALSLGLTPNFKSNFDLAEDAKLQLSKDTYDDDLDNLLAQIGDQYADLFLAAKNLSDAILLSDILRVNTEITKAPLSASMIKRYDEHHQDLTLLKALVRQQLPEKYKEIFFDQSKNGYAGYIDGGASQEEFYKFIKPILEKMDGTEELLVKLNREDLLRKQRTFDNGSIPHQIHLGELHAILRRQEDFYPFLKDNREKIEKILTFRIPYYVGPLARGNSRFAWMTRKSEETITPWNFEEVVDKGASAQSFIERMTNFDKNLPNEKVLPKHSLLYEYFTVYNELTKVKYVTEGMRKPAFLSGEQKKAIVDLLFKTNRKVTVKQLKEDYFKKIECFDSVEISGVEDRFNASLGTYHDLLKIIKDKDFLDNEENEDILEDIVLTLTLFEDREMIEERLKTYAHLFDDKVMKQLKRRRYTGWGRLSRKLINGIRDKQSGKTILDFLKSDGFANRNFMQLIHDDSLTFKEDIQKAQVSGQGDSLHEHIANLAGSPAIKKGILQTVKVVDELVKVMGRHKPENIVIEMARENQTTQKGQKNSRERMKRIEEGIKELGSQILKEHPVENTQLQNEKLYLYYLQNGRDMYVDQELDINRLSDYDVDHIVPQSFLKDDSIDNKVLTRSDKARGKSDNVPSEEVVKKMKNYWRQLLNAKLITQRKFDNLTKAERGGLSELDKAGFIKRQLVETRQITKHVAQILDSRMNTKYDENDKLIREVKVITLKSKLVSDFRKDFQFYKVREINNYHHAHDAYLNAVVGTALIKKYPKLESEFVYGDYKVYDVRKMIAKSEQEIGKATAKYFFYSNIMNFFKTEITLANGEIRKRPLIETNGETGEIVWDKGRDFATVRKVLSMPQVNIVKKTEVQTGGFSKESILPKRNSDKLIARKKDWDPKKYGGFDSPTVAYSVLVVAKVEKGKSKKLKSVKELLGITIMERSSFEKNPIDFLEAKGYKEVKKDLIIKLPKYSLFELENGRKRMLASAGELQKGNELALPSKYVNFLYLASHYEKLKGSPEDNEQKQLFVEQHKHYLDEIIEQISEFSKRVILADANLDKVLSAYNKHRDKPIREQAENIIHLFTLTNLGAPAAFKYFDTTIDRKRYTSTKEVLDATLIHQSITGLYETRIDLSQLGGDGGGGSGGGGGTLQLDDEYRLYSPLVKPDQNIQFWLEQFPQAWAETAGMGLAKQVPPQVIQLKASATPVSVRQYPLSKEAQEGIRPHVQRLIQQGILVPVQSPWNTPLLPVRKPGTNDYRPVQDLREVNKRVQDIHPTVPNPYNLLCALPPQRSWYTVLDLKDAFFCLRLHPTSQPLFAFEWRDPGTGRTGQLTWTRLPQGFKNSPTIFNEALHRDLANFRIQHPQVTLLQYVDDLLLAGATKQDCLEGTKALLLELSDLGYRASAKKAQICRREVTYLGYSLRDGQRWLTEARKKTVVQIPAPTTAKQVREFLGTAGFCRLWIPGFATLAAPLYPLTKPKGEFSWAPEHQKAFDAIKKALLSAPALALPDVTKPFTLYVDERKGVARGVLTQTLGPWRRPVAYLSKKLDPVASGWPVCLKAIAAVAILVKDADKLTLGQNITVIAPHALENIVRQPPDRWMTNARMTHYQSLLLTERVTFAPPAALNPATLLPEETDEPVTHDCHQLLIEETGVRKDLTDIPLTGEVLTWFTDGSSYVVEGKRMAGAAVVDGTRTIWASSLPEGTSAQKAELMALTQALRLAEGKSINIYTDSRYAFATAHVHGAIYKQRGWLTSAGREIKNKEEILSLLEALHLPKRLAIIHCPGHQKAKDPISRGNQMADRVAKQAAQGVNLLAGKRTADGSEFEKRTADGSEFESPKKKAKVE

SEQ ID NO: 185 - protein, 2087 aa, synthetic construct
MPAAKRVKLDGGDKKYSIGLDIGTNSVGWAVITDEYKVPSKKFKVLGNTDRHSIKKNLIGALLFDSGETAEATRLKRTARRRYTRRKNRICYLQEIFSNEMAKVDDSFFHRLEESFLVEEDKKHERHPIFGNIVDEVAYHEKYPTIYHLRKKLVDSTDKADLRLIYLALAHMIKFRGHFLIEGDLNPDNSDVDKLFIQLVQTYNQLFEENPINASGVDAKAILSARLSKSRRLENLIAQLPGEKKNGLFGNLIALSLGLTPNFKSNFDLAEDAKLQLSKDTYDDDLDNLLAQIGDQYADLFLAAKNLSDAILLSDILRVNTEITKAPLSASMIKRYDEHHQDLTLLKALVRQQLPEKYKEIFFDQSKNGYAGYIDGGASQEEFYKFIKPILEKMDGTEELLVKLNREDLLRKQRTFDNGSIPHQIHLGELHAILRRQEDFYPFLKDNREKIEKILTFRIPYYVGPLARGNSRFAWMTRKSEETITPWNFEEVVDKGASAQSFIERMTNFDKNLPNEKVLPKHSLLYEYFTVYNELTKVKYVTEGMRKPAFLSGEQKKAIVDLLFKTNRKVTVKQLKEDYFKKIECFDSVEISGVEDRFNASLGTYHDLLKIIKDKDFLDNEENEDILEDIVLTLTLFEDREMIEERLKTYAHLFDDKVMKQLKRRRYTGWGRLSRKLINGIRDKQSGKTILDFLKSDGFANRNFMQLIHDDSLTFKEDIQKAQVSGQGDSLHEHIANLAGSPAIKKGILQTVKVVDELVKVMGRHKPENIVIEMARENQTTQKGQKNSRERMKRIEEGIKELGSQILKEHPVENTQLQNEKLYLYYLQNGRDMYVDQELDINRLSDYDVDHIVPQSFLKDDSIDNKVLTRSDKARGKSDNVPSEEVVKKMKNYWRQLLNAKLITQRKFDNLTKAERGGLSELDKAGFIKRQLVETRQITKHVAQILDSRMNTKYDENDKLIREVKVITLKSKLVSDFRKDFQFYKVREINNYHHAHDAYLNAVVGTALIKKYPKLESEFVYGDYKVYDVRKMIAKSEQEIGKATAKYFFYSNIMNFFKTEITLANGEIRKRPLIETNGETGEIVWDKGRDFATVRKVLSMPQVNIVKKTEVQTGGFSKESILPKRNSDKLIARKKDWDPKKYGGFDSPTVAYSVLVVAKVEKGKSKKLKSVKELLGITIMERSSFEKNPIDFLEAKGYKEVKKDLIIKLPKYSLFELENGRKRMLASAGELQKGNELALPSKYVNFLYLASHYEKLKGSPEDNEQKQLFVEQHKHYLDEIIEQISEFSKRVILADANLDKVLSAYNKHRDKPIREQAENIIHLFTLTNLGAPAAFKYFDTTIDRKRYTSTKEVLDATLIHQSITGLYETRIDLSQLGGDGGGGGEAAAKGGTLQLDDEYRLYSPLVKPDQNIQFWLEQFPQAWAETAGMGLAKQVPPQVIQLKASATPVSVRQYPLSKEAQEGIRPHVQRLIQQGILVPVQSPWNTPLLPVRKPGTNDYRPVQDLREVNKRVQDIHPTVPNPYNLLCALPPQRSWYTVLDLKDAFFCLRLHPTSQPLFAFEWRDPGTGRTGQLTWTRLPQGFKNSPTIFNEALHRDLANFRIQHPQVTLLQYVDDLLLAGATKQDCLEGTKALLLELSDLGYRASAKKAQICRREVTYLGYSLRDGQRWLTEARKKTVVQIPAPTTAKQVREFLGTAGFCRLWIPGFATLAAPLYPLTKPKGEFSWAPEHQKAFDAIKKALLSAPALALPDVTKPFTLYVDERKGVARGVLTQTLGPWRRPVAYLSKKLDPVASGWPVCLKAIAAVAILVKDADKLTLGQNITVIAPHALENIVRQPPDRWMTNARMTHYQSLLLTERVTFAPPAALNPATLLPEETDEPVTHDCHQLLIEETGVRKDLTDIPLTGEVLTWFTDGSSYVVEGKRMAGAAVVDGTRTIWASSLPEGTSAQKAELMALTQALRLAEGKSINIYTDSRYAFATAHVHGAIYKQRGWLTSAGREIKNKEEILSLLEALHLPKRLAIIHCPGHQKAKDPISRGNQMADRVAKQAAQGVNLLAGKRTADGSEFEKRTADGSEFESPKKKAKVE

SEQ ID NO: 186 - protein, 2085 aa, synthetic construct
MPAAKRVKLDGGDKKYSIGLDIGTNSVGWAVITDEYKVPSKKFKVLGNTDRHSIKKNLIGALLFDSGETAEATRLKRTARRRYTRRKNRICYLQEIFSNEMAKVDDSFFHRLEESFLVEEDKKHERHPIFGNIVDEVAYHEKYPTIYHLRKKLVDSTDKADLRLIYLALAHMIKFRGHFLIEGDLNPDNSDVDKLFIQLVQTYNQLFEENPINASGVDAKAILSARLSKSRRLENLIAQLPGEKKNGLFGNLIALSLGLTPNFKSNFDLAEDAKLQLSKDTYDDDLDNLLAQIGDQYADLFLAAKNLSDAILLSDILRVNTEITKAPLSASMIKRYDEHHQDLTLLKALVRQQLPEKYKEIFFDQSKNGYAGYIDGGASQEEFYKFIKPILEKMDGTEELLVKLNREDLLRKQRTFDNGSIPHQIHLGELHAILRRQEDFYPFLKDNREKIEKILTFRIPYYVGPLARGNSRFAWMTRKSEETITPWNFEEVVDKGASAQSFIERMTNFDKNLPNEKVLPKHSLLYEYFTVYNELTKVKYVTEGMRKPAFLSGEQKKAIVDLLFKTNRKVTVKQLKEDYFKKIECFDSVEISGVEDRFNASLGTYHDLLKIIKDKDFLDNEENEDILEDIVLTLTLFEDREMIEERLKTYAHLFDDKVMKQLKRRRYTGWGRLSRKLINGIRDKQSGKTILDFLKSDGFANRNFMQLIHDDSLTFKEDIQKAQVSGQGDSLHEHIANLAGSPAIKKGILQTVKVVDELVKVMGRHKPENIVIEMARENQTTQKGQKNSRERMKRIEEGIKELGSQILKEHPVENTQLQNEKLYLYYLQNGRDMYVDQELDINRLSDYDVDHIVPQSFLKDDSIDNKVLTRSDKARGKSDNVPSEEVVKKMKNYWRQLLNAKLITQRKFDNLTKAERGGLSELDKAGFIKRQLVETRQITKHVAQILDSRMNTKYDENDKLIREVKVITLKSKLVSDFRKDFQFYKVREINNYHHAHDAYLNAVVGTALIKKYPKLESEFVYGDYKVYDVRKMIAKSEQEIGKATAKYFFYSNIMNFFKTEITLANGEIRKRPLIETNGETGEIVWDKGRDFATVRKVLSMPQVNIVKKTEVQTGGFSKESILPKRNSDKLIARKKDWDPKKYGGFDSPTVAYSVLVVAKVEKGKSKKLKSVKELLGITIMERSSFEKNPIDFLEAKGYKEVKKDLIIKLPKYSLFELENGRKRMLASAGELQKGNELALPSKYVNFLYLASHYEKLKGSPEDNEQKQLFVEQHKHYLDEIIEQISEFSKRVILADANLDKVLSAYNKHRDKPIREQAENIIHLFTLTNLGAPAAFKYFDTTIDRKRYTSTKEVLDATLIHQSITGLYETRIDLSQLGGDGGGGSGGSGGTLQLDDEYRLYSPLVKPDQNIQFWLEQFPQAWAETAGMGLAKQVPPQVIQLKASATPVSVRQYPLSKEAQEGIRPHVQRLIQQGILVPVQSPWNTPLLPVRKPGTNDYRPVQDLREVNKRVQDIHPTVPNPYNLLCALPPQRSWYTVLDLKDAFFCLRLHPTSQPLFAFEWRDPGTGRTGQLTWTRLPQGFKNSPTIFNEALHRDLANFRIQHPQVTLLQYVDDLLLAGATKQDCLEGTKALLLELSDLGYRASAKKAQICRREVTYLGYSLRDGQRWLTEARKKTVVQIPAPTTAKQVREFLGTAGFCRLWIPGFATLAAPLYPLTKPKGEFSWAPEHQKAFDAIKKALLSAPALALPDVTKPFTLYVDERKGVARGVLTQTLGPWRRPVAYLSKKLDPVASGWPVCLKAIAAVAILVKDADKLTLGQNITVIAPHALENIVRQPPDRWMTNARMTHYQSLLLTERVTFAPPAALNPATLLPEETDEPVTHDCHQLLIEETGVRKDLTDIPLTGEVLTWFTDGSSYVVEGKRMAGAAVVDGTRTIWASSLPEGTSAQKAELMALTQALRLAEGKSINIYTDSRYAFATAHVHGAIYKQRGWLTSAGREIKNKEEILSLLEALHLPKRLAIIHCPGHQKAKDPISRGNQMADRVAKQAAQGVNLLAGKRTADGSEFEKRTADGSEFESPKKKAKVE

SEQ ID NO: 187 - protein, 1999 aa, synthetic construct
MPAAKRVKLDGGDKKYSIGLDIGTNSVGWAVITDEYKVPSKKFKVLGNTDRHSIKKNLIGALLFDSGETAEATRLKRTARRRYTRRKNRICYLQEIFSNEMAKVDDSFFHRLEESFLVEEDKKHERHPIFGNIVDEVAYHEKYPTIYHLRKKLVDSTDKADLRLIYLALAHMIKFRGHFLIEGDLNPDNSDVDKLFIQLVQTYNQLFEENPINASGVDAKAILSARLSKSRRLENLIAQLPGEKKNGLFGNLIALSLGLTPNFKSNFDLAEDAKLQLSKDTYDDDLDNLLAQIGDQYADLFLAAKNLSDAILLSDILRVNTEITKAPLSASMIKRYDEHHQDLTLLKALVRQQLPEKYKEIFFDQSKNGYAGYIDGGASQEEFYKFIKPILEKMDGTEELLVKLNREDLLRKQRTFDNGSIPHQIHLGELHAILRRQEDFYPFLKDNREKIEKILTFRIPYYVGPLARGNSRFAWMTRKSEETITPWNFEEVVDKGASAQSFIERMTNFDKNLPNEKVLPKHSLLYEYFTVYNELTKVKYVTEGMRKPAFLSGEQKKAIVDLLFKTNRKVTVKQLKEDYFKKIECFDSVEISGVEDRFNASLGTYHDLLKIIKDKDFLDNEENEDILEDIVLTLTLFEDREMIEERLKTYAHLFDDKVMKQLKRRRYTGWGRLSRKLINGIRDKQSGKTILDFLKSDGFANRNFMQLIHDDSLTFKEDIQKAQVSGQGDSLHEHIANLAGSPAIKKGILQTVKVVDELVKVMGRHKPENIVIEMARENQTTQKGQKNSRERMKRIEEGIKELGSQILKEHPVENTQLQNEKLYLYYLQNGRDMYVDQELDINRLSDYDVDHIVPQSFLKDDSIDNKVLTRSDKARGKSDNVPSEEVVKKMKNYWRQLLNAKLITQRKFDNLTKAERGGLSELDKAGFIKRQLVETRQITKHVAQILDSRMNTKYDENDKLIREVKVITLKSKLVSDFRKDFQFYKVREINNYHHAHDAYLNAVVGTALIKKYPKLESEFVYGDYKVYDVRKMIAKSEQEIGKATAKYFFYSNIMNFFKTEITLANGEIRKRPLIETNGETGEIVWDKGRDFATVRKVLSMPQVNIVKKTEVQTGGFSKESILPKRNSDKLIARKKDWDPKKYGGFDSPTVAYSVLVVAKVEKGKSKKLKSVKELLGITIMERSSFEKNPIDFLEAKGYKEVKKDLIIKLPKYSLFELENGRKRMLASAGELQKGNELALPSKYVNFLYLASHYEKLKGSPEDNEQKQLFVEQHKHYLDEIIEQISEFSKRVILADANLDKVLSAYNKHRDKPIREQAENIIHLFTLTNLGAPAAFKYFDTTIDRKRYTSTKEVLDATLIHQSITGLYETRIDLSQLGGDGGGGSGGGGSSGGGVLDTPPSHIGLEHLPPPPEVPQFPLNLERLQALQDLVHRSLEAGYISPWDGPGNNPVFPVRKPNGAWRFVHDLRATNALTKPIPALSPGPPDLTAIPTHPPHIICLDLKDAFFQIPVEDRFRFYLSFTLPSPGGLQPHRRFAWRVLPQGFINSPALFNRALQEPLRQVSAAFSQSLLVSYMDDILYASPTEEQRSQCYQALAARLRDLGFQVASEKTSQTPSPVPFLGQMVHEQIVTYQSLPTLQISSPISLHQLQAVLGDLQWVSRGTPTTRRPLQLLYSSLKRHHDPRAIIQLSPEQLQGIAELRQALSHNARSRYNEQEPLLAYVHLTRAGSTLVLFQKGAQFPLAYFQTPLTDNQASPWGLLLLLGCQYLQTQALSSYAKPILKYYHNLPKTSLDNWIQSSEDPRVQELLQLWPQISSQGIQPPGPWKTLITRAEVFLTPQFSPDPIPAALCLFSDGATGRGAYCLWKDHLLDFQAVPAPESAQKGELAGLLAGLAAAPPEPVNIWVDSKYLYSLLRTWVLGAWLQPDPVPSYALLYKSLLRHPAIVVGHVRSHSSASHPIASLNNYVDQLAGKRTADGSEFEKRTADGSEFESPKKKAKVE

SEQ ID NO: 188 - protein, 2015 aa, synthetic construct
MPAAKRVKLDGGDKKYSIGLDIGTNSVGWAVITDEYKVPSKKFKVLGNTDRHSIKKNLIGALLFDSGETAEATRLKRTARRRYTRRKNRICYLQEIFSNEMAKVDDSFFHRLEESFLVEEDKKHERHPIFGNIVDEVAYHEKYPTIYHLRKKLVDSTDKADLRLIYLALAHMIKFRGHFLIEGDLNPDNSDVDKLFIQLVQTYNQLFEENPINASGVDAKAILSARLSKSRRLENLIAQLPGEKKNGLFGNLIALSLGLTPNFKSNFDLAEDAKLQLSKDTYDDDLDNLLAQIGDQYADLFLAAKNLSDAILLSDILRVNTEITKAPLSASMIKRYDEHHQDLTLLKALVRQQLPEKYKEIFFDQSKNGYAGYIDGGASQEEFYKFIKPILEKMDGTEELLVKLNREDLLRKQRTFDNGSIPHQIHLGELHAILRRQEDFYPFLKDNREKIEKILTFRIPYYVGPLARGNSRFAWMTRKSEETITPWNFEEVVDKGASAQSFIERMTNFDKNLPNEKVLPKHSLLYEYFTVYNELTKVKYVTEGMRKPAFLSGEQKKAIVDLLFKTNRKVTVKQLKEDYFKKIECFDSVEISGVEDRFNASLGTYHDLLKIIKDKDFLDNEENEDILEDIVLTLTLFEDREMIEERLKTYAHLFDDKVMKQLKRRRYTGWGRLSRKLINGIRDKQSGKTILDFLKSDGFANRNFMQLIHDDSLTFKEDIQKAQVSGQGDSLHEHIANLAGSPAIKKGILQTVKVVDELVKVMGRHKPENIVIEMARENQTTQKGQKNSRERMKRIEEGIKELGSQILKEHPVENTQLQNEKLYLYYLQNGRDMYVDQELDINRLSDYDVDHIVPQSFLKDDSIDNKVLTRSDKARGKSDNVPSEEVVKKMKNYWRQLLNAKLITQRKFDNLTKAERGGLSELDKAGFIKRQLVETRQITKHVAQILDSRMNTKYDENDKLIREVKVITLKSKLVSDFRKDFQFYKVREINNYHHAHDAYLNAVVGTALIKKYPKLESEFVYGDYKVYDVRKMIAKSEQEIGKATAKYFFYSNIMNFFKTEITLANGEIRKRPLIETNGETGEIVWDKGRDFATVRKVLSMPQVNIVKKTEVQTGGFSKESILPKRNSDKLIARKKDWDPKKYGGFDSPTVAYSVLVVAKVEKGKSKKLKSVKELLGITIMERSSFEKNPIDFLEAKGYKEVKKDLIIKLPKYSLFELENGRKRMLASAGELQKGNELALPSKYVNFLYLASHYEKLKGSPEDNEQKQLFVEQHKHYLDEIIEQISEFSKRVILADANLDKVLSAYNKHRDKPIREQAENIIHLFTLTNLGAPAAFKYFDTTIDRKRYTSTKEVLDATLIHQSITGLYETRIDLSQLGGDGGGGGGSGGGGSGGGGSGGGGSGGGGSGGGVLDTPPSHIGLEHLPPPPEVPQFPLNLERLQALQDLVHRSLEAGYISPWDGPGNNPVFPVRKPNGAWRFVHDLRATNALTKPIPALSPGPPDLTAIPTHPPHIICLDLKDAFFQIPVEDRFRFYLSFTLPSPGGLQPHRRFAWRVLPQGFINSPALFNRALQEPLRQVSAAFSQSLLVSYMDDILYASPTEEQRSQCYQALAARLRDLGFQVASEKTSQTPSPVPFLGQMVHEQIVTYQSLPTLQISSPISLHQLQAVLGDLQWVSRGTPTTRRPLQLLYSSLKRHHDPRAIIQLSPEQLQGIAELRQALSHNARSRYNEQEPLLAYVHLTRAGSTLVLFQKGAQFPLAYFQTPLTDNQASPWGLLLLLGCQYLQTQALSSYAKPILKYYHNLPKTSLDNWIQSSEDPRVQELLQLWPQISSQGIQPPGPWKTLITRAEVFLTPQFSPDPIPAALCLFSDGATGRGAYCLWKDHLLDFQAVPAPESAQKGELAGLLAGLAAAPPEPVNIWVDSKYLYSLLRTWVLGAWLQPDPVPSYALLYKSLLRHPAIVVGHVRSHSSASHPIASLNNYVDQLAGKRTADGSEFEKRTADGSEFESPKKKAKVE

SEQ ID NO: 189 - protein, 1996 aa, synthetic construct
MPAAKRVKLDGGDKKYSIGLDIGTNSVGWAVITDEYKVPSKKFKVLGNTDRHSIKKNLIGALLFDSGETAEATRLKRTARRRYTRRKNRICYLQEIFSNEMAKVDDSFFHRLEESFLVEEDKKHERHPIFGNIVDEVAYHEKYPTIYHLRKKLVDSTDKADLRLIYLALAHMIKFRGHFLIEGDLNPDNSDVDKLFIQLVQTYNQLFEENPINASGVDAKAILSARLSKSRRLENLIAQLPGEKKNGLFGNLIALSLGLTPNFKSNFDLAEDAKLQLSKDTYDDDLDNLLAQIGDQYADLFLAAKNLSDAILLSDILRVNTEITKAPLSASMIKRYDEHHQDLTLLKALVRQQLPEKYKEIFFDQSKNGYAGYIDGGASQEEFYKFIKPILEKMDGTEELLVKLNREDLLRKQRTFDNGSIPHQIHLGELHAILRRQEDFYPFLKDNREKIEKILTFRIPYYVGPLARGNSRFAWMTRKSEETITPWNFEEVVDKGASAQSFIERMTNFDKNLPNEKVLPKHSLLYEYFTVYNELTKVKYVTEGMRKPAFLSGEQKKAIVDLLFKTNRKVTVKQLKEDYFKKIECFDSVEISGVEDRFNASLGTYHDLLKIIKDKDFLDNEENEDILEDIVLTLTLFEDREMIEERLKTYAHLFDDKVMKQLKRRRYTGWGRLSRKLINGIRDKQSGKTILDFLKSDGFANRNFMQLIHDDSLTFKEDIQKAQVSGQGDSLHEHIANLAGSPAIKKGILQTVKVVDELVKVMGRHKPENIVIEMARENQTTQKGQKNSRERMKRIEEGIKELGSQILKEHPVENTQLQNEKLYLYYLQNGRDMYVDQELDINRLSDYDVDHIVPQSFLKDDSIDNKVLTRSDKARGKSDNVPSEEVVKKMKNYWRQLLNAKLITQRKFDNLTKAERGGLSELDKAGFIKRQLVETRQITKHVAQILDSRMNTKYDENDKLIREVKVITLKSKLVSDFRKDFQFYKVREINNYHHAHDAYLNAVVGTALIKKYPKLESEFVYGDYKVYDVRKMIAKSEQEIGKATAKYFFYSNIMNFFKTEITLANGEIRKRPLIETNGETGEIVWDKGRDFATVRKVLSMPQVNIVKKTEVQTGGFSKESILPKRNSDKLIARKKDWDPKKYGGFDSPTVAYSVLVVAKVEKGKSKKLKSVKELLGITIMERSSFEKNPIDFLEAKGYKEVKKDLIIKLPKYSLFELENGRKRMLASAGELQKGNELALPSKYVNFLYLASHYEKLKGSPEDNEQKQLFVEQHKHYLDEIIEQISEFSKRVILADANLDKVLSAYNKHRDKPIREQAENIIHLFTLTNLGAPAAFKYFDTTIDRKRYTSTKEVLDATLIHQSITGLYETRIDLSQLGGDGGGGGGSSGGGVLDTPPSHIGLEHLPPPPEVPQFPLNLERLQALQDLVHRSLEAGYISPWDGPGNNPVFPVRKPNGAWRFVHDLRATNALTKPIPALSPGPPDLTAIPTHPPHIICLDLKDAFFQIPVEDRFRFYLSFTLPSPGGLQPHRRFAWRVLPQGFINSPALFNRALQEPLRQVSAAFSQSLLVSYMDDILYASPTEEQRSQCYQALAARLRDLGFQVASEKTSQTPSPVPFLGQMVHEQIVTYQSLPTLQISSPISLHQLQAVLGDLQWVSRGTPTTRRPLQLLYSSLKRHHDPRAIIQLSPEQLQGIAELRQALSHNARSRYNEQEPLLAYVHLTRAGSTLVLFQKGAQFPLAYFQTPLTDNQASPWGLLLLLGCQYLQTQALSSYAKPILKYYHNLPKTSLDNWIQSSEDPRVQELLQLWPQISSQGIQPPGPWKTLITRAEVFLTPQFSPDPIPAALCLFSDGATGRGAYCLWKDHLLDFQAVPAPESAQKGELAGLLAGLAAAPPEPVNIWVDSKYLYSLLRTWVLGAWLQPDPVPSYALLYKSLLRHPAIVVGHVRSHSSASHPIASLNNYVDQLAGKRTADGSEFEKRTADGSEFESPKKKAKVE

SEQ ID NO: 190 - protein, 2123 aa, synthetic construct; identical to SEQ ID NO: 36

SEQ ID NO: 191 - protein, 2095 aa, synthetic construct
MPAAKRVKLDGGDKKYSIGLDIGTNSVGWAVITDEYKVPSKKFKVLGNTDRHSIKKNLIGALLFDSGETAEATRLKRTARRRYTRRKNRICYLQEIFSNEMAKVDDSFFHRLEESFLVEEDKKHERHPIFGNIVDEVAYHEKYPTIYHLRKKLVDSTDKADLRLIYLALAHMIKFRGHFLIEGDLNPDNSDVDKLFIQLVQTYNQLFEENPINASGVDAKAILSARLSKSRRLENLIAQLPGEKKNGLFGNLIALSLGLTPNFKSNFDLAEDAKLQLSKDTYDDDLDNLLAQIGDQYADLFLAAKNLSDAILLSDILRVNTEITKAPLSASMIKRYDEHHQDLTLLKALVRQQLPEKYKEIFFDQSKNGYAGYIDGGASQEEFYKFIKPILEKMDGTEELLVKLNREDLLRKQRTFDNGSIPHQIHLGELHAILRRQEDFYPFLKDNREKIEKILTFRIPYYVGPLARGNSRFAWMTRKSEETITPWNFEEVVDKGASAQSFIERMTNFDKNLPNEKVLPKHSLLYEYFTVYNELTKVKYVTEGMRKPAFLSGEQKKAIVDLLFKTNRKVTVKQLKEDYFKKIECFDSVEISGVEDRFNASLGTYHDLLKIIKDKDFLDNEENEDILEDIVLTLTLFEDREMIEERLKTYAHLFDDKVMKQLKRRRYTGWGRLSRKLINGIRDKQSGKTILDFLKSDGFANRNFMQLIHDDSLTFKEDIQKAQVSGQGDSLHEHIANLAGSPAIKKGILQTVKVVDELVKVMGRHKPENIVIEMARENQTTQKGQKNSRERMKRIEEGIKELGSQILKEHPVENTQLQNEKLYLYYLQNGRDMYVDQELDINRLSDYDVDHIVPQSFLKDDSIDNKVLTRSDKARGKSDNVPSEEVVKKMKNYWRQLLNAKLITQRKFDNLTKAERGGLSELDKAGFIKRQLVETRQITKHVAQILDSRMNTKYDENDKLIREVKVITLKSKLVSDFRKDFQFYKVREINNYHHAHDAYLNAVVGTALIKKYPKLESEFVYGDYKVYDVRKMIAKSEQEIGKATAKYFFYSNIMNFFKTEITLANGEIRKRPLIETNGETGEIVWDKGRDFATVRKVLSMPQVNIVKKTEVQTGGFSKESILPKRNSDKLIARKKDWDPKKYGGFDSPTVAYSVLVVAKVEKGKSKKLKSVKELLGITIMERSSFEKNPIDFLEAKGYKEVKKDLIIKLPKYSLFELENGRKRMLASAGELQKGNELALPSKYVNFLYLASHYEKLKGSPEDNEQKQLFVEQHKHYLDEIIEQISEFSKRVILADANLDKVLSAYNKHRDKPIREQAENIIHLFTLTNLGAPAAFKYFDTTIDRKRYTSTKEVLDATLIHQSITGLYETRIDLSQLGGDGGGGSGGSGGSGGSGGSGGSGGLDDEYRLYSPLVKPDQNIQFWLEQFPQAWAETAGMGLAKQVPPQVIQLKASATPVSVRQYPLSKEAQEGIRPHVQRLIQQGILVPVQSPWNTPLLPVRKPGTNDYRPVQDLREVNKRVQDIHPTVPNPYNLLCALPPQRSWYTVLDLKDAFFCLRLHPTSQPLFAFEWRDPGTGRTGQLTWTRLPQGFKNSPTIFNEALHRDLANFRIQHPQVTLLQYVDDLLLAGATKQDCLEGTKALLLELSDLGYRASAKKAQICRREVTYLGYSLRDGQRWLTEARKKTVVQIPAPTTAKQVREFLGKAGFCRLFIPGFATLAAPLYPLTKPKGEFSWAPEHQKAFDAIKKALLSAPALALPDVTKPFTLYVDERKGVARGVLTQTLGPWRRPVAYLSKKLDPVASGWPVCLKAIAAVAILVKDADKLTLGQNITVIAPHALENIVRQPPDRWMTNARMTHYQSLLLTERVTFAPPAALNPATLLPEETDEPVTHDCHQLLIEETGVRKDLTDIPLTGEVLTWFTDGSSYVVEGKRMAGAAVVDGTRTIWASSLPEGTSAQKAELMALTQALRLAEGKSINIYTDSRYAFATAHVHGAIYKQRGWLTSAGREIKNKEEILSLLEALHLPKRLAIIHCPGHQKAKDPISRGNQMADRVAKQAAQGVNLLPAGKRTADGSEFEKRTADGSEFESPKKKAKVE

SEQ ID NO: 192 - protein, 2088 aa, synthetic construct
MPAAKRVKLDGGDKKYSIGLDIGTNSVGWAVITDEYKVPSKKFKVLGNTDRHSIKKNLIGALLFDSGETAEATRLKRTARRRYTRRKNRICYLQEIFSNEMAKVDDSFFHRLEESFLVEEDKKHERHPIFGNIVDEVAYHEKYPTIYHLRKKLVDSTDKADLRLIYLALAHMIKFRGHFLIEGDLNPDNSDVDKLFIQLVQTYNQLFEENPINASGVDAKAILSARLSKSRRLENLIAQLPGEKKNGLFGNLIALSLGLTPNFKSNFDLAEDAKLQLSKDTYDDDLDNLLAQIGDQYADLFLAAKNLSDAILLSDILRVNTEITKAPLSASMIKRYDEHHQDLTLLKALVRQQLPEKYKEIFFDQSKNGYAGYIDGGASQEEFYKFIKPILEKMDGTEELLVKLNREDLLRKQRTFDNGSIPHQIHLGELHAILRRQEDFYPFLKDNREKIEKILTFRIPYYVGPLARGNSRFAWMTRKSEETITPWNFEEVVDKGASAQSFIERMTNFDKNLPNEKVLPKHSLLYEYFTVYNELTKVKYVTEGMRKPAFLSGEQKKAIVDLLFKTNRKVTVKQLKEDYFKKIECFDSVEISGVEDRFNASLGTYHDLLKIIKDKDFLDNEENEDILEDIVLTLTLFEDREMIEERLKTYAHLFDDKVMKQLKRRRYTGWGRLSRKLINGIRDKQSGKTILDFLKSDGFANRNFMQLIHDDSLTFKEDIQKAQVSGQGDSLHEHIANLAGSPAIKKGILQTVKVVDELVKVMGRHKPENIVIEMARENQTTQKGQKNSRERMKRIEEGIKELGSQILKEHPVENTQLQNEKLYLYYLQNGRDMYVDQELDINRLSDYDVDHIVPQSFLKDDSIDNKVLTRSDKARGKSDNVPSEEVVKKMKNYWRQLLNAKLITQRKFDNLTKAERGGLSELDKAGFIKRQLVETRQITKHVAQILDSRMNTKYDENDKLIREVKVITLKSKLVSDFRKDFQFYKVREINNYHHAHDAYLNAVVGTALIKKYPKLESEFVYGDYKVYDVRKMIAKSEQEIGKATAKYFFYSNIMNFFKTEITLANGEIRKRPLIETNGETGEIVWDKGRDFATVRKVLSMPQVNIVKKTEVQTGGFSKESILPKRNSDKLIARKKDWDPKKYGGFDSPTVAYSVLVVAKVEKGKSKKLKSVKELLGITIMERSSFEKNPIDFLEAKGYKEVKKDLIIKLPKYSLFELENGRKRMLASAGELQKGNELALPSKYVNFLYLASHYEKLKGSPEDNEQKQLFVEQHKHYLDEIIEQISEFSKRVILADANLDKVLSAYNKHRDKPIREQAENIIHLFTLTNLGAPAAFKYFDTTIDRKRYTSTKEVLDATLIHQSITGLYETRIDLSQLGGDGGPAPEAAAKGGGGGLDDEYRLYSPLVKPDQNIQFWLEQFPQAWAETAGMGLAKQVPPQVIQLKASATPVSVRQYPLSKEAQEGIRPHVQRLIQQGILVPVQSPWNTPLLPVRKPGTNDYRPVQDLREVNKRVQDIHPTVPNPYNLLCALPPQRSWYTVLDLKDAFFCLRLHPTSQPLFAFEWRDPGTGRTGQLTWTRLPQGFKNSPTIFNEALHRDLANFRIQHPQVTLLQYVDDLLLAGATKQDCLEGTKALLLELSDLGYRASAKKAQICRREVTYLGYSLRDGQRWLTEARKKTVVQIPAPTTAKQVREFLGKAGFCRLFIPGFATLAAPLYPLTKPKGEFSWAPEHQKAFDAIKKALLSAPALALPDVTKPFTLYVDERKGVARGVLTQTLGPWRRPVAYLSKKLDPVASGWPVCLKAIAAVAILVKDADKLTLGQNITVIAPHALENIVRQPPDRWMTNARMTHYQSLLLTERVTFAPPAALNPATLLPEETDEPVTHDCHQLLIEETGVRKDLTDIPLTGEVLTWFTDGSSYVVEGKRMAGAAVVDGTRTIWASSLPEGTSAQKAELMALTQALRLAEGKSINIYTDSRYAFATAHVHGAIYKQRGWLTSAGREIKNKEEILSLLEALHLPKRLAIIHCPGHQKAKDPISRGNQMADRVAKQAAQGVNLLPAGKRTADGSEFEKRTADGSEFESPKKKAKVE

SEQ ID NO: 193 - protein, 2107 aa, synthetic construct
MPAAKRVKLDGGDKKYSIGLDIGTNSVGWAVITDEYKVPSKKFKVLGNTDRHSIKKNLIGALLFDSGETAEATRLKRTARRRYTRRKNRICYLQEIFSNEMAKVDDSFFHRLEESFLVEEDKKHERHPIFGNIVDEVAYHEKYPTIYHLRKKLVDSTDKADLRLIYLALAHMIKFRGHFLIEGDLNPDNSDVDKLFIQLVQTYNQLFEENPINASGVDAKAILSARLSKSRRLENLIAQLPGEKKNGLFGNLIALSLGLTPNFKSNFDLAEDAKLQLSKDTYDDDLDNLLAQIGDQYADLFLAAKNLSDAILLSDILRVNTEITKAPLSASMIKRYDEHHQDLTLLKALVRQQLPEKYKEIFFDQSKNGYAGYIDGGASQEEFYKFIKPILEKMDGTEELLVKLNREDLLRKQRTFDNGSIPHQIHLGELHAILRRQEDFYPFLKDNREKIEKILTFRIPYYVGPLARGNSRFAWMTRKSEETITPWNFEEVVDKGASAQSFIERMTNFDKNLPNEKVLPKHSLLYEYFTVYNELTKVKYVTEGMRKPAFLSGEQKKAIVDLLFKTNRKVTVKQLKEDYFKKIECFDSVEISGVEDRFNASLGTYHDLLKIIKDKDFLDNEENEDILEDIVLTLTLFEDREMIEERLKTYAHLFDDKVMKQLKRRRYTGWGRLSRKLINGIRDKQSGKTILDFLKSDGFANRNFMQLIHDDSLTFKEDIQKAQVSGQGDSLHEHIANLAGSPAIKKGILQTVKVVDELVKVMGRHKPENIVIEMARENQTTQKGQKNSRERMKRIEEGIKELGSQILKEHPVENTQLQNEKLYLYYLQNGRDMYVDQELDINRLSDYDVDHIVPQSFLKDDSIDNKVLTRSDKARGKSDNVPSEEVVKKMKNYWRQLLNAKLITQRKFDNLTKAERGGLSELDKAGFIKRQLVETRQITKHVAQILDSRMNTKYDENDKLIREVKVITLKSKLVSDFRKDFQFYKVREINNYHHAHDAYLNAVVGTALIKKYPKLESEFVYGDYKVYDVRKMIAKSEQEIGKATAKYFFYSNIMNFFKTEITLANGEIRKRPLIETNGETGEIVWDKGRDFATVRKVLSMPQVNIVKKTEVQTGGFSKESILPKRNSDKLIARKKDWDPKKYGGFDSPTVAYSVLVVAKVEKGKSKKLKSVKELLGITIMERSSFEKNPIDFLEAKGYKEVKKDLIIKLPKYSLFELENGRKRMLASAGELQKGNELALPSKYVNFLYLASHYEKLKGSPEDNEQKQLFVEQHKHYLDEIIEQISEFSKRVILADANLDKVLSAYNKHRDKPIREQAENIIHLFTLTNLGAPAAFKYFDTTIDRKRYTSTKEVLDATLIHQSITGLYETRIDLSQLGGDGGEAAAKEAAAKEAAAKEAAAKEAAAKEAAAKGGLDDEYRLYSPLVKPDQNIQFWLEQFPQAWAETAGMGLAKQVPPQVIQLKASATPVSVRQYPLSKEAQEGIRPHVQRLIQQGILVPVQSPWNTPLLPVRKPGTNDYRPVQDLREVNKRVQDIHPTVPNPYNLLCALPPQRSWYTVLDLKDAFFCLRLHPTSQPLFAFEWRDPGTGRTGQLTWTRLPQGFKNSPTIFNEALHRDLANFRIQHPQVTLLQYVDDLLLAGATKQDCLEGTKALLLELSDLGYRASAKKAQICRREVTYLGYSLRDGQRWLTEARKKTVVQIPAPTTAKQVREFLGKAGFCRLFIPGFATLAAPLYPLTKPKGEFSWAPEHQKAFDAIKKALLSAPALALPDVTKPFTLYVDERKGVARGVLTQTLGPWRRPVAYLSKKLDPVASGWPVCLKAIAAVAILVKDADKLTLGQNITVIAPHALENIVRQPPDRWMTNARMTHYQSLLLTERVTFAPPAALNPATLLPEETDEPVTHDCHQLLIEETGVRKDLTDIPLTGEVLTWFTDGSSYVVEGKRMAGAAVVDGTRTIWASSLPEGTSAQKAELMALTQALRLAEGKSINIYTDSRYAFATAHVHGAIYKQRGWLTSAGREIKNKEEILSLLEALHLPKRLAIIHCPGHQKAKDPISRGNQMADRVAKQAAQGVNLLPAGKRTADGSEFEKRTADGSEFESPKKKAKVE

SEQ ID NO: 194 - protein, 2090 aa, synthetic construct; identical to SEQ ID NO: 54

SEQ ID NO: 195 - protein, 2088 aa, synthetic construct; identical to SEQ ID NO: 35

SEQ ID NO: 196 - protein, 2093 aa, synthetic construct; identical to SEQ ID NO: 90

SEQ ID NO: 197 - protein, 2086 aa, synthetic construct
MPAAKRVKLDGGDKKYSIGLDIGTNSVGWAVITDEYKVPSKKFKVLGNTDRHSIKKNLIGALLFDSGETAEATRLKRTARRRYTRRKNRICYLQEIFSNEMAKVDDSFFHRLEESFLVEEDKKHERHPIFGNIVDEVAYHEKYPTIYHLRKKLVDSTDKADLRLIYLALAHMIKFRGHFLIEGDLNPDNSDVDKLFIQLVQTYNQLFEENPINASGVDAKAILSARLSKSRRLENLIAQLPGEKKNGLFGNLIALSLGLTPNFKSNFDLAEDAKLQLSKDTYDDDLDNLLAQIGDQYADLFLAAKNLSDAILLSDILRVNTEITKAPLSASMIKRYDEHHQDLTLLKALVRQQLPEKYKEIFFDQSKNGYAGYIDGGASQEEFYKFIKPILEKMDGTEELLVKLNREDLLRKQRTFDNGSIPHQIHLGELHAILRRQEDFYPFLKDNREKIEKILTFRIPYYVGPLARGNSRFAWMTRKSEETITPWNFEEVVDKGASAQSFIERMTNFDKNLPNEKVLPKHSLLYEYFTVYNELTKVKYVTEGMRKPAFLSGEQKKAIVDLLFKTNRKVTVKQLKEDYFKKIECFDSVEISGVEDRFNASLGTYHDLLKIIKDKDFLDNEENEDILEDIVLTLTLFEDREMIEERLKTYAHLFDDKVMKQLKRRRYTGWGRLSRKLINGIRDKQSGKTILDFLKSDGFANRNFMQLIHDDSLTFKEDIQKAQVSGQGDSLHEHIANLAGSPAIKKGILQTVKVVDELVKVMGRHKPENIVIEMARENQTTQKGQKNSRERMKRIEEGIKELGSQILKEHPVENTQLQNEKLYLYYLQNGRDMYVDQELDINRLSDYDVDHIVPQSFLKDDSIDNKVLTRSDKARGKSDNVPSEEVVKKMKNYWRQLLNAKLITQRKFDNLTKAERGGLSELDKAGFIKRQLVETRQITKHVAQILDSRMNTKYDENDKLIREVKVITLKSKLVSDFRKDFQFYKVREINNYHHAHDAYLNAVVGTALIKKYPKLESEFVYGDYKVYDVRKMIAKSEQEIGKATAKYFFYSNIMNFFKTEITLANGEIRKRPLIETNGETGEIVWDKGRDFATVRKVLSMPQVNIVKKTEVQTGGFSKESILPKRNSDKLIARKKDWDPKKYGGFDSPTVAYSVLVVAKVEKGKSKKLKSVKELLGITIMERSSFEKNPIDFLEAKGYKEVKKDLIIKLPKYSLFELENGRKRMLASAGELQKGNELALPSKYVNFLYLASHYEKLKGSPEDNEQKQLFVEQHKHYLDEIIEQISEFSKRVILADANLDKVLSAYNKHRDKPIREQAENIIHLFTLTNLGAPAAFKYFDTTIDRKRYTSTKEVLDATLIHQSITGLYETRIDLSQLGGDGGGGGGGSPAPGGLDDEYRLYSPLVKPDQNIQFWLEQFPQAWAETAGMGLAKQVPPQVIQLKASATPVSVRQYPLSKEAQEGIRPHVQRLIQQGILVPVQSPWNTPLLPVRKPGTNDYRPVQDLREVNKRVQDIHPTVPNPYNLLCALPPQRSWYTVLDLKDAFFCLRLHPTSQPLFAFEWRDPGTGRTGQLTWTRLPQGFKNSPTIFNEALHRDLANFRIQHPQVTLLQYVDDLLLAGATKQDCLEGTKALLLELSDLGYRASAKKAQICRREVTYLGYSLRDGQRWLTEARKKTVVQIPAPTTAKQVREFLGKAGFCRLFIPGFATLAAPLYPLTKPKGEFSWAPEHQKAFDAIKKALLSAPALALPDVTKPFTLYVDERKGVARGVLTQTLGPWRRPVAYLSKKLDPVASGWPVCLKAIAAVAILVKDADKLTLGQNITVIAPHALENIVRQPPDRWMTNARMTHYQSLLLTERVTFAPPAALNPATLLPEETDEPVTHDCHQLLIEETGVRKDLTDIPLTGEVLTWFTDGSSYVVEGKRMAGAAVVDGTRTIWASSLPEGTSAQKAELMALTQALRLAEGKSINIYTDSRYAFATAHVHGAIYKQRGWLTSAGREIKNKEEILSLLEALHLPKRLAIIHCPGHQKAKDPISRGNQMADRVAKQAAQGVNLLPAGKRTADGSEFEKRTADGSEFESPKKKAKVE

SEQ ID NO: 198 - protein, 2086 aa, synthetic construct; identical to SEQ ID NO: 58

SEQ ID NO: 199 - protein, 2088 aa, synthetic construct; identical to SEQ ID NO: 40

SEQ ID NO: 200 - protein, 2088 aa, synthetic construct; identical to SEQ ID NO: 63

SEQ ID NO: 201 - protein, 2089 aa, synthetic construct; identical to SEQ ID NO: 74

SEQ ID NO: 202 - protein, 2092 aa, synthetic construct
MPAAKRVKLDGGDKKYSIGLDIGTNSVGWAVITDEYKVPSKKFKVLGNTDRHSIKKNLIGALLFDSGETAEATRLKRTARRRYTRRKNRICYLQEIFSNEMAKVDDSFFHRLEESFLVEEDKKHERHPIFGNIVDEVAYHEKYPTIYHLRKKLVDSTDKADLRLIYLALAHMIKFRGHFLIEGDLNPDNSDVDKLFIQLVQTYNQLFEENPINASGVDAKAILSARLSKSRRLENLIAQLPGEKKNGLFGNLIALSLGLTPNFKSNFDLAEDAKLQLSKDTYDDDLDNLLAQIGDQYADLFLAAKNLSDAILLSDILRVNTEITKAPLSASMIKRYDEHHQDLTLLKALVRQQLPEKYKEIFFDQSKNGYAGYIDGGASQEEFYKFIKPILEKMDGTEELLVKLNREDLLRKQRTFDNGSIPHQIHLGELHAILRRQEDFYPFLKDNREKIEKILTFRIPYYVGPLARGNSRFAWMTRKSEETITPWNFEEVVDKGASAQSFIERMTNFDKNLPNEKVLPKHSLLYEYFTVYNELTKVKYVTEGMRKPAFLSGEQKKAIVDLLFKTNRKVTVKQLKEDYFKKIECFDSVEISGVEDRFNASLGTYHDLLKIIKDKDFLDNEENEDILEDIVLTLTLFEDREMIEERLKTYAHLFDDKVMKQLKRRRYTGWGRLSRKLINGIRDKQSGKTILDFLKSDGFANRNFMQLIHDDSLTFKEDIQKAQVSGQGDSLHEHIANLAGSPAIKKGILQTVKVVDELVKVMGRHKPENIVIEMARENQTTQKGQKNSRERMKRIEEGIKELGSQILKEHPVENTQLQNEKLYLYYLQNGRDMYVDQELDINRLSDYDVDHIVPQSFLKDDSIDNKVLTRSDKARGKSDNVPSEEVVKKMKNYWRQLLNAKLITQRKFDNLTKAERGGLSELDKAGFIKRQLVETRQITKHVAQILDSRMNTKYDENDKLIREVKVITLKSKLVSDFRKDFQFYKVREINNYHHAHDAYLNAVVGTALIKKYPKLESEFVYGDYKVYDVRKMIAKSEQEIGKATAKYFFYSNIMNFFKTEITLANGEIRKRPLIETNGETGEIVWDKGRDFATVRKVLSMPQVNIVKKTEVQTGGFSKESILPKRNSDKLIARKKDWDPKKYGGFDSPTVAYSVLVVAKVEKGKSKKLKSVKELLGITIMERSSFEKNPIDFLEAKGYKEVKKDLIIKLPKYSLFELENGRKRMLASAGELQKGNELALPSKYVNFLYLASHYEKLKGSPEDNEQKQLFVEQHKHYLDEIIEQISEFSKRVILADANLDKVLSAYNKHRDKPIREQAENIIHLFTLTNLGAPAAFKYFDTTIDRKRYTSTKEVLDATLIHQSITGLYETRIDLSQLGGDGGGSSGSSGSSGSSGSSGGLDDEYRLYSPLVKPDQNIQFWLEQFPQAWAETAGMGLAKQVPPQVIQLKASATPVSVRQYPLSKEAQEGIRPHVQRLIQQGILVPVQSPWNTPLLPVRKPGTNDYRPVQDLREVNKRVQDIHPTVPNPYNLLCALPPQRSWYTVLDLKDAFFCLRLHPTSQPLFAFEWRDPGTGRTGQLTWTRLPQGFKNSPTIFNEALHRDLANFRIQHPQVTLLQYVDDLLLAGATKQDCLEGTKALLLELSDLGYRASAKKAQICRREVTYLGYSLRDGQRWLTEARKKTVVQIPAPTTAKQVREFLGKAGFCRLFIPGFATLAAPLYPLTKPKGEFSWAPEHQKAFDAIKKALLSAPALALPDVTKPFTLYVDERKGVARGVLTQTLGPWRRPVAYLSKKLDPVASGWPVCLKAIAAVAILVKDADKLTLGQNITVIAPHALENIVRQPPDRWMTNARMTHYQSLLLTERVTFAPPAALNPATLLPEETDEPVTHDCHQLLIEETGVRKDLTDIPLTGEVLTWFTDGSSYVVEGKRMAGAAVVDGTRTIWASSLPEGTSAQKAELMALTQALRLAEGKSINIYTDSRYAFATAHVHGAIYKQRGWLTSAGREIKNKEEILSLLEALHLPKRLAIIHCPGHQKAKDPISRGNQMADRVAKQAAQGVNLLPAGKRTADGSEFEKRTADGSEFESPKKKAKVE

SEQ ID NO: 203 - protein, 2083 aa, synthetic construct; identical to SEQ ID NO: 76

SEQ ID NO: 204 - protein, 2088 aa, synthetic construct; identical to SEQ ID NO: 71

SEQ ID NO: 205 - protein, 2086 aa, synthetic construct; identical to SEQ ID NO: 73

SEQ ID NO: 206 - protein, 2085 aa, synthetic construct; identical to SEQ ID NO: 57

SEQ ID NO: 207 - protein, 2086 aa, synthetic construct; identical to SEQ ID NO: 43

SEQ ID NO: 208 - protein, 2086 aa, synthetic construct
MPAAKRVKLDGGDKKYSIGLDIGTNSVGWAVITDEYKVPSKKFKVLGNTDRHSIKKNLIGALLFDSGETAEATRLKRTARRRYTRRKNRICYLQEIFSNEMAKVDDSFFHRLEESFLVEEDKKHERHPIFGNIVDEVAYHEKYPTIYHLRKKLVDSTDKADLRLIYLALAHMIKFRGHFLIEGDLNPDNSDVDKLFIQLVQTYNQLFEENPINASGVDAKAILSARLSKSRRLENLIAQLPGEKKNGLFGNLIALSLGLTPNFKSNFDLAEDAKLQLSKDTYDDDLDNLLAQIGDQYADLFLAAKNLSDAILLSDILRVNTEITKAPLSASMIKRYDEHHQDLTLLKALVRQQLPEKYKEIFFDQSKNGYAGYIDGGASQEEFYKFIKPILEKMDGTEELLVKLNREDLLRKQRTFDNGSIPHQIHLGELHAILRRQEDFYPFLKDNREKIEKILTFRIPYYVGPLARGNSRFAWMTRKSEETITPWNFEEVVDKGASAQSFIERMTNFDKNLPNEKVLPKHSLLYEYFTVYNELTKVKYVTEGMRKPAFLSGEQKKAIVDLLFKTNRKVTVKQLKEDYFKKIECFDSVEISGVEDRFNASLGTYHDLLKIIKDKDFLDNEENEDILEDIVLTLTLFEDREMIEERLKTYAHLFDDKVMKQLKRRRYTGWGRLSRKLINGIRDKQSGKTILDFLKSDGFANRNFMQLIHDDSLTFKEDIQKAQVSGQGDSLHEHIANLAGSPAIKKGILQTVKVVDELVKVMGRHKPENIVIEMARENQTTQKGQKNSRERMKRIEEGIKELGSQILKEHPVENTQLQNEKLYLYYLQNGRDMYVDQELDINRLSDYDVDHIVPQSFLKDDSIDNKVLTRSDKARGKSDNVPSEEVVKKMKNYWRQLLNAKLITQRKFDNLTKAERGGLSELDKAGFIKRQLVETRQITKHVAQILDSRMNTKYDENDKLIREVKVITLKSKLVSDFRKDFQFYKVREINNYHHAHDAYLNAVVGTALIKKYPKLESEFVYGDYKVYDVRKMIAKSEQEIGKATAKYFFYSNIMNFFKTEITLANGEIRKRPLIETNGETGEIVWDKGRDFATVRKVLSMPQVNIVKKTEVQTGGFSKESILPKRNSDKLIARKKDWDPKKYGGFDSPTVAYSVLVVAKVEKGKSKKLKSVKELLGITIMERSSFEKNPIDFLEAKGYKEVKKDLIIKLPKYSLFELENGRKRMLASAGELQKGNELALPSKYVNFLYLASHYEKLKGSPEDNEQKQLFVEQHKHYLDEIIEQISEFSKRVILADANLDKVLSAYNKHRDKPIREQAENIIHLFTLTNLGAPAAFKYFDTTIDRKRYTSTKEVLDATLIHQSITGLYETRIDLSQLGGDGGGSSGSSGSSGGLDDEYRLYSPLVKPDQNIQFWLEQFPQAWAETAGMGLAKQVPPQVIQLKASATPVSVRQYPLSKEAQEGIRPHVQRLIQQGILVPVQSPWNTPLLPVRKPGTNDYRPVQDLREVNKRVQDIHPTVPNPYNLLCALPPQRSWYTVLDLKDAFFCLRLHPTSQPLFAFEWRDPGTGRTGQLTWTRLPQGFKNSPTIFNEALHRDLANFRIQHPQVTLLQYVDDLLLAGATKQDCLEGTKALLLELSDLGYRASAKKAQICRREVTYLGYSLRDGQRWLTEARKKTVVQIPAPTTAKQVREFLGKAGFCRLFIPGFATLAAPLYPLTKPKGEFSWAPEHQKAFDAIKKALLSAPALALPDVTKPFTLYVDERKGVARGVLTQTLGPWRRPVAYLSKKLDPVASGWPVCLKAIAAVAILVKDADKLTLGQNITVIAPHALENIVRQPPDRWMTNARMTHYQSLLLTERVTFAPPAALNPATLLPEETDEPVTHDCHQLLIEETGVRKDLTDIPLTGEVLTWFTDGSSYVVEGKRMAGAAVVDGTRTIWASSLPEGTSAQKAELMALTQALRLAEGKSINIYTDSRYAFATAHVHGAIYKQRGWLTSAGREIKNKEEILSLLEALHLPKRLAIIHCPGHQKAKDPISRGNQMADRVAKQAAQGVNLLPAGKRTADGSEFEKRTADGSEFESPKKKAKVE

SEQ ID NO: 209 - protein, 2088 aa, synthetic construct
MPAAKRVKLDGGDKKYSIGLDIGTNSVGWAVITDEYKVPSKKFKVLGNTDRHSIKKNLIGALLFDSGETAEATRLKRTARRRYTRRKNRICYLQEIFSNEMAKVDDSFFHRLEESFLVEEDKKHERHPIFGNIVDEVAYHEKYPTIYHLRKKLVDSTDKADLRLIYLALAHMIKFRGHFLIEGDLNPDNSDVDKLFIQLVQTYNQLFEENPINASGVDAKAILSARLSKSRRLENLIAQLPGEKKNGLFGNLIALSLGLTPNFKSNFDLAEDAKLQLSKDTYDDDLDNLLAQIGDQYADLFLAAKNLSDAILLSDILRVNTEITKAPLSASMIKRYDEHHQDLTLLKALVRQQLPEKYKEIFFDQSKNGYAGYIDGGASQEEFYKFIKPILEKMDGTEELLVKLNREDLLRKQRTFDNGSIPHQIHLGELHAILRRQEDFYPFLKDNREKIEKILTFRIPYYVGPLARGNSRFAWMTRKSEETITPWNFEEVVDKGASAQSFIERMTNFDKNLPNEKVLPKHSLLYEYFTVYNELTKVKYVTEGMRKPAFLSGEQKKAIVDLLFKTNRKVTVKQLKEDYFKKIECFDSVEISGVEDRFNASLGTYHDLLKIIKDKDFLDNEENEDILEDIVLTLTLFEDREMIEERLKTYAHLFDDKVMKQLKRRRYTGWGRLSRKLINGIRDKQSGKTILDFLKSDGFANRNFMQLIHDDSLTFKEDIQKAQVSGQGDSLHEHIANLAGSPAIKKGILQTVKVVDELVKVMGRHKPENIVIEMARENQTTQKGQKNSRERMKRIEEGIKELGSQILKEHPVENTQLQNEKLYLYYLQNGRDMYVDQELDINRLSDYDVDHIVPQSFLKDDSIDNKVLTRSDKARGKSDNVPSEEVVKKMKNYWRQLLNAKLITQRKFDNLTKAERGGLSELDKAGFIKRQLVETRQITKHVAQILDSRMNTKYDENDKLIREVKVITLKSKLVSDFRKDFQFYKVREINNYHHAHDAYLNAVVGTALIKKYPKLESEFVYGDYKVYDVRKMIAKSEQEIGKATAKYFFYSNIMNFFKTEITLANGEIRKRPLIETNGETGEIVWDKGRDFATVRKVLSMPQVNIVKKTEVQTGGFSKESILPKRNSDKLIARKKDWDPKKYGGFDSPTVAYSVLVVAKVEKGKSKKLKSVKELLGITIMERSSFEKNPIDFLEAKGYKEVKKDLIIKLPKYSLFELENGRKRMLASAGELQKGNELALPSKYVNFLYLASHYEKLKGSPEDNEQKQLFVEQHKHYLDEIIEQISEFSKRVILADANLDKVLSAYNKHRDKPIREQAENIIHLFTLTNLGAPAAFKYFDTTIDRKRYTSTKEVLDATLIHQSITGLYETRIDLSQLGGDGGGSSEAAAKPAPGGLDDEYRLYSPLVKPDQNIQFWLEQFPQAWAETAGMGLAKQVPPQVIQLKASATPVSVRQYPLSKEAQEGIRPHVQRLIQQGILVPVQSPWNTPLLPVRKPGTNDYRPVQDLREVNKRVQDIHPTVPNPYNLLCALPPQRSWYTVLDLKDAFFCLRLHPTSQPLFAFEWRDPGTGRTGQLTWTRLPQGFKNSPTIFNEALHRDLANFRIQHPQVTLLQYVDDLLLAGATKQDCLEGTKALLLELSDLGYRASAKKAQICRREVTYLGYSLRDGQRWLTEARKKTVVQIPAPTTAKQVREFLGKAGFCRLFIPGFATLAAPLYPLTKPKGEFSWAPEHQKAFDAIKKALLSAPALALPDVTKPFTLYVDERKGVARGVLTQTLGPWRRPVAYLSKKLDPVASGWPVCLKAIAAVAILVKDADKLTLGQNITVIAPHALENIVRQPPDRWMTNARMTHYQSLLLTERVTFAPPAALNPATLLPEETDEPVTHDCHQLLIEETGVRKDLTDIPLTGEVLTWFTDGSSYVVEGKRMAGAAVVDGTRTIWASSLPEGTSAQKAELMALTQALRLAEGKSINIYTDSRYAFATAHVHGAIYKQRGWLTSAGREIKNKEEILSLLEALHLPKRLAIIHCPGHQKAKDPISRGNQMADRVAKQAAQGVNLLPAGKRTADGSEFEKRTADGSEFESPKKKAKVE

SEQ ID NO: 210 - protein, 2086 aa, synthetic construct; identical to SEQ ID NO: 89

SEQ ID NO: 211 - protein, 2088 aa, synthetic construct; identical to SEQ ID NO: 42

SEQ ID NO: 212 - protein, 2083 aa, synthetic construct
MPAAKRVKLDGGDKKYSIGLDIGTNSVGWAVITDEYKVPSKKFKVLGNTDRHSIKKNLIGALLFDSGETAEATRLKRTARRRYTRRKNRICYLQEIFSNEMAKVDDSFFHRLEESFLVEEDKKHERHPIFGNIVDEVAYHEKYPTIYHLRKKLVDSTDKADLRLIYLALAHMIKFRGHFLIEGDLNPDNSDVDKLFIQLVQTYNQLFEENPINASGVDAKAILSARLSKSRRLENLIAQLPGEKKNGLFGNLIALSLGLTPNFKSNFDLAEDAKLQLSKDTYDDDLDNLLAQIGDQYADLFLAAKNLSDAILLSDILRVNTEITKAPLSASMIKRYDEHHQDLTLLKALVRQQLPEKYKEIFFDQSKNGYAGYIDGGASQEEFYKFIKPILEKMDGTEELLVKLNREDLLRKQRTFDNGSIPHQIHLGELHAILRRQEDFYPFLKDNREKIEKILTFRIPYYVGPLARGNSRFAWMTRKSEETITPWNFEEVVDKGASAQSFIERMTNFDKNLPNEKVLPKHSLLYEYFTVYNELTKVKYVTEGMRKPAFLSGEQKKAIVDLLFKTNRKVTVKQLKEDYFKKIECFDSVEISGVEDRFNASLGTYHDLLKIIKDKDFLDNEENEDILEDIVLTLTLFEDREMIEERLKTYAHLFDDKVMKQLKRRRYTGWGRLSRKLINGIRDKQSGKTILDFLKSDGFANRNFMQLIHDDSLTFKEDIQKAQVSGQGDSLHEHIANLAGSPAIKKGILQTVKVVDELVKVMGRHKPENIVIEMARENQTTQKGQKNSRERMKRIEEGIKELGSQILKEHPVENTQLQNEKLYLYYLQNGRDMYVDQELDINRLSDYDVDHIVPQSFLKDDSIDNKVLTRSDKARGKSDNVPSEEVVKKMKNYWRQLLNAKLITQRKFDNLTKAERGGLSELDKAGFIKRQLVETRQITKHVAQILDSRMNTKYDENDKLIREVKVITLKSKLVSDFRKDFQFYKVREINNYHHAHDAYLNAVVGTALIKKYPKLESEFVYGDYKVYDVRKMIAKSEQEIGKATAKYFFYSNIMNFFKTEITLANGEIRKRPLIETNGETGEIVWDKGRDFATVRKVLSMPQVNIVKKTEVQTGGFSKESILPKRNSDKLIARKKDWDPKKYGGFDSPTVAYSVLVVAKVEKGKSKKLKSVKELLGITIMERSSFEKNPIDFLEAKGYKEVKKDLIIKLPKYSLFELENGRKRMLASAGELQKGNELALPSKYVNFLYLASHYEKLKGSPEDNEQKQLFVEQHKHYLDEIIEQISEFSKRVILADANLDKVLSAYNKHRDKPIREQAENIIHLFTLTNLGAPAAFKYFDTTIDRKRYTSTKEVLDATLIHQSITGLYETRIDLSQLGGDGGGGSGSSGGLDDEYRLYSPLVKPDQNIQFWLEQFPQAWAETAGMGLAKQVPPQVIQLKASATPVSVRQYPLSKEAQEGIRPHVQRLIQQGILVPVQSPWNTPLLPVRKPGTNDYRPVQDLREVNKRVQDIHPTVPNPYNLLCALPPQRSWYTVLDLKDAFFCLRLHPTSQPLFAFEWRDPGTGRTGQLTWTRLPQGFKNSPTIFNEALHRDLANFRIQHPQVTLLQYVDDLLLAGATKQDCLEGTKALLLELSDLGYRASAKKAQICRREVTYLGYSLRDGQRWLTEARKKTVVQIPAPTTAKQVREFLGKAGFCRLFIPGFATLAAPLYPLTKPKGEFSWAPEHQKAFDAIKKALLSAPALALPDVTKPFTLYVDERKGVARGVLTQTLGPWRRPVAYLSKKLDPVASGWPVCLKAIAAVAILVKDADKLTLGQNITVIAPHALENIVRQPPDRWMTNARMTHYQSLLLTERVTFAPPAALNPATLLPEETDEPVTHDCHQLLIEETGVRKDLTDIPLTGEVLTWFTDGSSYVVEGKRMAGAAVVDGTRTIWASSLPEGTSAQKAELMALTQALRLAEGKSINIYTDSRYAFATAHVHGAIYKQRGWLTSAGREIKNKEEILSLLEALHLPKRLAIIHCPGHQKAKDPISRGNQMADRVAKQAAQGVNLLPAGKRTADGSEFEKRTADGSEFESPKKKAKVE

SEQ ID NO: 213 - protein, 2086 aa, synthetic construct
MPAAKRVKLDGGDKKYSIGLDIGTNSVGWAVITDEYKVPSKKFKVLGNTDRHSIKKNLIGALLFDSGETAEATRLKRTARRRYTRRKNRICYLQEIFSNEMAKVDDSFFHRLEESFLVEEDKKHERHPIFGNIVDEVAYHEKYPTIYHLRKKLVDSTDKADLRLIYLALAHMIKFRGHFLIEGDLNPDNSDVDKLFIQLVQTYNQLFEENPINASGVDAKAILSARLSKSRRLENLIAQLPGEKKNGLFGNLIALSLGLTPNFKSNFDLAEDAKLQLSKDTYDDDLDNLLAQIGDQYADLFLAAKNLSDAILLSDILRVNTEITKAPLSASMIKRYDEHHQDLTLLKALVRQQLPEKYKEIFFDQSKNGYAGYIDGGASQEEFYKFIKPILEKMDGTEELLVKLNREDLLRKQRTFDNGSIPHQIHLGELHAILRRQEDFYPFLKDNREKIEKILTFRIPYYVGPLARGNSRFAWMTRKSEETITPWNFEEVVDKGASAQSFIERMTNFDKNLPNEKVLPKHSLLYEYFTVYNELTKVKYVTEGMRKPAFLSGEQKKAIVDLLFKTNRKVTVKQLKEDYFKKIECFDSVEISGVEDRFNASLGTYHDLLKIIKDKDFLDNEENEDILEDIVLTLTLFEDREMIEERLKTYAHLFDDKVMKQLKRRRYTGWGRLSRKLINGIRDKQSGKTILDFLKSDGFANRNFMQLIHDDSLTFKEDIQKAQVSGQGDSLHEHIANLAGSPAIKKGILQTVKVVDELVKVMGRHKPENIVIEMARENQTTQKGQKNSRERMKRIEEGIKELGSQILKEHPVENTQLQNEKLYLYYLQNGRDMYVDQELDINRLSDYDVDHIVPQSFLKDDSIDNKVLTRSDKARGKSDNVPSEEVVKKMKNYWRQLLNAKLITQRKFDNLTKAERGGLSELDKAGFIKRQLVETRQITKHVAQILDSRMNTKYDENDKLIREVKVITLKSKLVSDFRKDFQFYKVREINNYHHAHDAYLNAVVGTALIKKYPKLESEFVYGDYKVYDVRKMIAKSEQEIGKATAKYFFYSNIMNFFKTEITLANGEIRKRPLIETNGETGEIVWDKGRDFATVRKVLSMPQVNIVKKTEVQTGGFSKESILPKRNSDKLIARKKDWDPKKYGGFDSPTVAYSVLVVAKVEKGKSKKLKSVKELLGITIMERSSFEKNPIDFLEAKGYKEVKKDLIIKLPKYSLFELENGRKRMLASAGELQKGNELALPSKYVNFLYLASHYEKLKGSPEDNEQKQLFVEQHKHYLDEIIEQISEFSKRVILADANLDKVLSAYNKHRDKPIREQAENIIHLFTLTNLGAPAAFKYFDTTIDRKRYTSTKEVLDATLIHQSITGLYETRIDLSQLGGDGGGGSGGGPAPGGLDDEYRLYSPLVKPDQNIQFWLEQFPQAWAETAGMGLAKQVPPQVIQLKASATPVSVRQYPLSKEAQEGIRPHVQRLIQQGILVPVQSPWNTPLLPVRKPGTNDYRPVQDLREVNKRVQDIHPTVPNPYNLLCALPPQRSWYTVLDLKDAFFCLRLHPTSQPLFAFEWRDPGTGRTGQLTWTRLPQGFKNSPTIFNEALHRDLANFRIQHPQVTLLQYVDDLLLAGATKQDCLEGTKALLLELSDLGYRASAKKAQICRREVTYLGYSLRDGQRWLTEARKKTVVQIPAPTTAKQVREFLGKAGFCRLFIPGFATLAAPLYPLTKPKGEFSWAPEHQKAFDAIKKALLSAPALALPDVTKPFTLYVDERKGVARGVLTQTLGPWRRPVAYLSKKLDPVASGWPVCLKAIAAVAILVKDADKLTLGQNITVIAPHALENIVRQPPDRWMTNARMTHYQSLLLTERVTFAPPAALNPATLLPEETDEPVTHDCHQLLIEETGVRKDLTDIPLTGEVLTWFTDGSSYVVEGKRMAGAAVVDGTRTIWASSLPEGTSAQKAELMALTQALRLAEGKSINIYTDSRYAFATAHVHGAIYKQRGWLTSAGREIKNKEEILSLLEALHLPKRLAIIHCPGHQKAKDPISRGNQMADRVAKQAAQGVNLLPAGKRTADGSEFEKRTADGSEFESPKKKAKVE

SEQ ID NO: 214 - protein, 2095 aa, synthetic construct
MPAAKRVKLDGGDKKYSIGLDIGTNSVGWAVITDEYKVPSKKFKVLGNTDRHSIKKNLIGALLFDSGETAEATRLKRTARRRYTRRKNRICYLQEIFSNEMAKVDDSFFHRLEESFLVEEDKKHERHPIFGNIVDEVAYHEKYPTIYHLRKKLVDSTDKADLRLIYLALAHMIKFRGHFLIEGDLNPDNSDVDKLFIQLVQTYNQLFEENPINASGVDAKAILSARLSKSRRLENLIAQLPGEKKNGLFGNLIALSLGLTPNFKSNFDLAEDAKLQLSKDTYDDDLDNLLAQIGDQYADLFLAAKNLSDAILLSDILRVNTEITKAPLSASMIKRYDEHHQDLTLLKALVRQQLPEKYKEIFFDQSKNGYAGYIDGGASQEEFYKFIKPILEKMDGTEELLVKLNREDLLRKQRTFDNGSIPHQIHLGELHAILRRQEDFYPFLKDNREKIEKILTFRIPYYVGPLARGNSRFAWMTRKSEETITPWNFEEVVDKGASAQSFIERMTNFDKNLPNEKVLPKHSLLYEYFTVYNELTKVKYVTEGMRKPAFLSGEQKKAIVDLLFKTNRKVTVKQLKEDYFKKIECFDSVEISGVEDRFNASLGTYHDLLKIIKDKDFLDNEENEDILEDIVLTLTLFEDREMIEERLKTYAHLFDDKVMKQLKRRRYTGWGRLSRKLINGIRDKQSGKTILDFLKSDGFANRNFMQLIHDDSLTFKEDIQKAQVSGQGDSLHEHIANLAGSPAIKKGILQTVKVVDELVKVMGRHKPENIVIEMARENQTTQKGQKNSRERMKRIEEGIKELGSQILKEHPVENTQLQNEKLYLYYLQNGRDMYVDQELDINRLSDYDVDHIVPQSFLKDDSIDNKVLTRSDKARGKSDNVPSEEVVKKMKNYWRQLLNAKLITQRKFDNLTKAERGGLSELDKAGFIKRQLVETRQITKHVAQILDSRMNTKYDENDKLIREVKVITLKSKLVSDFRKDFQFYKVREINNYHHAHDAYLNAVVGTALIKKYPKLESEFVYGDYKVYDVRKMIAKSEQEIGKATAKYFFYSNIMNFFKTEITLANGEIRKRPLIETNGETGEIVWDKGRDFATVRKVLSMPQVNIVKKTEVQTGGFSKESILPKRNSDKLIARKKDWDPKKYGGFDSPTVAYSVLVVAKVEKGKSKKLKSVKELLGITIMERSSFEKNPIDFLEAKGYKEVKKDLIIKLPKYSLFELENGRKRMLASAGELQKGNELALPSKYVNFLYLASHYEKLKGSPEDNEQKQLFVEQHKHYLDEIIEQISEFSKRVILADANLDKVLSAYNKHRDKPIREQAENIIHLFTLTNLGAPAAFKYFDTTIDRKRYTSTKEVLDATLIHQSITGLYETRIDLSQLGGDGGGSSGSSGSSGSSGSSGSSGGLDDEYRLYSPLVKPDQNIQFWLEQFPQAWAETAGMGLAKQVPPQVIQLKASATPVSVRQYPLSKEAQEGIRPHVQRLIQQGILVPVQSPWNTPLLPVRKPGTNDYRPVQDLREVNKRVQDIHPTVPNPYNLLCALPPQRSWYTVLDLKDAFFCLRLHPTSQPLFAFEWRDPGTGRTGQLTWTRLPQGFKNSPTIFNEALHRDLANFRIQHPQVTLLQYVDDLLLAGATKQDCLEGTKALLLELSDLGYRASAKKAQICRREVTYLGYSLRDGQRWLTEARKKTVVQIPAPTTAKQVREFLGKAGFCRLFIPGFATLAAPLYPLTKPKGEFSWAPEHQKAFDAIKKALLSAPALALPDVTKPFTLYVDERKGVARGVLTQTLGPWRRPVAYLSKKLDPVASGWPVCLKAIAAVAILVKDADKLTLGQNITVIAPHALENIVRQPPDRWMTNARMTHYQSLLLTERVTFAPPAALNPATLLPEETDEPVTHDCHQLLIEETGVRKDLTDIPLTGEVLTWFTDGSSYVVEGKRMAGAAVVDGTRTIWASSLPEGTSAQKAELMALTQALRLAEGKSINIYTDSRYAFATAHVHGAIYKQRGWLTSAGREIKNKEEILSLLEALHLPKRLAIIHCPGHQKAKDPISRGNQMADRVAKQAAQGVNLLPAGKRTADGSEFEKRTADGSEFESPKKKAKVE

SEQ ID NO: 215 - protein, 2097 aa, synthetic construct; identical to SEQ ID NO: 46

SEQ ID NO: 216 - protein, 2092 aa, synthetic construct; identical to SEQ ID NO: 51

SEQ ID NO: 217 - protein, 2088 aa, synthetic construct
MPAAKRVKLDGGDKKYSIGLDIGTNSVGWAVITDEYKVPSKKFKVLGNTDRHSIKKNLIGALLFDSGETAEATRLKRTARRRYTRRKNRICYLQEIFSNEMAKVDDSFFHRLEESFLVEEDKKHERHPIFGNIVDEVAYHEKYPTIYHLRKKLVDSTDKADLRLIYLALAHMIKFRGHFLIEGDLNPDNSDVDKLFIQLVQTYNQLFEENPINASGVDAKAILSARLSKSRRLENLIAQLPGEKKNGLFGNLIALSLGLTPNFKSNFDLAEDAKLQLSKDTYDDDLDNLLAQIGDQYADLFLAAKNLSDAILLSDILRVNTEITKAPLSASMIKRYDEHHQDLTLLKALVRQQLPEKYKEIFFDQSKNGYAGYIDGGASQEEFYKFIKPILEKMDGTEELLVKLNREDLLRKQRTFDNGSIPHQIHLGELHAILRRQEDFYPFLKDNREKIEKILTFRIPYYVGPLARGNSRFAWMTRKSEETITPWNFEEVVDKGASAQSFIERMTNFDKNLPNEKVLPKHSLLYEYFTVYNELTKVKYVTEGMRKPAFLSGEQKKAIVDLLFKTNRKVTVKQLKEDYFKKIECFDSVEISGVEDRFNASLGTYHDLLKIIKDKDFLDNEENEDILEDIVLTLTLFEDREMIEERLKTYAHLFDDKVMKQLKRRRYTGWGRLSRKLINGIRDKQSGKTILDFLKSDGFANRNFMQLIHDDSLTFKEDIQKAQVSGQGDSLHEHIANLAGSPAIKKGILQTVKVVDELVKVMGRHKPENIVIEMARENQTTQKGQKNSRERMKRIEEGIKELGSQILKEHPVENTQLQNEKLYLYYLQNGRDMYVDQELDINRLSDYDVDHIVPQSFLKDDSIDNKVLTRSDKARGKSDNVPSEEVVKKMKNYWRQLLNAKLITQRKFDNLTKAERGGLSELDKAGFIKRQLVETRQITKHVAQILDSRMNTKYDENDKLIREVKVITLKSKLVSDFRKDFQFYKVREINNYHHAHDAYLNAVVGTALIKKYPKLESEFVYGDYKVYDVRKMIAKSEQEIGKATAKYFFYSNIMNFFKTEITLANGEIRKRPLIETNGETGEIVWDKGRDFATVRKVLSMPQVNIVKKTEVQTGGFSKESILPKRNSDKLIARKKDWDPKKYGGFDSPTVAYSVLVVAKVEKGKSKKLKSVKELLGITIMERSSFEKNPIDFLEAKGYKEVKKDLIIKLPKYSLFELENGRKRMLASAGELQKGNELALPSKYVNFLYLASHYEKLKGSPEDNEQKQLFVEQHKHYLDEIIEQISEFSKRVILADANLDKVLSAYNKHRDKPIREQAENIIHLFTLTNLGAPAAFKYFDTTIDRKRYTSTKEVLDATLIHQSITGLYETRIDLSQLGGDGGPAPGGSEAAAKGGLDDEYRLYSPLVKPDQNIQFWLEQFPQAWAETAGMGLAKQVPPQVIQLKASATPVSVRQYPLSKEAQEGIRPHVQRLIQQGILVPVQSPWNTPLLPVRKPGTNDYRPVQDLREVNKRVQDIHPTVPNPYNLLCALPPQRSWYTVLDLKDAFFCLRLHPTSQPLFAFEWRDPGTGRTGQLTWTRLPQGFKNSPTIFNEALHRDLANFRIQHPQVTLLQYVDDLLLAGATKQDCLEGTKALLLELSDLGYRASAKKAQICRREVTYLGYSLRDGQRWLTEARKKTVVQIPAPTTAKQVREFLGKAGFCRLFIPGFATLAAPLYPLTKPKGEFSWAPEHQKAFDAIKKALLSAPALALPDVTKPFTLYVDERKGVARGVLTQTLGPWRRPVAYLSKKLDPVASGWPVCLKAIAAVAILVKDADKLTLGQNITVIAPHALENIVRQPPDRWMTNARMTHYQSLLLTERVTFAPPAALNPATLLPEETDEPVTHDCHQLLIEETGVRKDLTDIPLTGEVLTWFTDGSSYVVEGKRMAGAAVVDGTRTIWASSLPEGTSAQKAELMALTQALRLAEGKSINIYTDSRYAFATAHVHGAIYKQRGWLTSAGREIKNKEEILSLLEALHLPKRLAIIHCPGHQKAKDPISRGNQMADRVAKQAAQGVNLLPAGKRTADGSEFEKRTADGSEFESPKKKAKVE

SEQ ID NO: 218 - protein, 2082 aa, synthetic construct; identical to SEQ ID NO: 70

SEQ ID NO: 219 - protein, 2085 aa, synthetic construct; identical to SEQ ID NO: 48

SEQ ID NO: 220 - protein, 2086 aa, synthetic construct
MPAAKRVKLDGGDKKYSIGLDIGTNSVGWAVITDEYKVPSKKFKVLGNTDRHSIKKNLIGALLFDSGETAEATRLKRTARRRYTRRKNRICYLQEIFSNEMAKVDDSFFHRLEESFLVEEDKKHERHPIFGNIVDEVAYHEKYPTIYHLRKKLVDSTDKADLRLIYLALAHMIKFRGHFLIEGDLNPDNSDVDKLFIQLVQTYNQLFEENPINASGVDAKAILSARLSKSRRLENLIAQLPGEKKNGLFGNLIALSLGLTPNFKSNFDLAEDAKLQLSKDTYDDDLDNLLAQIGDQYADLFLAAKNLSDAILLSDILRVNTEITKAPLSASMIKRYDEHHQDLTLLKALVRQQLPEKYKEIFFDQSKNGYAGYIDGGASQEEFYKFIKPILEKMDGTEELLVKLNREDLLRKQRTFDNGSIPHQIHLGELHAILRRQEDFYPFLKDNREKIEKILTFRIPYYVGPLARGNSRFAWMTRKSEETITPWNFEEVVDKGASAQSFIERMTNFDKNLPNEKVLPKHSLLYEYFTVYNELTKVKYVTEGMRKPAFLSGEQKKAIVDLLFKTNRKVTVKQLKEDYFKKIECFDSVEISGVEDRFNASLGTYHDLLKIIKDKDFLDNEENEDILEDIVLTLTLFEDREMIEERLKTYAHLFDDKVMKQLKRRRYTGWGRLSRKLINGIRDKQSGKTILDFLKSDGFANRNFMQLIHDDSLTFKEDIQKAQVSGQGDSLHEHIANLAGSPAIKKGILQTVKVVDELVKVMGRHKPENIVIEMARENQTTQKGQKNSRERMKRIEEGIKELGSQILKEHPVENTQLQNEKLYLYYLQNGRDMYVDQELDINRLSDYDVDHIVPQSFLKDDSIDNKVLTRSDKARGKSDNVPSEEVVKKMKNYWRQLLNAKLITQRKFDNLTKAERGGLSELDKAGFIKRQLVETRQITKHVAQILDSRMNTKYDENDKLIREVKVITLKSKLVSDFRKDFQFYKVREINNYHHAHDAYLNAVVGTALIKKYPKLESEFVYGDYKVYDVRKMIAKSEQEIGKATAKYFFYSNIMNFFKTEITLANGEIRKRPLIETNGETGEIVWDKGRDFATVRKVLSMPQVNIVKKTEVQTGGFSKESILPKRNSDKLIARKKDWDPKKYGGFDSPTVAYSVLVVAKVEKGKSKKLKSVKELLGITIMERSSFEKNPIDFLEAKGYKEVKKDLIIKLPKYSLFELENGRKRMLASAGELQKGNELALPSKYVNFLYLASHYEKLKGSPEDNEQKQLFVEQHKHYLDEIIEQISEFSKRVILADANLDKVLSAYNKHRDKPIREQAENIIHLFTLTNLGAPAAFKYFDTTIDRKRYTSTKEVLDATLIHQSITGLYETRIDLSQLGGDGGGGGPAPGSSGGLDDEYRLYSPLVKPDQNIQFWLEQFPQAWAETAGMGLAKQVPPQVIQLKASATPVSVRQYPLSKEAQEGIRPHVQRLIQQGILVPVQSPWNTPLLPVRKPGTNDYRPVQDLREVNKRVQDIHPTVPNPYNLLCALPPQRSWYTVLDLKDAFFCLRLHPTSQPLFAFEWRDPGTGRTGQLTWTRLPQGFKNSPTIFNEALHRDLANFRIQHPQVTLLQYVDDLLLAGATKQDCLEGTKALLLELSDLGYRASAKKAQICRREVTYLGYSLRDGQRWLTEARKKTVVQIPAPTTAKQVREFLGKAGFCRLFIPGFATLAAPLYPLTKPKGEFSWAPEHQKAFDAIKKALLSAPALALPDVTKPFTLYVDERKGVARGVLTQTLGPWRRPVAYLSKKLDPVASGWPVCLKAIAAVAILVKDADKLTLGQNITVIAPHALENIVRQPPDRWMTNARMTHYQSLLLTERVTFAPPAALNPATLLPEETDEPVTHDCHQLLIEETGVRKDLTDIPLTGEVLTWFTDGSSYVVEGKRMAGAAVVDGTRTIWASSLPEGTSAQKAELMALTQALRLAEGKSINIYTDSRYAFATAHVHGAIYKQRGWLTSAGREIKNKEEILSLLEALHLPKRLAIIHCPGHQKAKDPISRGNQMADRVAKQAAQGVNLLPAGKRTADGSEFEKRTADGSEFESPKKKAKVE

SEQ ID NO: 221 - protein, 2085 aa, synthetic construct
MPAAKRVKLDGGDKKYSIGLDIGTNSVGWAVITDEYKVPSKKFKVLGNTDRHSIKKNLIGALLFDSGETAEATRLKRTARRRYTRRKNRICYLQEIFSNEMAKVDDSFFHRLEESFLVEEDKKHERHPIFGNIVDEVAYHEKYPTIYHLRKKLVDSTDKADLRLIYLALAHMIKFRGHFLIEGDLNPDNSDVDKLFIQLVQTYNQLFEENPINASGVDAKAILSARLSKSRRLENLIAQLPGEKKNGLFGNLIALSLGLTPNFKSNFDLAEDAKLQLSKDTYDDDLDNLLAQIGDQYADLFLAAKNLSDAILLSDILRVNTEITKAPLSASMIKRYDEHHQDLTLLKALVRQQLPEKYKEIFFDQSKNGYAGYIDGGASQEEFYKFIKPILEKMDGTEELLVKLNREDLLRKQRTFDNGSIPHQIHLGELHAILRRQEDFYPFLKDNREKIEKILTFRIPYYVGPLARGNSRFAWMTRKSEETITPWNFEEVVDKGASAQSFIERMTNFDKNLPNEKVLPKHSLLYEYFTVYNELTKVKYVTEGMRKPAFLSGEQKKAIVDLLFKTNRKVTVKQLKEDYFKKIECFDSVEISGVEDRFNASLGTYHDLLKIIKDKDFLDNEENEDILEDIVLTLTLFEDREMIEERLKTYAHLFDDKVMKQLKRRRYTGWGRLSRKLINGIRDKQSGKTILDFLKSDGFANRNFMQLIHDDSLTFKEDIQKAQVSGQGDSLHEHIANLAGSPAIKKGILQTVKVVDELVKVMGRHKPENIVIEMARENQTTQKGQKNSRERMKRIEEGIKELGSQILKEHPVENTQLQNEKLYLYYLQNGRDMYVDQELDINRLSDYDVDHIVPQSFLKDDSIDNKVLTRSDKARGKSDNVPSEEVVKKMKNYWRQLLNAKLITQRKFDNLTKAERGGLSELDKAGFIKRQLVETRQITKHVAQILDSRMNTKYDENDKLIREVKVITLKSKLVSDFRKDFQFYKVREINNYHHAHDAYLNAVVGTALIKKYPKLESEFVYGDYKVYDVRKMIAKSEQEIGKATAKYFFYSNIMNFFKTEITLANGEIRKRPLIETNGETGEIVWDKGRDFATVRKVLSMPQVNIVKKTEVQTGGFSKESILPKRNSDKLIARKKDWDPKKYGGFDSPTVAYSVLVVAKVEKGKSKKLKSVKELLGITIMERSSFEKNPIDFLEAKGYKEVKKDLIIKLPKYSLFELENGRKRMLASAGELQKGNELALPSKYVNFLYLASHYEKLKGSPEDNEQKQLFVEQHKHYLDEIIEQISEFSKRVILADANLDKVLSAYNKHRDKPIREQAENIIHLFTLTNLGAPAAFKYFDTTIDRKRYTSTKEVLDATLIHQSITGLYETRIDLSQLGGDGGEAAAKGGSGGLDDEYRLYSPLVKPDQNIQFWLEQFPQAWAETAGMGLAKQVPPQVIQLKASATPVSVRQYPLSKEAQEGIRPHVQRLIQQGILVPVQSPWNTPLLPVRKPGTNDYRPVQDLREVNKRVQDIHPTVPNPYNLLCALPPQRSWYTVLDLKDAFFCLRLHPTSQPLFAFEWRDPGTGRTGQLTWTRLPQGFKNSPTIFNEALHRDLANFRIQHPQVTLLQYVDDLLLAGATKQDCLEGTKALLLELSDLGYRASAKKAQICRREVTYLGYSLRDGQRWLTEARKKTVVQIPAPTTAKQVREFLGKAGFCRLFIPGFATLAAPLYPLTKPKGEFSWAPEHQKAFDAIKKALLSAPALALPDVTKPFTLYVDERKGVARGVLTQTLGPWRRPVAYLSKKLDPVASGWPVCLKAIAAVAILVKDADKLTLGQNITVIAPHALENIVRQPPDRWMTNARMTHYQSLLLTERVTFAPPAALNPATLLPEETDEPVTHDCHQLLIEETGVRKDLTDIPLTGEVLTWFTDGSSYVVEGKRMAGAAVVDGTRTIWASSLPEGTSAQKAELMALTQALRLAEGKSINIYTDSRYAFATAHVHGAIYKQRGWLTSAGREIKNKEEILSLLEALHLPKRLAIIHCPGHQKAKDPISRGNQMADRVAKQAAQGVNLLPAGKRTADGSEFEKRTADGSEFESPKKKAKVE

SEQ ID NO: 222 - protein, 2083 aa, synthetic construct
MPAAKRVKLDGGDKKYSIGLDIGTNSVGWAVITDEYKVPSKKFKVLGNTDRHSIKKNLIGALLFDSGETAEATRLKRTARRRYTRRKNRICYLQEIFSNEMAKVDDSFFHRLEESFLVEEDKKHERHPIFGNIVDEVAYHEKYPTIYHLRKKLVDSTDKADLRLIYLALAHMIKFRGHFLIEGDLNPDNSDVDKLFIQLVQTYNQLFEENPINASGVDAKAILSARLSKSRRLENLIAQLPGEKKNGLFGNLIALSLGLTPNFKSNFDLAEDAKLQLSKDTYDDDLDNLLAQIGDQYADLFLAAKNLSDAILLSDILRVNTEITKAPLSASMIKRYDEHHQDLTLLKALVRQQLPEKYKEIFFDQSKNGYAGYIDGGASQEEFYKFIKPILEKMDGTEELLVKLNREDLLRKQRTFDNGSIPHQIHLGELHAILRRQEDFYPFLKDNREKIEKILTFRIPYYVGPLARGNSRFAWMTRKSEETITPWNFEEVVDKGASAQSFIERMTNFDKNLPNEKVLPKHSLLYEYFTVYNELTKVKYVTEGMRKPAFLSGEQKKAIVDLLFKTNRKVTVKQLKEDYFKKIECFDSVEISGVEDRFNASLGTYHDLLKIIKDKDFLDNEENEDILEDIVLTLTLFEDREMIEERLKTYAHLFDDKVMKQLKRRRYTGWGRLSRKLINGIRDKQSGKTILDFLKSDGFANRNFMQLIHDDSLTFKEDIQKAQVSGQGDSLHEHIANLAGSPAIKKGILQTVKVVDELVKVMGRHKPENIVIEMARENQTTQKGQKNSRERMKRIEEGIKELGSQILKEHPVENTQLQNEKLYLYYLQNGRDMYVDQELDINRLSDYDVDHIVPQSFLKDDSIDNKVLTRSDKARGKSDNVPSEEVVKKMKNYWRQLLNAKLITQRKFDNLTKAERGGLSELDKAGFIKRQLVETRQITKHVAQILDSRMNTKYDENDKLIREVKVITLKSKLVSDFRKDFQFYKVREINNYHHAHDAYLNAVVGTALIKKYPKLESEFVYGDYKVYDVRKMIAKSEQEIGKATAKYFFYSNIMNFFKTEITLANGEIRKRPLIETNGETGEIVWDKGRDFATVRKVLSMPQVNIVKKTEVQTGGFSKESILPKRNSDKLIARKKDWDPKKYGGFDSPTVAYSVLVVAKVEKGKSKKLKSVKELLGITIMERSSFEKNPIDFLEAKGYKEVKKDLIIKLPKYSLFELENGRKRMLASAGELQKGNELALPSKYVNFLYLASHYEKLKGSPEDNEQKQLFVEQHKHYLDEIIEQISEFSKRVILADANLDKVLSAYNKHRDKPIREQAENIIHLFTLTNLGAPAAFKYFDTTIDRKRYTSTKEVLDATLIHQSITGLYETRIDLSQLGGDGGGGSGGGGGLDDEYRLYSPLVKPDQNIQFWLEQFPQAWAETAGMGLAKQVPPQVIQLKASATPVSVRQYPLSKEAQEGIRPHVQRLIQQGILVPVQSPWNTPLLPVRKPGTNDYRPVQDLREVNKRVQDIHPTVPNPYNLLCALPPQRSWYTVLDLKDAFFCLRLHPTSQPLFAFEWRDPGTGRTGQLTWTRLPQGFKNSPTIFNEALHRDLANFRIQHPQVTLLQYVDDLLLAGATKQDCLEGTKALLLELSDLGYRASAKKAQICRREVTYLGYSLRDGQRWLTEARKKTVVQIPAPTTAKQVREFLGKAGFCRLFIPGFATLAAPLYPLTKPKGEFSWAPEHQKAFDAIKKALLSAPALALPDVTKPFTLYVDERKGVARGVLTQTLGPWRRPVAYLSKKLDPVASGWPVCLKAIAAVAILVKDADKLTLGQNITVIAPHALENIVRQPPDRWMTNARMTHYQSLLLTERVTFAPPAALNPATLLPEETDEPVTHDCHQLLIEETGVRKDLTDIPLTGEVLTWFTDGSSYVVEGKRMAGAAVVDGTRTIWASSLPEGTSAQKAELMALTQALRLAEGKSINIYTDSRYAFATAHVHGAIYKQRGWLTSAGREIKNKEEILSLLEALHLPKRLAIIHCPGHQKAKDPISRGNQMADRVAKQAAQGVNLLPAGKRTADGSEFEKRTADGSEFESPKKKAKVE

SEQ ID NO: 223 - protein, 2083 aa, synthetic construct; identical to SEQ ID NO: 47

SEQ ID NO: 224 - protein, 2088 aa, synthetic construct
MPAAKRVKLDGGDKKYSIGLDIGTNSVGWAVITDEYKVPSKKFKVLGNTDRHSIKKNLIGALLFDSGETAEATRLKRTARRRYTRRKNRICYLQEIFSNEMAKVDDSFFHRLEESFLVEEDKKHERHPIFGNIVDEVAYHEKYPTIYHLRKKLVDSTDKADLRLIYLALAHMIKFRGHFLIEGDLNPDNSDVDKLFIQLVQTYNQLFEENPINASGVDAKAILSARLSKSRRLENLIAQLPGEKKNGLFGNLIALSLGLTPNFKSNFDLAEDAKLQLSKDTYDDDLDNLLAQIGDQYADLFLAAKNLSDAILLSDILRVNTEITKAPLSASMIKRYDEHHQDLTLLKALVRQQLPEKYKEIFFDQSKNGYAGYIDGGASQEEFYKFIKPILEKMDGTEELLVKLNREDLLRKQRTFDNGSIPHQIHLGELHAILRRQEDFYPFLKDNREKIEKILTFRIPYYVGPLARGNSRFAWMTRKSEETITPWNFEEVVDKGASAQSFIERMTNFDKNLPNEKVLPKHSLLYEYFTVYNELTKVKYVTEGMRKPAFLSGEQKKAIVDLLFKTNRKVTVKQLKEDYFKKIECFDSVEISGVEDRFNASLGTYHDLLKIIKDKDFLDNEENEDILEDIVLTLTLFEDREMIEERLKTYAHLFDDKVMKQLKRRRYTGWGRLSRKLINGIRDKQSGKTILDFLKSDGFANRNFMQLIHDDSLTFKEDIQKAQVSGQGDSLHEHIANLAGSPAIKKGILQTVKVVDELVKVMGRHKPENIVIEMARENQTTQKGQKNSRERMKRIEEGIKELGSQILKEHPVENTQLQNEKLYLYYLQNGRDMYVDQELDINRLSDYDVDHIVPQSFLKDDSIDNKVLTRSDKARGKSDNVPSEEVVKKMKNYWRQLLNAKLITQRKFDNLTKAERGGLSELDKAGFIKRQLVETRQITKHVAQILDSRMNTKYDENDKLIREVKVITLKSKLVSDFRKDFQFYKVREINNYHHAHDAYLNAVVGTALIKKYPKLESEFVYGDYKVYDVRKMIAKSEQEIGKATAKYFFYSNIMNFFKTEITLANGEIRKRPLIETNGETGEIVWDKGRDFATVRKVLSMPQVNIVKKTEVQTGGFSKESILPKRNSDKLIARKKDWDPKKYGGFDSPTVAYSVLVVAKVEKGKSKKLKSVKELLGITIMERSSFEKNPIDFLEAKGYKEVKKDLIIKLPKYSLFELENGRKRMLASAGELQKGNELALPSKYVNFLYLASHYEKLKGSPEDNEQKQLFVEQHKHYLDEIIEQISEFSKRVILADANLDKVLSAYNKHRDKPIREQAENIIHLFTLTNLGAPAAFKYFDTTIDRKRYTSTKEVLDATLIHQSITGLYETRIDLSQLGGDGGEAAAKPAPGSSGGLDDEYRLYSPLVKPDQNIQFWLEQFPQAWAETAGMGLAKQVPPQVIQLKASATPVSVRQYPLSKEAQEGIRPHVQRLIQQGILVPVQSPWNTPLLPVRKPGTNDYRPVQDLREVNKRVQDIHPTVPNPYNLLCALPPQRSWYTVLDLKDAFFCLRLHPTSQPLFAFEWRDPGTGRTGQLTWTRLPQGFKNSPTIFNEALHRDLANFRIQHPQVTLLQYVDDLLLAGATKQDCLEGTKALLLELSDLGYRASAKKAQICRREVTYLGYSLRDGQRWLTEARKKTVVQIPAPTTAKQVREFLGKAGFCRLFIPGFATLAAPLYPLTKPKGEFSWAPEHQKAFDAIKKALLSAPALALPDVTKPFTLYVDERKGVARGVLTQTLGPWRRPVAYLSKKLDPVASGWPVCLKAIAAVAILVKDADKLTLGQNITVIAPHALENIVRQPPDRWMTNARMTHYQSLLLTERVTFAPPAALNPATLLPEETDEPVTHDCHQLLIEETGVRKDLTDIPLTGEVLTWFTDGSSYVVEGKRMAGAAVVDGTRTIWASSLPEGTSAQKAELMALTQALRLAEGKSINIYTDSRYAFATAHVHGAIYKQRGWLTSAGREIKNKEEILSLLEALHLPKRLAIIHCPGHQKAKDPISRGNQMADRVAKQAAQGVNLLPAGKRTADGSEFEKRTADGSEFESPKKKAKVE

SEQ ID NO: 225 - protein, 2088 aa, synthetic construct
MPAAKRVKLDGGDKKYSIGLDIGTNSVGWAVITDEYKVPSKKFKVLGNTDRHSIKKNLIGALLFDSGETAEATRLKRTARRRYTRRKNRICYLQEIFSNEMAKVDDSFFHRLEESFLVEEDKKHERHPIFGNIVDEVAYHEKYPTIYHLRKKLVDSTDKADLRLIYLALAHMIKFRGHFLIEGDLNPDNSDVDKLFIQLVQTYNQLFEENPINASGVDAKAILSARLSKSRRLENLIAQLPGEKKNGLFGNLIALSLGLTPNFKSNFDLAEDAKLQLSKDTYDDDLDNLLAQIGDQYADLFLAAKNLSDAILLSDILRVNTEITKAPLSASMIKRYDEHHQDLTLLKALVRQQLPEKYKEIFFDQSKNGYAGYIDGGASQEEFYKFIKPILEKMDGTEELLVKLNREDLLRKQRTFDNGSIPHQIHLGELHAILRRQEDFYPFLKDNREKIEKILTFRIPYYVGPLARGNSRFAWMTRKSEETITPWNFEEVVDKGASAQSFIERMTNFDKNLPNEKVLPKHSLLYEYFTVYNELTKVKYVTEGMRKPAFLSGEQKKAIVDLLFKTNRKVTVKQLKEDYFKKIECFDSVEISGVEDRFNASLGTYHDLLKIIKDKDFLDNEENEDILEDIVLTLTLFEDREMIEERLKTYAHLFDDKVMKQLKRRRYTGWGRLSRKLINGIRDKQSGKTILDFLKSDGFANRNFMQLIHDDSLTFKEDIQKAQVSGQGDSLHEHIANLAGSPAIKKGILQTVKVVDELVKVMGRHKPENIVIEMARENQTTQKGQKNSRERMKRIEEGIKELGSQILKEHPVENTQLQNEKLYLYYLQNGRDMYVDQELDINRLSDYDVDHIVPQSFLKDDSIDNKVLTRSDKARGKSDNVPSEEVVKKMKNYWRQLLNAKLITQRKFDNLTKAERGGLSELDKAGFIKRQLVETRQITKHVAQILDSRMNTKYDENDKLIREVKVITLKSKLVSDFRKDFQFYKVREINNYHHAHDAYLNAVVGTALIKKYPKLESEFVYGDYKVYDVRKMIAKSEQEIGKATAKYFFYSNIMNFFKTEITLANGEIRKRPLIETNGETGEIVWDKGRDFATVRKVLSMPQVNIVKKTEVQTGGFSKESILPKRNSDKLIARKKDWDPKKYGGFDSPTVAYSVLVVAKVEKGKSKKLKSVKELLGITIMERSSFEKNPIDFLEAKGYKEVKKDLIIKLPKYSLFELENGRKRMLASAGELQKGNELALPSKYVNFLYLASHYEKLKGSPEDNEQKQLFVEQHKHYLDEIIEQISEFSKRVILADANLDKVLSAYNKHRDKPIREQAENIIHLFTLTNLGAPAAFKYFDTTIDRKRYTSTKEVLDATLIHQSITGLYETRIDLSQLGGDGGPAPGSSEAAAKGGLDDEYRLYSPLVKPDQNIQFWLEQFPQAWAETAGMGLAKQVPPQVIQLKASATPVSVRQYPLSKEAQEGIRPHVQRLIQQGILVPVQSPWNTPLLPVRKPGTNDYRPVQDLREVNKRVQDIHPTVPNPYNLLCALPPQRSWYTVLDLKDAFFCLRLHPTSQPLFAFEWRDPGTGRTGQLTWTRLPQGFKNSPTIFNEALHRDLANFRIQHPQVTLLQYVDDLLLAGATKQDCLEGTKALLLELSDLGYRASAKKAQICRREVTYLGYSLRDGQRWLTEARKKTVVQIPAPTTAKQVREFLGKAGFCRLFIPGFATLAAPLYPLTKPKGEFSWAPEHQKAFDAIKKALLSAPALALPDVTKPFTLYVDERKGVARGVLTQTLGPWRRPVAYLSKKLDPVASGWPVCLKAIAAVAILVKDADKLTLGQNITVIAPHALENIVRQPPDRWMTNARMTHYQSLLLTERVTFAPPAALNPATLLPEETDEPVTHDCHQLLIEETGVRKDLTDIPLTGEVLTWFTDGSSYVVEGKRMAGAAVVDGTRTIWASSLPEGTSAQKAELMALTQALRLAEGKSINIYTDSRYAFATAHVHGAIYKQRGWLTSAGREIKNKEEILSLLEALHLPKRLAIIHCPGHQKAKDPISRGNQMADRVAKQAAQGVNLLPAGKRTADGSEFEKRTADGSEFESPKKKAKVE

SEQ ID NO: 226 - protein, 2086 aa, synthetic construct
MPAAKRVKLDGGDKKYSIGLDIGTNSVGWAVITDEYKVPSKKFKVLGNTDRHSIKKNLIGALLFDSGETAEATRLKRTARRRYTRRKNRICYLQEIFSNEMAKVDDSFFHRLEESFLVEEDKKHERHPIFGNIVDEVAYHEKYPTIYHLRKKLVDSTDKADLRLIYLALAHMIKFRGHFLIEGDLNPDNSDVDKLFIQLVQTYNQLFEENPINASGVDAKAILSARLSKSRRLENLIAQLPGEKKNGLFGNLIALSLGLTPNFKSNFDLAEDAKLQLSKDTYDDDLDNLLAQIGDQYADLFLAAKNLSDAILLSDILRVNTEITKAPLSASMIKRYDEHHQDLTLLKALVRQQLPEKYKEIFFDQSKNGYAGYIDGGASQEEFYKFIKPILEKMDGTEELLVKLNREDLLRKQRTFDNGSIPHQIHLGELHAILRRQEDFYPFLKDNREKIEKILTFRIPYYVGPLARGNSRFAWMTRKSEETITPWNFEEVVDKGASAQSFIERMTNFDKNLPNEKVLPKHSLLYEYFTVYNELTKVKYVTEGMRKPAFLSGEQKKAIVDLLFKTNRKVTVKQLKEDYFKKIECFDSVEISGVEDRFNASLGTYHDLLKIIKDKDFLDNEENEDILEDIVLTLTLFEDREMIEERLKTYAHLFDDKVMKQLKRRRYTGWGRLSRKLINGIRDKQSGKTILDFLKSDGFANRNFMQLIHDDSLTFKEDIQKAQVSGQGDSLHEHIANLAGSPAIKKGILQTVKVVDELVKVMGRHKPENIVIEMARENQTTQKGQKNSRERMKRIEEGIKELGSQILKEHPVENTQLQNEKLYLYYLQNGRDMYVDQELDINRLSDYDVDHIVPQSFLKDDSIDNKVLTRSDKARGKSDNVPSEEVVKKMKNYWRQLLNAKLITQRKFDNLTKAERGGLSELDKAGFIKRQLVETRQITKHVAQILDSRMNTKYDENDKLIREVKVITLKSKLVSDFRKDFQFYKVREINNYHHAHDAYLNAVVGTALIKKYPKLESEFVYGDYKVYDVRKMIAKSEQEIGKATAKYFFYSNIMNFFKTEITLANGEIRKRPLIETNGETGEIVWDKGRDFATVRKVLSMPQVNIVKKTEVQTGGFSKESILPKRNSDKLIARKKDWDPKKYGGFDSPTVAYSVLVVAKVEKGKSKKLKSVKELLGITIMERSSFEKNPIDFLEAKGYKEVKKDLIIKLPKYSLFELENGRKRMLASAGELQKGNELALPSKYVNFLYLASHYEKLKGSPEDNEQKQLFVEQHKHYLDEIIEQISEFSKRVILADANLDKVLSAYNKHRDKPIREQAENIIHLFTLTNLGAPAAFKYFDTTIDRKRYTSTKEVLDATLIHQSITGLYETRIDLSQLGGDGGGGSGGSGGSGGLDDEYRLYSPLVKPDQNIQFWLEQFPQAWAETAGMGLAKQVPPQVIQLKASATPVSVRQYPLSKEAQEGIRPHVQRLIQQGILVPVQSPWNTPLLPVRKPGTNDYRPVQDLREVNKRVQDIHPTVPNPYNLLCALPPQRSWYTVLDLKDAFFCLRLHPTSQPLFAFEWRDPGTGRTGQLTWTRLPQGFKNSPTIFNEALHRDLANFRIQHPQVTLLQYVDDLLLAGATKQDCLEGTKALLLELSDLGYRASAKKAQICRREVTYLGYSLRDGQRWLTEARKKTVVQIPAPTTAKQVREFLGKAGFCRLFIPGFATLAAPLYPLTKPKGEFSWAPEHQKAFDAIKKALLSAPALALPDVTKPFTLYVDERKGVARGVLTQTLGPWRRPVAYLSKKLDPVASGWPVCLKAIAAVAILVKDADKLTLGQNITVIAPHALENIVRQPPDRWMTNARMTHYQSLLLTERVTFAPPAALNPATLLPEETDEPVTHDCHQLLIEETGVRKDLTDIPLTGEVLTWFTDGSSYVVEGKRMAGAAVVDGTRTIWASSLPEGTSAQKAELMALTQALRLAEGKSINIYTDSRYAFATAHVHGAIYKQRGWLTSAGREIKNKEEILSLLEALHLPKRLAIIHCPGHQKAKDPISRGNQMADRVAKQAAQGVNLLPAGKRTADGSEFEKRTADGSEFESPKKKAKVE

SEQ ID NO: 227 - protein, 2083 aa, synthetic construct; identical to SEQ ID NO: 78

SEQ ID NO: 228 - protein, 2089 aa, synthetic construct; identical to SEQ ID NO: 41

SEQ ID NO: 229 - protein, 2088 aa, synthetic construct; identical to SEQ ID NO: 65

SEQ ID NO: 230 - protein, 2088 aa, synthetic construct; identical to SEQ ID NO: 80

SEQ ID NO: 231 - protein, 2088 aa, synthetic construct
MPAAKRVKLDGGDKKYSIGLDIGTNSVGWAVITDEYKVPSKKFKVLGNTDRHSIKKNLIGALLFDSGETAEATRLKRTARRRYTRRKNRICYLQEIFSNEMAKVDDSFFHRLEESFLVEEDKKHERHPIFGNIVDEVAYHEKYPTIYHLRKKLVDSTDKADLRLIYLALAHMIKFRGHFLIEGDLNPDNSDVDKLFIQLVQTYNQLFEENPINASGVDAKAILSARLSKSRRLENLIAQLPGEKKNGLFGNLIALSLGLTPNFKSNFDLAEDAKLQLSKDTYDDDLDNLLAQIGDQYADLFLAAKNLSDAILLSDILRVNTEITKAPLSASMIKRYDEHHQDLTLLKALVRQQLPEKYKEIFFDQSKNGYAGYIDGGASQEEFYKFIKPILEKMDGTEELLVKLNREDLLRKQRTFDNGSIPHQIHLGELHAILRRQEDFYPFLKDNREKIEKILTFRIPYYVGPLARGNSRFAWMTRKSEETITPWNFEEVVDKGASAQSFIERMTNFDKNLPNEKVLPKHSLLYEYFTVYNELTKVKYVTEGMRKPAFLSGEQKKAIVDLLFKTNRKVTVKQLKEDYFKKIECFDSVEISGVEDRFNASLGTYHDLLKIIKDKDFLDNEENEDILEDIVLTLTLFEDREMIEERLKTYAHLFDDKVMKQLKRRRYTGWGRLSRKLINGIRDKQSGKTILDFLKSDGFANRNFMQLIHDDSLTFKEDIQKAQVSGQGDSLHEHIANLAGSPAIKKGILQTVKVVDELVKVMGRHKPENIVIEMARENQTTQKGQKNSRERMKRIEEGIKELGSQILKEHPVENTQLQNEKLYLYYLQNGRDMYVDQELDINRLSDYDVDHIVPQSFLKDDSIDNKVLTRSDKARGKSDNVPSEEVVKKMKNYWRQLLNAKLITQRKFDNLTKAERGGLSELDKAGFIKRQLVETRQITKHVAQILDSRMNTKYDENDKLIREVKVITLKSKLVSDFRKDFQFYKVREINNYHHAHDAYLNAVVGTALIKKYPKLESEFVYGDYKVYDVRKMIAKSEQEIGKATAKYFFYSNIMNFFKTEITLANGEIRKRPLIETNGETGEIVWDKGRDFATVRKVLSMPQVNIVKKTEVQTGGFSKESILPKRNSDKLIARKKDWDPKKYGGFDSPTVAYSVLVVAKVEKGKSKKLKSVKELLGITIMERSSFEKNPIDFLEAKGYKEVKKDLIIKLPKYSLFELENGRKRMLASAGELQKGNELALPSKYVNFLYLASHYEKLKGSPEDNEQKQLFVEQHKHYLDEIIEQISEFSKRVILADANLDKVLSAYNKHRDKPIREQAENIIHLFTLTNLGAPAAFKYFDTTIDRKRYTSTKEVLDATLIHQSITGLYETRIDLSQLGGDGGEAAAKGGGGGSGGLDDEYRLYSPLVKPDQNIQFWLEQFPQAWAETAGMGLAKQVPPQVIQLKASATPVSVRQYPLSKEAQEGIRPHVQRLIQQGILVPVQSPWNTPLLPVRKPGTNDYRPVQDLREVNKRVQDIHPTVPNPYNLLCALPPQRSWYTVLDLKDAFFCLRLHPTSQPLFAFEWRDPGTGRTGQLTWTRLPQGFKNSPTIFNEALHRDLANFRIQHPQVTLLQYVDDLLLAGATKQDCLEGTKALLLELSDLGYRASAKKAQICRREVTYLGYSLRDGQRWLTEARKKTVVQIPAPTTAKQVREFLGKAGFCRLFIPGFATLAAPLYPLTKPKGEFSWAPEHQKAFDAIKKALLSAPALALPDVTKPFTLYVDERKGVARGVLTQTLGPWRRPVAYLSKKLDPVASGWPVCLKAIAAVAILVKDADKLTLGQNITVIAPHALENIVRQPPDRWMTNARMTHYQSLLLTERVTFAPPAALNPATLLPEETDEPVTHDCHQLLIEETGVRKDLTDIPLTGEVLTWFTDGSSYVVEGKRMAGAAVVDGTRTIWASSLPEGTSAQKAELMALTQALRLAEGKSINIYTDSRYAFATAHVHGAIYKQRGWLTSAGREIKNKEEILSLLEALHLPKRLAIIHCPGHQKAKDPISRGNQMADRVAKQAAQGVNLLPAGKRTADGSEFEKRTADGSEFESPKKKAKVE

SEQ ID NO: 232 - protein, 2102 aa, synthetic construct; identical to SEQ ID NO: 39

SEQ ID NO: 233 - protein, 2085 aa, synthetic construct
MPAAKRVKLDGGDKKYSIGLDIGTNSVGWAVITDEYKVPSKKFKVLGNTDRHSIKKNLIGALLFDSGETAEATRLKRTARRRYTRRKNRICYLQEIFSNEMAKVDDSFFHRLEESFLVEEDKKHERHPIFGNIVDEVAYHEKYPTIYHLRKKLVDSTDKADLRLIYLALAHMIKFRGHFLIEGDLNPDNSDVDKLFIQLVQTYNQLFEENPINASGVDAKAILSARLSKSRRLENLIAQLPGEKKNGLFGNLIALSLGLTPNFKSNFDLAEDAKLQLSKDTYDDDLDNLLAQIGDQYADLFLAAKNLSDAILLSDILRVNTEITKAPLSASMIKRYDEHHQDLTLLKALVRQQLPEKYKEIFFDQSKNGYAGYIDGGASQEEFYKFIKPILEKMDGTEELLVKLNREDLLRKQRTFDNGSIPHQIHLGELHAILRRQEDFYPFLKDNREKIEKILTFRIPYYVGPLARGNSRFAWMTRKSEETITPWNFEEVVDKGASAQSFIERMTNFDKNLPNEKVLPKHSLLYEYFTVYNELTKVKYVTEGMRKPAFLSGEQKKAIVDLLFKTNRKVTVKQLKEDYFKKIECFDSVEISGVEDRFNASLGTYHDLLKIIKDKDFLDNEENEDILEDIVLTLTLFEDREMIEERLKTYAHLFDDKVMKQLKRRRYTGWGRLSRKLINGIRDKQSGKTILDFLKSDGFANRNFMQLIHDDSLTFKEDIQKAQVSGQGDSLHEHIANLAGSPAIKKGILQTVKVVDELVKVMGRHKPENIVIEMARENQTTQKGQKNSRERMKRIEEGIKELGSQILKEHPVENTQLQNEKLYLYYLQNGRDMYVDQELDINRLSDYDVDHIVPQSFLKDDSIDNKVLTRSDKARGKSDNVPSEEVVKKMKNYWRQLLNAKLITQRKFDNLTKAERGGLSELDKAGFIKRQLVETRQITKHVAQILDSRMNTKYDENDKLIREVKVITLKSKLVSDFRKDFQFYKVREINNYHHAHDAYLNAVVGTALIKKYPKLESEFVYGDYKVYDVRKMIAKSEQEIGKATAKYFFYSNIMNFFKTEITLANGEIRKRPLIETNGETGEIVWDKGRDFATVRKVLSMPQVNIVKKTEVQTGGFSKESILPKRNSDKLIARKKDWDPKKYGGFDSPTVAYSVLVVAKVEKGKSKKLKSVKELLGITIMERSSFEKNPIDFLEAKGYKEVKKDLIIKLPKYSLFELENGRKRMLASAGELQKGNELALPSKYVNFLYLASHYEKLKGSPEDNEQKQLFVEQHKHYLDEIIEQISEFSKRVILADANLDKVLSAYNKHRDKPIREQAENIIHLFTLTNLGAPAAFKYFDTTIDRKRYTSTKEVLDATLIHQSITGLYETRIDLSQLGGDGGEAAAKPAPGGLDDEYRLYSPLVKPDQNIQFWLEQFPQAWAETAGMGLAKQVPPQVIQLKASATPVSVRQYPLSKEAQEGIRPHVQRLIQQGILVPVQSPWNTPLLPVRKPGTNDYRPVQDLREVNKRVQDIHPTVPNPYNLLCALPPQRSWYTVLDLKDAFFCLRLHPTSQPLFAFEWRDPGTGRTGQLTWTRLPQGFKNSPTIFNEALHRDLANFRIQHPQVTLLQYVDDLLLAGATKQDCLEGTKALLLELSDLGYRASAKKAQICRREVTYLGYSLRDGQRWLTEARKKTVVQIPAPTTAKQVREFLGKAGFCRLFIPGFATLAAPLYPLTKPKGEFSWAPEHQKAFDAIKKALLSAPALALPDVTKPFTLYVDERKGVARGVLTQTLGPWRRPVAYLSKKLDPVASGWPVCLKAIAAVAILVKDADKLTLGQNITVIAPHALENIVRQPPDRWMTNARMTHYQSLLLTERVTFAPPAALNPATLLPEETDEPVTHDCHQLLIEETGVRKDLTDIPLTGEVLTWFTDGSSYVVEGKRMAGAAVVDGTRTIWASSLPEGTSAQKAELMALTQALRLAEGKSINIYTDSRYAFATAHVHGAIYKQRGWLTSAGREIKNKEEILSLLEALHLPKRLAIIHCPGHQKAKDPISRGNQMADRVAKQAAQGVNLLPAGKRTADGSEFEKRTADGSEFESPKKKAKVE

SEQ ID NO: 234 - protein, 2092 aa, synthetic construct; identical to SEQ ID NO: 56

SEQ ID NO: 235 - protein, 2083 aa, synthetic construct
MPAAKRVKLDGGDKKYSIGLDIGTNSVGWAVITDEYKVPSKKFKVLGNTDRHSIKKNLIGALLFDSGETAEATRLKRTARRRYTRRKNRICYLQEIFSNEMAKVDDSFFHRLEESFLVEEDKKHERHPIFGNIVDEVAYHEKYPTIYHLRKKLVDSTDKADLRLIYLALAHMIKFRGHFLIEGDLNPDNSDVDKLFIQLVQTYNQLFEENPINASGVDAKAILSARLSKSRRLENLIAQLPGEKKNGLFGNLIALSLGLTPNFKSNFDLAEDAKLQLSKDTYDDDLDNLLAQIGDQYADLFLAAKNLSDAILLSDILRVNTEITKAPLSASMIKRYDEHHQDLTLLKALVRQQLPEKYKEIFFDQSKNGYAGYIDGGASQEEFYKFIKPILEKMDGTEELLVKLNREDLLRKQRTFDNGSIPHQIHLGELHAILRRQEDFYPFLKDNREKIEKILTFRIPYYVGPLARGNSRFAWMTRKSEETITPWNFEEVVDKGASAQSFIERMTNFDKNLPNEKVLPKHSLLYEYFTVYNELTKVKYVTEGMRKPAFLSGEQKKAIVDLLFKTNRKVTVKQLKEDYFKKIECFDSVEISGVEDRFNASLGTYHDLLKIIKDKDFLDNEENEDILEDIVLTLTLFEDREMIEERLKTYAHLFDDKVMKQLKRRRYTGWGRLSRKLINGIRDKQSGKTILDFLKSDGFANRNFMQLIHDDSLTFKEDIQKAQVSGQGDSLHEHIANLAGSPAIKKGILQTVKVVDELVKVMGRHKPENIVIEMARENQTTQKGQKNSRERMKRIEEGIKELGSQILKEHPVENTQLQNEKLYLYYLQNGRDMYVDQELDINRLSDYDVDHIVPQSFLKDDSIDNKVLTRSDKARGKSDNVPSEEVVKKMKNYWRQLLNAKLITQRKFDNLTKAERGGLSELDKAGFIKRQLVETRQITKHVAQILDSRMNTKYDENDKLIREVKVITLKSKLVSDFRKDFQFYKVREINNYHHAHDAYLNAVVGTALIKKYPKLESEFVYGDYKVYDVRKMIAKSEQEIGKATAKYFFYSNIMNFFKTEITLANGEIRKRPLIETNGETGEIVWDKGRDFATVRKVLSMPQVNIVKKTEVQTGGFSKESILPKRNSDKLIARKKDWDPKKYGGFDSPTVAYSVLVVAKVEKGKSKKLKSVKELLGITIMERSSFEKNPIDFLEAKGYKEVKKDLIIKLPKYSLFELENGRKRMLASAGELQKGNELALPSKYVNFLYLASHYEKLKGSPEDNEQKQLFVEQHKHYLDEIIEQISEFSKRVILADANLDKVLSAYNKHRDKPIREQAENIIHLFTLTNLGAPAAFKYFDTTIDRKRYTSTKEVLDATLIHQSITGLYETRIDLSQLGGDGGGSSGSSGGLDDEYRLYSPLVKPDQNIQFWLEQFPQAWAETAGMGLAKQVPPQVIQLKASATPVSVRQYPLSKEAQEGIRPHVQRLIQQGILVPVQSPWNTPLLPVRKPGTNDYRPVQDLREVNKRVQDIHPTVPNPYNLLCALPPQRSWYTVLDLKDAFFCLRLHPTSQPLFAFEWRDPGTGRTGQLTWTRLPQGFKNSPTIFNEALHRDLANFRIQHPQVTLLQYVDDLLLAGATKQDCLEGTKALLLELSDLGYRASAKKAQICRREVTYLGYSLRDGQRWLTEARKKTVVQIPAPTTAKQVREFLGKAGFCRLFIPGFATLAAPLYPLTKPKGEFSWAPEHQKAFDAIKKALLSAPALALPDVTKPFTLYVDERKGVARGVLTQTLGPWRRPVAYLSKKLDPVASGWPVCLKAIAAVAILVKDADKLTLGQNITVIAPHALENIVRQPPDRWMTNARMTHYQSLLLTERVTFAPPAALNPATLLPEETDEPVTHDCHQLLIEETGVRKDLTDIPLTGEVLTWFTDGSSYVVEGKRMAGAAVVDGTRTIWASSLPEGTSAQKAELMALTQALRLAEGKSINIYTDSRYAFATAHVHGAIYKQRGWLTSAGREIKNKEEILSLLEALHLPKRLAIIHCPGHQKAKDPISRGNQMADRVAKQAAQGVNLLPAGKRTADGSEFEKRTADGSEFESPKKKAKVE

SEQ ID NO: 236 - protein, 2089 aa, synthetic construct; identical to SEQ ID NO: 67

SEQ ID NO: 237 - protein, 2085 aa, synthetic construct
MPAAKRVKLDGGDKKYSIGLDIGTNSVGWAVITDEYKVPSKKFKVLGNTDRHSIKKNLIGALLFDSGETAEATRLKRTARRRYTRRKNRICYLQEIFSNEMAKVDDSFFHRLEESFLVEEDKKHERHPIFGNIVDEVAYHEKYPTIYHLRKKLVDSTDKADLRLIYLALAHMIKFRGHFLIEGDLNPDNSDVDKLFIQLVQTYNQLFEENPINASGVDAKAILSARLSKSRRLENLIAQLPGEKKNGLFGNLIALSLGLTPNFKSNFDLAEDAKLQLSKDTYDDDLDNLLAQIGDQYADLFLAAKNLSDAILLSDILRVNTEITKAPLSASMIKRYDEHHQDLTLLKALVRQQLPEKYKEIFFDQSKNGYAGYIDGGASQEEFYKFIKPILEKMDGTEELLVKLNREDLLRKQRTFDNGSIPHQIHLGELHAILRRQEDFYPFLKDNREKIEKILTFRIPYYVGPLARGNSRFAWMTRKSEETITPWNFEEVVDKGASAQSFIERMTNFDKNLPNEKVLPKHSLLYEYFTVYNELTKVKYVTEGMRKPAFLSGEQKKAIVDLLFKTNRKVTVKQLKEDYFKKIECFDSVEISGVEDRFNASLGTYHDLLKIIKDKDFLDNEENEDILEDIVLTLTLFEDREMIEERLKTYAHLFDDKVMKQLKRRRYTGWGRLSRKLINGIRDKQSGKTILDFLKSDGFANRNFMQLIHDDSLTFKEDIQKAQVSGQGDSLHEHIANLAGSPAIKKGILQTVKVVDELVKVMGRHKPENIVIEMARENQTTQKGQKNSRERMKRIEEGIKELGSQILKEHPVENTQLQNEKLYLYYLQNGRDMYVDQELDINRLSDYDVDHIVPQSFLKDDSIDNKVLTRSDKARGKSDNVPSEEVVKKMKNYWRQLLNAKLITQRKFDNLTKAERGGLSELDKAGFIKRQLVETRQITKHVAQILDSRMNTKYDENDKLIREVKVITLKSKLVSDFRKDFQFYKVREINNYHHAHDAYLNAVVGTALIKKYPKLESEFVYGDYKVYDVRKMIAKSEQEIGKATAKYFFYSNIMNFFKTEITLANGEIRKRPLIETNGETGEIVWDKGRDFATVRKVLSMPQVNIVKKTEVQTGGFSKESILPKRNSDKLIARKKDWDPKKYGGFDSPTVAYSVLVVAKVEKGKSKKLKSVKELLGITIMERSSFEKNPIDFLEAKGYKEVKKDLIIKLPKYSLFELENGRKRMLASAGELQKGNELALPSKYVNFLYLASHYEKLKGSPEDNEQKQLFVEQHKHYLDEIIEQISEFSKRVILADANLDKVLSAYNKHRDKPIREQAENIIHLFTLTNLGAPAAFKYFDTTIDRKRYTSTKEVLDATLIHQSITGLYETRIDLSQLGGDGGGSSEAAAKGGLDDEYRLYSPLVKPDQNIQFWLEQFPQAWAETAGMGLAKQVPPQVIQLKASATPVSVRQYPLSKEAQEGIRPHVQRLIQQGILVPVQSPWNTPLLPVRKPGTNDYRPVQDLREVNKRVQDIHPTVPNPYNLLCALPPQRSWYTVLDLKDAFFCLRLHPTSQPLFAFEWRDPGTGRTGQLTWTRLPQGFKNSPTIFNEALHRDLANFRIQHPQVTLLQYVDDLLLAGATKQDCLEGTKALLLELSDLGYRASAKKAQICRREVTYLGYSLRDGQRWLTEARKKTVVQIPAPTTAKQVREFLGKAGFCRLFIPGFATLAAPLYPLTKPKGEFSWAPEHQKAFDAIKKALLSAPALALPDVTKPFTLYVDERKGVARGVLTQTLGPWRRPVAYLSKKLDPVASGWPVCLKAIAAVAILVKDADKLTLGQNITVIAPHALENIVRQPPDRWMTNARMTHYQSLLLTERVTFAPPAALNPATLLPEETDEPVTHDCHQLLIEETGVRKDLTDIPLTGEVLTWFTDGSSYVVEGKRMAGAAVVDGTRTIWASSLPEGTSAQKAELMALTQALRLAEGKSINIYTDSRYAFATAHVHGAIYKQRGWLTSAGREIKNKEEILSLLEALHLPKRLAIIHCPGHQKAKDPISRGNQMADRVAKQAAQGVNLLPAGKRTADGSEFEKRTADGSEFESPKKKAKVE

SEQ ID NO: 238 - protein, 2092 aa, synthetic construct; identical to SEQ ID NO: 52

SEQ ID NO: 239 - protein, 2088 aa, synthetic construct; identical to SEQ ID NO: 49

SEQ ID NO: 240 - protein, 2088 aa, synthetic construct
MPAAKRVKLDGGDKKYSIGLDIGTNSVGWAVITDEYKVPSKKFKVLGNTDRHSIKKNLIGALLFDSGETAEATRLKRTARRRYTRRKNRICYLQEIFSNEMAKVDDSFFHRLEESFLVEEDKKHERHPIFGNIVDEVAYHEKYPTIYHLRKKLVDSTDKADLRLIYLALAHMIKFRGHFLIEGDLNPDNSDVDKLFIQLVQTYNQLFEENPINASGVDAKAILSARLSKSRRLENLIAQLPGEKKNGLFGNLIALSLGLTPNFKSNFDLAEDAKLQLSKDTYDDDLDNLLAQIGDQYADLFLAAKNLSDAILLSDILRVNTEITKAPLSASMIKRYDEHHQDLTLLKALVRQQLPEKYKEIFFDQSKNGYAGYIDGGASQEEFYKFIKPILEKMDGTEELLVKLNREDLLRKQRTFDNGSIPHQIHLGELHAILRRQEDFYPFLKDNREKIEKILTFRIPYYVGPLARGNSRFAWMTRKSEETITPWNFEEVVDKGASAQSFIERMTNFDKNLPNEKVLPKHSLLYEYFTVYNELTKVKYVTEGMRKPAFLSGEQKKAIVDLLFKTNRKVTVKQLKEDYFKKIECFDSVEISGVEDRFNASLGTYHDLLKIIKDKDFLDNEENEDILEDIVLTLTLFEDREMIEERLKTYAHLFDDKVMKQLKRRRYTGWGRLSRKLINGIRDKQSGKTILDFLKSDGFANRNFMQLIHDDSLTFKEDIQKAQVSGQGDSLHEHIANLAGSPAIKKGILQTVKVVDELVKVMGRHKPENIVIEMARENQTTQKGQKNSRERMKRIEEGIKELGSQILKEHPVENTQLQNEKLYLYYLQNGRDMYVDQELDINRLSDYDVDHIVPQSFLKDDSIDNKVLTRSDKARGKSDNVPSEEVVKKMKNYWRQLLNAKLITQRKFDNLTKAERGGLSELDKAGFIKRQLVETRQITKHVAQILDSRMNTKYDENDKLIREVKVITLKSKLVSDFRKDFQFYKVREINNYHHAHDAYLNAVVGTALIKKYPKLESEFVYGDYKVYDVRKMIAKSEQEIGKATAKYFFYSNIMNFFKTEITLANGEIRKRPLIETNGETGEIVWDKGRDFATVRKVLSMPQVNIVKKTEVQTGGFSKESILPKRNSDKLIARKKDWDPKKYGGFDSPTVAYSVLVVAKVEKGKSKKLKSVKELLGITIMERSSFEKNPIDFLEAKGYKEVKKDLIIKLPKYSLFELENGRKRMLASAGELQKGNELALPSKYVNFLYLASHYEKLKGSPEDNEQKQLFVEQHKHYLDEIIEQISEFSKRVILADANLDKVLSAYNKHRDKPIREQAENIIHLFTLTNLGAPAAFKYFDTTIDRKRYTSTKEVLDATLIHQSITGLYETRIDLSQLGGDGGGGGEAAAKGSSGGLDDEYRLYSPLVKPDQNIQFWLEQFPQAWAETAGMGLAKQVPPQVIQLKASATPVSVRQYPLSKEAQEGIRPHVQRLIQQGILVPVQSPWNTPLLPVRKPGTNDYRPVQDLREVNKRVQDIHPTVPNPYNLLCALPPQRSWYTVLDLKDAFFCLRLHPTSQPLFAFEWRDPGTGRTGQLTWTRLPQGFKNSPTIFNEALHRDLANFRIQHPQVTLLQYVDDLLLAGATKQDCLEGTKALLLELSDLGYRASAKKAQICRREVTYLGYSLRDGQRWLTEARKKTVVQIPAPTTAKQVREFLGKAGFCRLFIPGFATLAAPLYPLTKPKGEFSWAPEHQKAFDAIKKALLSAPALALPDVTKPFTLYVDERKGVARGVLTQTLGPWRRPVAYLSKKLDPVASGWPVCLKAIAAVAILVKDADKLTLGQNITVIAPHALENIVRQPPDRWMTNARMTHYQSLLLTERVTFAPPAALNPATLLPEETDEPVTHDCHQLLIEETGVRKDLTDIPLTGEVLTWFTDGSSYVVEGKRMAGAAVVDGTRTIWASSLPEGTSAQKAELMALTQALRLAEGKSINIYTDSRYAFATAHVHGAIYKQRGWLTSAGREIKNKEEILSLLEALHLPKRLAIIHCPGHQKAKDPISRGNQMADRVAKQAAQGVNLLPAGKRTADGSEFEKRTADGSEFESPKKKAKVE

SEQ ID NO: 241 - protein, 2086 aa, synthetic construct
MPAAKRVKLDGGDKKYSIGLDIGTNSVGWAVITDEYKVPSKKFKVLGNTDRHSIKKNLIGALLFDSGETAEATRLKRTARRRYTRRKNRICYLQEIFSNEMAKVDDSFFHRLEESFLVEEDKKHERHPIFGNIVDEVAYHEKYPTIYHLRKKLVDSTDKADLRLIYLALAHMIKFRGHFLIEGDLNPDNSDVDKLFIQLVQTYNQLFEENPINASGVDAKAILSARLSKSRRLENLIAQLPGEKKNGLFGNLIALSLGLTPNFKSNFDLAEDAKLQLSKDTYDDDLDNLLAQIGDQYADLFLAAKNLSDAILLSDILRVNTEITKAPLSASMIKRYDEHHQDLTLLKALVRQQLPEKYKEIFFDQSKNGYAGYIDGGASQEEFYKFIKPILEKMDGTEELLVKLNREDLLRKQRTFDNGSIPHQIHLGELHAILRRQEDFYPFLKDNREKIEKILTFRIPYYVGPLARGNSRFAWMTRKSEETITPWNFEEVVDKGASAQSFIERMTNFDKNLPNEKVLPKHSLLYEYFTVYNELTKVKYVTEGMRKPAFLSGEQKKAIVDLLFKTNRKVTVKQLKEDYFKKIECFDSVEISGVEDRFNASLGTYHDLLKIIKDKDFLDNEENEDILEDIVLTLTLFEDREMIEERLKTYAHLFDDKVMKQLKRRRYTGWGRLSRKLINGIRDKQSGKTILDFLKSDGFANRNFMQLIHDDSLTFKEDIQKAQVSGQGDSLHEHIANLAGSPAIKKGILQTVKVVDELVKVMGRHKPENIVIEMARENQTTQKGQKNSRERMKRIEEGIKELGSQILKEHPVENTQLQNEKLYLYYLQNGRDMYVDQELDINRLSDYDVDHIVPQSFLKDDSIDNKVLTRSDKARGKSDNVPSEEVVKKMKNYWRQLLNAKLITQRKFDNLTKAERGGLSELDKAGFIKRQLVETRQITKHVAQILDSRMNTKYDENDKLIREVKVITLKSKLVSDFRKDFQFYKVREINNYHHAHDAYLNAVVGTALIKKYPKLESEFVYGDYKVYDVRKMIAKSEQEIGKATAKYFFYSNIMNFFKTEITLANGEIRKRPLIETNGETGEIVWDKGRDFATVRKVLSMPQVNIVKKTEVQTGGFSKESILPKRNSDKLIARKKDWDPKKYGGFDSPTVAYSVLVVAKVEKGKSKKLKSVKELLGITIMERSSFEKNPIDFLEAKGYKEVKKDLIIKLPKYSLFELENGRKRMLASAGELQKGNELALPSKYVNFLYLASHYEKLKGSPEDNEQKQLFVEQHKHYLDEIIEQISEFSKRVILADANLDKVLSAYNKHRDKPIREQAENIIHLFTLTNLGAPAAFKYFDTTIDRKRYTSTKEVLDATLIHQSITGLYETRIDLSQLGGDGGGGSGSSGGGGGLDDEYRLYSPLVKPDQNIQFWLEQFPQAWAETAGMGLAKQVPPQVIQLKASATPVSVRQYPLSKEAQEGIRPHVQRLIQQGILVPVQSPWNTPLLPVRKPGTNDYRPVQDLREVNKRVQDIHPTVPNPYNLLCALPPQRSWYTVLDLKDAFFCLRLHPTSQPLFAFEWRDPGTGRTGQLTWTRLPQGFKNSPTIFNEALHRDLANFRIQHPQVTLLQYVDDLLLAGATKQDCLEGTKALLLELSDLGYRASAKKAQICRREVTYLGYSLRDGQRWLTEARKKTVVQIPAPTTAKQVREFLGKAGFCRLFIPGFATLAAPLYPLTKPKGEFSWAPEHQKAFDAIKKALLSAPALALPDVTKPFTLYVDERKGVARGVLTQTLGPWRRPVAYLSKKLDPVASGWPVCLKAIAAVAILVKDADKLTLGQNITVIAPHALENIVRQPPDRWMTNARMTHYQSLLLTERVTFAPPAALNPATLLPEETDEPVTHDCHQLLIEETGVRKDLTDIPLTGEVLTWFTDGSSYVVEGKRMAGAAVVDGTRTIWASSLPEGTSAQKAELMALTQALRLAEGKSINIYTDSRYAFATAHVHGAIYKQRGWLTSAGREIKNKEEILSLLEALHLPKRLAIIHCPGHQKAKDPISRGNQMADRVAKQAAQGVNLLPAGKRTADGSEFEKRTADGSEFESPKKKAKVE

SEQ ID NO: 242 - protein, 2088 aa, synthetic construct
MPAAKRVKLDGGDKKYSIGLDIGTNSVGWAVITDEYKVPSKKFKVLGNTDRHSIKKNLIGALLFDSGETAEATRLKRTARRRYTRRKNRICYLQEIFSNEMAKVDDSFFHRLEESFLVEEDKKHERHPIFGNIVDEVAYHEKYPTIYHLRKKLVDSTDKADLRLIYLALAHMIKFRGHFLIEGDLNPDNSDVDKLFIQLVQTYNQLFEENPINASGVDAKAILSARLSKSRRLENLIAQLPGEKKNGLFGNLIALSLGLTPNFKSNFDLAEDAKLQLSKDTYDDDLDNLLAQIGDQYADLFLAAKNLSDAILLSDILRVNTEITKAPLSASMIKRYDEHHQDLTLLKALVRQQLPEKYKEIFFDQSKNGYAGYIDGGASQEEFYKFIKPILEKMDGTEELLVKLNREDLLRKQRTFDNGSIPHQIHLGELHAILRRQEDFYPFLKDNREKIEKILTFRIPYYVGPLARGNSRFAWMTRKSEETITPWNFEEVVDKGASAQSFIERMTNFDKNLPNEKVLPKHSLLYEYFTVYNELTKVKYVTEGMRKPAFLSGEQKKAIVDLLFKTNRKVTVKQLKEDYFKKIECFDSVEISGVEDRFNASLGTYHDLLKIIKDKDFLDNEENEDILEDIVLTLTLFEDREMIEERLKTYAHLFDDKVMKQLKRRRYTGWGRLSRKLINGIRDKQSGKTILDFLKSDGFANRNFMQLIHDDSLTFKEDIQKAQVSGQGDSLHEHIANLAGSPAIKKGILQTVKVVDELVKVMGRHKPENIVIEMARENQTTQKGQKNSRERMKRIEEGIKELGSQILKEHPVENTQLQNEKLYLYYLQNGRDMYVDQELDINRLSDYDVDHIVPQSFLKDDSIDNKVLTRSDKARGKSDNVPSEEVVKKMKNYWRQLLNAKLITQRKFDNLTKAERGGLSELDKAGFIKRQLVETRQITKHVAQILDSRMNTKYDENDKLIREVKVITLKSKLVSDFRKDFQFYKVREINNYHHAHDAYLNAVVGTALIKKYPKLESEFVYGDYKVYDVRKMIAKSEQEIGKATAKYFFYSNIMNFFKTEITLANGEIRKRPLIETNGETGEIVWDKGRDFATVRKVLSMPQVNIVKKTEVQTGGFSKESILPKRNSDKLIARKKDWDPKKYGGFDSPTVAYSVLVVAKVEKGKSKKLKSVKELLGITIMERSSFEKNPIDFLEAKGYKEVKKDLIIKLPKYSLFELENGRKRMLASAGELQKGNELALPSKYVNFLYLASHYEKLKGSPEDNEQKQLFVEQHKHYLDEIIEQISEFSKRVILADANLDKVLSAYNKHRDKPIREQAENIIHLFTLTNLGAPAAFKYFDTTIDRKRYTSTKEVLDATLIHQSITGLYETRIDLSQLGGDGGEAAAKGSSPAPGGLDDEYRLYSPLVKPDQNIQFWLEQFPQAWAETAGMGLAKQVPPQVIQLKASATPVSVRQYPLSKEAQEGIRPHVQRLIQQGILVPVQSPWNTPLLPVRKPGTNDYRPVQDLREVNKRVQDIHPTVPNPYNLLCALPPQRSWYTVLDLKDAFFCLRLHPTSQPLFAFEWRDPGTGRTGQLTWTRLPQGFKNSPTIFNEALHRDLANFRIQHPQVTLLQYVDDLLLAGATKQDCLEGTKALLLELSDLGYRASAKKAQICRREVTYLGYSLRDGQRWLTEARKKTVVQIPAPTTAKQVREFLGKAGFCRLFIPGFATLAAPLYPLTKPKGEFSWAPEHQKAFDAIKKALLSAPALALPDVTKPFTLYVDERKGVARGVLTQTLGPWRRPVAYLSKKLDPVASGWPVCLKAIAAVAILVKDADKLTLGQNITVIAPHALENIVRQPPDRWMTNARMTHYQSLLLTERVTFAPPAALNPATLLPEETDEPVTHDCHQLLIEETGVRKDLTDIPLTGEVLTWFTDGSSYVVEGKRMAGAAVVDGTRTIWASSLPEGTSAQKAELMALTQALRLAEGKSINIYTDSRYAFATAHVHGAIYKQRGWLTSAGREIKNKEEILSLLEALHLPKRLAIIHCPGHQKAKDPISRGNQMADRVAKQAAQGVNLLPAGKRTADGSEFEKRTADGSEFESPKKKAKVE

SEQ ID NO: 243 - protein, 2088 aa, synthetic construct
MPAAKRVKLDGGDKKYSIGLDIGTNSVGWAVITDEYKVPSKKFKVLGNTDRHSIKKNLIGALLFDSGETAEATRLKRTARRRYTRRKNRICYLQEIFSNEMAKVDDSFFHRLEESFLVEEDKKHERHPIFGNIVDEVAYHEKYPTIYHLRKKLVDSTDKADLRLIYLALAHMIKFRGHFLIEGDLNPDNSDVDKLFIQLVQTYNQLFEENPINASGVDAKAILSARLSKSRRLENLIAQLPGEKKNGLFGNLIALSLGLTPNFKSNFDLAEDAKLQLSKDTYDDDLDNLLAQIGDQYADLFLAAKNLSDAILLSDILRVNTEITKAPLSASMIKRYDEHHQDLTLLKALVRQQLPEKYKEIFFDQSKNGYAGYIDGGASQEEFYKFIKPILEKMDGTEELLVKLNREDLLRKQRTFDNGSIPHQIHLGELHAILRRQEDFYPFLKDNREKIEKILTFRIPYYVGPLARGNSRFAWMTRKSEETITPWNFEEVVDKGASAQSFIERMTNFDKNLPNEKVLPKHSLLYEYFTVYNELTKVKYVTEGMRKPAFLSGEQKKAIVDLLFKTNRKVTVKQLKEDYFKKIECFDSVEISGVEDRFNASLGTYHDLLKIIKDKDFLDNEENEDILEDIVLTLTLFEDREMIEERLKTYAHLFDDKVMKQLKRRRYTGWGRLSRKLINGIRDKQSGKTILDFLKSDGFANRNFMQLIHDDSLTFKEDIQKAQVSGQGDSLHEHIANLAGSPAIKKGILQTVKVVDELVKVMGRHKPENIVIEMARENQTTQKGQKNSRERMKRIEEGIKELGSQILKEHPVENTQLQNEKLYLYYLQNGRDMYVDQELDINRLSDYDVDHIVPQSFLKDDSIDNKVLTRSDKARGKSDNVPSEEVVKKMKNYWRQLLNAKLITQRKFDNLTKAERGGLSELDKAGFIKRQLVETRQITKHVAQILDSRMNTKYDENDKLIREVKVITLKSKLVSDFRKDFQFYKVREINNYHHAHDAYLNAVVGTALIKKYPKLESEFVYGDYKVYDVRKMIAKSEQEIGKATAKYFFYSNIMNFFKTEITLANGEIRKRPLIETNGETGEIVWDKGRDFATVRKVLSMPQVNIVKKTEVQTGGFSKESILPKRNSDKLIARKKDWDPKKYGGFDSPTVAYSVLVVAKVEKGKSKKLKSVKELLGITIMERSSFEKNPIDFLEAKGYKEVKKDLIIKLPKYSLFELENGRKRMLASAGELQKGNELALPSKYVNFLYLASHYEKLKGSPEDNEQKQLFVEQHKHYLDEIIEQISEFSKRVILADANLDKVLSAYNKHRDKPIREQAENIIHLFTLTNLGAPAAFKYFDTTIDRKRYTSTKEVLDATLIHQSITGLYETRIDLSQLGGDGGGGSPAPEAAAKGGLDDEYRLYSPLVKPDQNIQFWLEQFPQAWAETAGMGLAKQVPPQVIQLKASATPVSVRQYPLSKEAQEGIRPHVQRLIQQGILVPVQSPWNTPLLPVRKPGTNDYRPVQDLREVNKRVQDIHPTVPNPYNLLCALPPQRSWYTVLDLKDAFFCLRLHPTSQPLFAFEWRDPGTGRTGQLTWTRLPQGFKNSPTIFNEALHRDLANFRIQHPQVTLLQYVDDLLLAGATKQDCLEGTKALLLELSDLGYRASAKKAQICRREVTYLGYSLRDGQRWLTEARKKTVVQIPAPTTAKQVREFLGKAGFCRLFIPGFATLAAPLYPLTKPKGEFSWAPEHQKAFDAIKKALLSAPALALPDVTKPFTLYVDERKGVARGVLTQTLGPWRRPVAYLSKKLDPVASGWPVCLKAIAAVAILVKDADKLTLGQNITVIAPHALENIVRQPPDRWMTNARMTHYQSLLLTERVTFAPPAALNPATLLPEETDEPVTHDCHQLLIEETGVRKDLTDIPLTGEVLTWFTDGSSYVVEGKRMAGAAVVDGTRTIWASSLPEGTSAQKAELMALTQALRLAEGKSINIYTDSRYAFATAHVHGAIYKQRGWLTSAGREIKNKEEILSLLEALHLPKRLAIIHCPGHQKAKDPISRGNQMADRVAKQAAQGVNLLPAGKRTADGSEFEKRTADGSEFESPKKKAKVE

SEQ ID NO: 244 - protein, 2084 aa, synthetic construct; identical to SEQ ID NO: 77

SEQ ID NO: 245 - protein, 2081 aa, synthetic construct; identical to SEQ ID NO: 66

SEQ ID NO: 246 - protein, 2080 aa, synthetic construct
MPAAKRVKLDGGDKKYSIGLDIGTNSVGWAVITDEYKVPSKKFKVLGNTDRHSIKKNLIGALLFDSGETAEATRLKRTARRRYTRRKNRICYLQEIFSNEMAKVDDSFFHRLEESFLVEEDKKHERHPIFGNIVDEVAYHEKYPTIYHLRKKLVDSTDKADLRLIYLALAHMIKFRGHFLIEGDLNPDNSDVDKLFIQLVQTYNQLFEENPINASGVDAKAILSARLSKSRRLENLIAQLPGEKKNGLFGNLIALSLGLTPNFKSNFDLAEDAKLQLSKDTYDDDLDNLLAQIGDQYADLFLAAKNLSDAILLSDILRVNTEITKAPLSASMIKRYDEHHQDLTLLKALVRQQLPEKYKEIFFDQSKNGYAGYIDGGASQEEFYKFIKPILEKMDGTEELLVKLNREDLLRKQRTFDNGSIPHQIHLGELHAILRRQEDFYPFLKDNREKIEKILTFRIPYYVGPLARGNSRFAWMTRKSEETITPWNFEEVVDKGASAQSFIERMTNFDKNLPNEKVLPKHSLLYEYFTVYNELTKVKYVTEGMRKPAFLSGEQKKAIVDLLFKTNRKVTVKQLKEDYFKKIECFDSVEISGVEDRFNASLGTYHDLLKIIKDKDFLDNEENEDILEDIVLTLTLFEDREMIEERLKTYAHLFDDKVMKQLKRRRYTGWGRLSRKLINGIRDKQSGKTILDFLKSDGFANRNFMQLIHDDSLTFKEDIQKAQVSGQGDSLHEHIANLAGSPAIKKGILQTVKVVDELVKVMGRHKPENIVIEMARENQTTQKGQKNSRERMKRIEEGIKELGSQILKEHPVENTQLQNEKLYLYYLQNGRDMYVDQELDINRLSDYDVDHIVPQSFLKDDSIDNKVLTRSDKARGKSDNVPSEEVVKKMKNYWRQLLNAKLITQRKFDNLTKAERGGLSELDKAGFIKRQLVETRQITKHVAQILDSRMNTKYDENDKLIREVKVITLKSKLVSDFRKDFQFYKVREINNYHHAHDAYLNAVVGTALIKKYPKLESEFVYGDYKVYDVRKMIAKSEQEIGKATAKYFFYSNIMNFFKTEITLANGEIRKRPLIETNGETGEIVWDKGRDFATVRKVLSMPQVNIVKKTEVQTGGFSKESILPKRNSDKLIARKKDWDPKKYGGFDSPTVAYSVLVVAKVEKGKSKKLKSVKELLGITIMERSSFEKNPIDFLEAKGYKEVKKDLIIKLPKYSLFELENGRKRMLASAGELQKGNELALPSKYVNFLYLASHYEKLKGSPEDNEQKQLFVEQHKHYLDEIIEQISEFSKRVILADANLDKVLSAYNKHRDKPIREQAENIIHLFTLTNLGAPAAFKYFDTTIDRKRYTSTKEVLDATLIHQSITGLYETRIDLSQLGGDGGGGGGGLDDEYRLYSPLVKPDQNIQFWLEQFPQAWAETAGMGLAKQVPPQVIQLKASATPVSVRQYPLSKEAQEGIRPHVQRLIQQGILVPVQSPWNTPLLPVRKPGTNDYRPVQDLREVNKRVQDIHPTVPNPYNLLCALPPQRSWYTVLDLKDAFFCLRLHPTSQPLFAFEWRDPGTGRTGQLTWTRLPQGFKNSPTIFNEALHRDLANFRIQHPQVTLLQYVDDLLLAGATKQDCLEGTKALLLELSDLGYRASAKKAQICRREVTYLGYSLRDGQRWLTEARKKTVVQIPAPTTAKQVREFLGKAGFCRLFIPGFATLAAPLYPLTKPKGEFSWAPEHQKAFDAIKKALLSAPALALPDVTKPFTLYVDERKGVARGVLTQTLGPWRRPVAYLSKKLDPVASGWPVCLKAIAAVAILVKDADKLTLGQNITVIAPHALENIVRQPPDRWMTNARMTHYQSLLLTERVTFAPPAALNPATLLPEETDEPVTHDCHQLLIEETGVRKDLTDIPLTGEVLTWFTDGSSYVVEGKRMAGAAVVDGTRTIWASSLPEGTSAQKAELMALTQALRLAEGKSINIYTDSRYAFATAHVHGAIYKQRGWLTSAGREIKNKEEILSLLEALHLPKRLAIIHCPGHQKAKDPISRGNQMADRVAKQAAQGVNLLPAGKRTADGSEFEKRTADGSEFESPKKKAKVE

SEQ ID NO: 247 - protein, 2088 aa, synthetic construct
MPAAKRVKLDGGDKKYSIGLDIGTNSVGWAVITDEYKVPSKKFKVLGNTDRHSIKKNLIGALLFDSGETAEATRLKRTARRRYTRRKNRICYLQEIFSNEMAKVDDSFFHRLEESFLVEEDKKHERHPIFGNIVDEVAYHEKYPTIYHLRKKLVDSTDKADLRLIYLALAHMIKFRGHFLIEGDLNPDNSDVDKLFIQLVQTYNQLFEENPINASGVDAKAILSARLSKSRRLENLIAQLPGEKKNGLFGNLIALSLGLTPNFKSNFDLAEDAKLQLSKDTYDDDLDNLLAQIGDQYADLFLAAKNLSDAILLSDILRVNTEITKAPLSASMIKRYDEHHQDLTLLKALVRQQLPEKYKEIFFDQSKNGYAGYIDGGASQEEFYKFIKPILEKMDGTEELLVKLNREDLLRKQRTFDNGSIPHQIHLGELHAILRRQEDFYPFLKDNREKIEKILTFRIPYYVGPLARGNSRFAWMTRKSEETITPWNFEEVVDKGASAQSFIERMTNFDKNLPNEKVLPKHSLLYEYFTVYNELTKVKYVTEGMRKPAFLSGEQKKAIVDLLFKTNRKVTVKQLKEDYFKKIECFDSVEISGVEDRFNASLGTYHDLLKIIKDKDFLDNEENEDILEDIVLTLTLFEDREMIEERLKTYAHLFDDKVMKQLKRRRYTGWGRLSRKLINGIRDKQSGKTILDFLKSDGFANRNFMQLIHDDSLTFKEDIQKAQVSGQGDSLHEHIANLAGSPAIKKGILQTVKVVDELVKVMGRHKPENIVIEMARENQTTQKGQKNSRERMKRIEEGIKELGSQILKEHPVENTQLQNEKLYLYYLQNGRDMYVDQELDINRLSDYDVDHIVPQSFLKDDSIDNKVLTRSDKARGKSDNVPSEEVVKKMKNYWRQLLNAKLITQRKFDNLTKAERGGLSELDKAGFIKRQLVETRQITKHVAQILDSRMNTKYDENDKLIREVKVITLKSKLVSDFRKDFQFYKVREINNYHHAHDAYLNAVVGTALIKKYPKLESEFVYGDYKVYDVRKMIAKSEQEIGKATAKYFFYSNIMNFFKTEITLANGEIRKRPLIETNGETGEIVWDKGRDFATVRKVLSMPQVNIVKKTEVQTGGFSKESILPKRNSDKLIARKKDWDPKKYGGFDSPTVAYSVLVVAKVEKGKSKKLKSVKELLGITIMERSSFEKNPIDFLEAKGYKEVKKDLIIKLPKYSLFELENGRKRMLASAGELQKGNELALPSKYVNFLYLASHYEKLKGSPEDNEQKQLFVEQHKHYLDEIIEQISEFSKRVILADANLDKVLSAYNKHRDKPIREQAENIIHLFTLTNLGAPAAFKYFDTTIDRKRYTSTKEVLDATLIHQSITGLYETRIDLSQLGGDGGEAAAKPAPGGSGGLDDEYRLYSPLVKPDQNIQFWLEQFPQAWAETAGMGLAKQVPPQVIQLKASATPVSVRQYPLSKEAQEGIRPHVQRLIQQGILVPVQSPWNTPLLPVRKPGTNDYRPVQDLREVNKRVQDIHPTVPNPYNLLCALPPQRSWYTVLDLKDAFFCLRLHPTSQPLFAFEWRDPGTGRTGQLTWTRLPQGFKNSPTIFNEALHRDLANFRIQHPQVTLLQYVDDLLLAGATKQDCLEGTKALLLELSDLGYRASAKKAQICRREVTYLGYSLRDGQRWLTEARKKTVVQIPAPTTAKQVREFLGKAGFCRLFIPGFATLAAPLYPLTKPKGEFSWAPEHQKAFDAIKKALLSAPALALPDVTKPFTLYVDERKGVARGVLTQTLGPWRRPVAYLSKKLDPVASGWPVCLKAIAAVAILVKDADKLTLGQNITVIAPHALENIVRQPPDRWMTNARMTHYQSLLLTERVTFAPPAALNPATLLPEETDEPVTHDCHQLLIEETGVRKDLTDIPLTGEVLTWFTDGSSYVVEGKRMAGAAVVDGTRTIWASSLPEGTSAQKAELMALTQALRLAEGKSINIYTDSRYAFATAHVHGAIYKQRGWLTSAGREIKNKEEILSLLEALHLPKRLAIIHCPGHQKAKDPISRGNQMADRVAKQAAQGVNLLPAGKRTADGSEFEKRTADGSEFESPKKKAKVE

SEQ ID NO: 248 - protein, 2088 aa, synthetic construct; identical to SEQ ID NO: 94

SEQ ID NO: 249 - protein, 2086 aa, synthetic construct; identical to SEQ ID NO: 60

SEQ ID NO: 250 - protein, 2088 aa, synthetic construct
MPAAKRVKLDGGDKKYSIGLDIGTNSVGWAVITDEYKVPSKKFKVLGNTDRHSIKKNLIGALLFDSGETAEATRLKRTARRRYTRRKNRICYLQEIFSNEMAKVDDSFFHRLEESFLVEEDKKHERHPIFGNIVDEVAYHEKYPTIYHLRKKLVDSTDKADLRLIYLALAHMIKFRGHFLIEGDLNPDNSDVDKLFIQLVQTYNQLFEENPINASGVDAKAILSARLSKSRRLENLIAQLPGEKKNGLFGNLIALSLGLTPNFKSNFDLAEDAKLQLSKDTYDDDLDNLLAQIGDQYADLFLAAKNLSDAILLSDILRVNTEITKAPLSASMIKRYDEHHQDLTLLKALVRQQLPEKYKEIFFDQSKNGYAGYIDGGASQEEFYKFIKPILEKMDGTEELLVKLNREDLLRKQRTFDNGSIPHQIHLGELHAILRRQEDFYPFLKDNREKIEKILTFRIPYYVGPLARGNSRFAWMTRKSEETITPWNFEEVVDKGASAQSFIERMTNFDKNLPNEKVLPKHSLLYEYFTVYNELTKVKYVTEGMRKPAFLSGEQKKAIVDLLFKTNRKVTVKQLKEDYFKKIECFDSVEISGVEDRFNASLGTYHDLLKIIKDKDFLDNEENEDILEDIVLTLTLFEDREMIEERLKTYAHLFDDKVMKQLKRRRYTGWGRLSRKLINGIRDKQSGKTILDFLKSDGFANRNFMQLIHDDSLTFKEDIQKAQVSGQGDSLHEHIANLAGSPAIKKGILQTVKVVDELVKVMGRHKPENIVIEMARENQTTQKGQKNSRERMKRIEEGIKELGSQILKEHPVENTQLQNEKLYLYYLQNGRDMYVDQELDINRLSDYDVDHIVPQSFLKDDSIDNKVLTRSDKARGKSDNVPSEEVVKKMKNYWRQLLNAKLITQRKFDNLTKAERGGLSELDKAGFIKRQLVETRQITKHVAQILDSRMNTKYDENDKLIREVKVITLKSKLVSDFRKDFQFYKVREINNYHHAHDAYLNAVVGTALIKKYPKLESEFVYGDYKVYDVRKMIAKSEQEIGKATAKYFFYSNIMNFFKTEITLANGEIRKRPLIETNGETGEIVWDKGRDFATVRKVLSMPQVNIVKKTEVQTGGFSKESILPKRNSDKLIARKKDWDPKKYGGFDSPTVAYSVLVVAKVEKGKSKKLKSVKELLGITIMERSSFEKNPIDFLEAKGYKEVKKDLIIKLPKYSLFELENGRKRMLASAGELQKGNELALPSKYVNFLYLASHYEKLKGSPEDNEQKQLFVEQHKHYLDEIIEQISEFSKRVILADANLDKVLSAYNKHRDKPIREQAENIIHLFTLTNLGAPAAFKYFDTTIDRKRYTSTKEVLDATLIHQSITGLYETRIDLSQLGGDGGGGSEAAAKGGGGGLDDEYRLYSPLVKPDQNIQFWLEQFPQAWAETAGMGLAKQVPPQVIQLKASATPVSVRQYPLSKEAQEGIRPHVQRLIQQGILVPVQSPWNTPLLPVRKPGTNDYRPVQDLREVNKRVQDIHPTVPNPYNLLCALPPQRSWYTVLDLKDAFFCLRLHPTSQPLFAFEWRDPGTGRTGQLTWTRLPQGFKNSPTIFNEALHRDLANFRIQHPQVTLLQYVDDLLLAGATKQDCLEGTKALLLELSDLGYRASAKKAQICRREVTYLGYSLRDGQRWLTEARKKTVVQIPAPTTAKQVREFLGKAGFCRLFIPGFATLAAPLYPLTKPKGEFSWAPEHQKAFDAIKKALLSAPALALPDVTKPFTLYVDERKGVARGVLTQTLGPWRRPVAYLSKKLDPVASGWPVCLKAIAAVAILVKDADKLTLGQNITVIAPHALENIVRQPPDRWMTNARMTHYQSLLLTERVTFAPPAALNPATLLPEETDEPVTHDCHQLLIEETGVRKDLTDIPLTGEVLTWFTDGSSYVVEGKRMAGAAVVDGTRTIWASSLPEGTSAQKAELMALTQALRLAEGKSINIYTDSRYAFATAHVHGAIYKQRGWLTSAGREIKNKEEILSLLEALHLPKRLAIIHCPGHQKAKDPISRGNQMADRVAKQAAQGVNLLPAGKRTADGSEFEKRTADGSEFESPKKKAKVE

SEQ ID NO: 251 - protein, 2086 aa, synthetic construct; identical to SEQ ID NO: 82

SEQ ID NO: 252 - protein, 2083 aa, synthetic construct
MPAAKRVKLDGGDKKYSIGLDIGTNSVGWAVITDEYKVPSKKFKVLGNTDRHSIKKNLIGALLFDSGETAEATRLKRTARRRYTRRKNRICYLQEIFSNEMAKVDDSFFHRLEESFLVEEDKKHERHPIFGNIVDEVAYHEKYPTIYHLRKKLVDSTDKADLRLIYLALAHMIKFRGHFLIEGDLNPDNSDVDKLFIQLVQTYNQLFEENPINASGVDAKAILSARLSKSRRLENLIAQLPGEKKNGLFGNLIALSLGLTPNFKSNFDLAEDAKLQLSKDTYDDDLDNLLAQIGDQYADLFLAAKNLSDAILLSDILRVNTEITKAPLSASMIKRYDEHHQDLTLLKALVRQQLPEKYKEIFFDQSKNGYAGYIDGGASQEEFYKFIKPILEKMDGTEELLVKLNREDLLRKQRTFDNGSIPHQIHLGELHAILRRQEDFYPFLKDNREKIEKILTFRIPYYVGPLARGNSRFAWMTRKSEETITPWNFEEVVDKGASAQSFIERMTNFDKNLPNEKVLPKHSLLYEYFTVYNELTKVKYVTEGMRKPAFLSGEQKKAIVDLLFKTNRKVTVKQLKEDYFKKIECFDSVEISGVEDRFNASLGTYHDLLKIIKDKDFLDNEENEDILEDIVLTLTLFEDREMIEERLKTYAHLFDDKVMKQLKRRRYTGWGRLSRKLINGIRDKQSGKTILDFLKSDGFANRNFMQLIHDDSLTFKEDIQKAQVSGQGDSLHEHIANLAGSPAIKKGILQTVKVVDELVKVMGRHKPENIVIEMARENQTTQKGQKNSRERMKRIEEGIKELGSQILKEHPVENTQLQNEKLYLYYLQNGRDMYVDQELDINRLSDYDVDHIVPQSFLKDDSIDNKVLTRSDKARGKSDNVPSEEVVKKMKNYWRQLLNAKLITQRKFDNLTKAERGGLSELDKAGFIKRQLVETRQITKHVAQILDSRMNTKYDENDKLIREVKVITLKSKLVSDFRKDFQFYKVREINNYHHAHDAYLNAVVGTALIKKYPKLESEFVYGDYKVYDVRKMIAKSEQEIGKATAKYFFYSNIMNFFKTEITLANGEIRKRPLIETNGETGEIVWDKGRDFATVRKVLSMPQVNIVKKTEVQTGGFSKESILPKRNSDKLIARKKDWDPKKYGGFDSPTVAYSVLVVAKVEKGKSKKLKSVKELLGITIMERSSFEKNPIDFLEAKGYKEVKKDLIIKLPKYSLFELENGRKRMLASAGELQKGNELALPSKYVNFLYLASHYEKLKGSPEDNEQKQLFVEQHKHYLDEIIEQISEFSKRVILADANLDKVLSAYNKHRDKPIREQAENIIHLFTLTNLGAPAAFKYFDTTIDRKRYTSTKEVLDATLIHQSITGLYETRIDLSQLGGDGGPAPGGSGGLDDEYRLYSPLVKPDQNIQFWLEQFPQAWAETAGMGLAKQVPPQVIQLKASATPVSVRQYPLSKEAQEGIRPHVQRLIQQGILVPVQSPWNTPLLPVRKPGTNDYRPVQDLREVNKRVQDIHPTVPNPYNLLCALPPQRSWYTVLDLKDAFFCLRLHPTSQPLFAFEWRDPGTGRTGQLTWTRLPQGFKNSPTIFNEALHRDLANFRIQHPQVTLLQYVDDLLLAGATKQDCLEGTKALLLELSDLGYRASAKKAQICRREVTYLGYSLRDGQRWLTEARKKTVVQIPAPTTAKQVREFLGKAGFCRLFIPGFATLAAPLYPLTKPKGEFSWAPEHQKAFDAIKKALLSAPALALPDVTKPFTLYVDERKGVARGVLTQTLGPWRRPVAYLSKKLDPVASGWPVCLKAIAAVAILVKDADKLTLGQNITVIAPHALENIVRQPPDRWMTNARMTHYQSLLLTERVTFAPPAALNPATLLPEETDEPVTHDCHQLLIEETGVRKDLTDIPLTGEVLTWFTDGSSYVVEGKRMAGAAVVDGTRTIWASSLPEGTSAQKAELMALTQALRLAEGKSINIYTDSRYAFATAHVHGAIYKQRGWLTSAGREIKNKEEILSLLEALHLPKRLAIIHCPGHQKAKDPISRGNQMADRVAKQAAQGVNLLPAGKRTADGSEFEKRTADGSEFESPKKKAKVE

SEQ ID NO: 253 - protein, 2083 aa, synthetic construct; identical to SEQ ID NO: 59

SEQ ID NO: 254 - protein, 2088 aa, synthetic construct
MPAAKRVKLDGGDKKYSIGLDIGTNSVGWAVITDEYKVPSKKFKVLGNTDRHSIKKNLIGALLFDSGETAEATRLKRTARRRYTRRKNRICYLQEIFSNEMAKVDDSFFHRLEESFLVEEDKKHERHPIFGNIVDEVAYHEKYPTIYHLRKKLVDSTDKADLRLIYLALAHMIKFRGHFLIEGDLNPDNSDVDKLFIQLVQTYNQLFEENPINASGVDAKAILSARLSKSRRLENLIAQLPGEKKNGLFGNLIALSLGLTPNFKSNFDLAEDAKLQLSKDTYDDDLDNLLAQIGDQYADLFLAAKNLSDAILLSDILRVNTEITKAPLSASMIKRYDEHHQDLTLLKALVRQQLPEKYKEIFFDQSKNGYAGYIDGGASQEEFYKFIKPILEKMDGTEELLVKLNREDLLRKQRTFDNGSIPHQIHLGELHAILRRQEDFYPFLKDNREKIEKILTFRIPYYVGPLARGNSRFAWMTRKSEETITPWNFEEVVDKGASAQSFIERMTNFDKNLPNEKVLPKHSLLYEYFTVYNELTKVKYVTEGMRKPAFLSGEQKKAIVDLLFKTNRKVTVKQLKEDYFKKIECFDSVEISGVEDRFNASLGTYHDLLKIIKDKDFLDNEENEDILEDIVLTLTLFEDREMIEERLKTYAHLFDDKVMKQLKRRRYTGWGRLSRKLINGIRDKQSGKTILDFLKSDGFANRNFMQLIHDDSLTFKEDIQKAQVSGQGDSLHEHIANLAGSPAIKKGILQTVKVVDELVKVMGRHKPENIVIEMARENQTTQKGQKNSRERMKRIEEGIKELGSQILKEHPVENTQLQNEKLYLYYLQNGRDMYVDQELDINRLSDYDVDHIVPQSFLKDDSIDNKVLTRSDKARGKSDNVPSEEVVKKMKNYWRQLLNAKLITQRKFDNLTKAERGGLSELDKAGFIKRQLVETRQITKHVAQILDSRMNTKYDENDKLIREVKVITLKSKLVSDFRKDFQFYKVREINNYHHAHDAYLNAVVGTALIKKYPKLESEFVYGDYKVYDVRKMIAKSEQEIGKATAKYFFYSNIMNFFKTEITLANGEIRKRPLIETNGETGEIVWDKGRDFATVRKVLSMPQVNIVKKTEVQTGGFSKESILPKRNSDKLIARKKDWDPKKYGGFDSPTVAYSVLVVAKVEKGKSKKLKSVKELLGITIMERSSFEKNPIDFLEAKGYKEVKKDLIIKLPKYSLFELENGRKRMLASAGELQKGNELALPSKYVNFLYLASHYEKLKGSPEDNEQKQLFVEQHKHYLDEIIEQISEFSKRVILADANLDKVLSAYNKHRDKPIREQAENIIHLFTLTNLGAPAAFKYFDTTIDRKRYTSTKEVLDATLIHQSITGLYETRIDLSQLGGDGGGSSGGSEAAAKGGLDDEYRLYSPLVKPDQNIQFWLEQFPQAWAETAGMGLAKQVPPQVIQLKASATPVSVRQYPLSKEAQEGIRPHVQRLIQQGILVPVQSPWNTPLLPVRKPGTNDYRPVQDLREVNKRVQDIHPTVPNPYNLLCALPPQRSWYTVLDLKDAFFCLRLHPTSQPLFAFEWRDPGTGRTGQLTWTRLPQGFKNSPTIFNEALHRDLANFRIQHPQVTLLQYVDDLLLAGATKQDCLEGTKALLLELSDLGYRASAKKAQICRREVTYLGYSLRDGQRWLTEARKKTVVQIPAPTTAKQVREFLGKAGFCRLFIPGFATLAAPLYPLTKPKGEFSWAPEHQKAFDAIKKALLSAPALALPDVTKPFTLYVDERKGVARGVLTQTLGPWRRPVAYLSKKLDPVASGWPVCLKAIAAVAILVKDADKLTLGQNITVIAPHALENIVRQPPDRWMTNARMTHYQSLLLTERVTFAPPAALNPATLLPEETDEPVTHDCHQLLIEETGVRKDLTDIPLTGEVLTWFTDGSSYVVEGKRMAGAAVVDGTRTIWASSLPEGTSAQKAELMALTQALRLAEGKSINIYTDSRYAFATAHVHGAIYKQRGWLTSAGREIKNKEEILSLLEALHLPKRLAIIHCPGHQKAKDPISRGNQMADRVAKQAAQGVNLLPAGKRTADGSEFEKRTADGSEFESPKKKAKVE

SEQ ID NO: 255 - protein, 2088 aa, synthetic construct; identical to SEQ ID NO: 86

SEQ ID NO: 256 - protein, 2107 aa, synthetic construct
MPAAKRVKLDGGDKKYSIGLDIGTNSVGWAVITDEYKVPSKKFKVLGNTDRHSIKKNLIGALLFDSGETAEATRLKRTARRRYTRRKNRICYLQEIFSNEMAKVDDSFFHRLEESFLVEEDKKHERHPIFGNIVDEVAYHEKYPTIYHLRKKLVDSTDKADLRLIYLALAHMIKFRGHFLIEGDLNPDNSDVDKLFIQLVQTYNQLFEENPINASGVDAKAILSARLSKSRRLENLIAQLPGEKKNGLFGNLIALSLGLTPNFKSNFDLAEDAKLQLSKDTYDDDLDNLLAQIGDQYADLFLAAKNLSDAILLSDILRVNTEITKAPLSASMIKRYDEHHQDLTLLKALVRQQLPEKYKEIFFDQSKNGYAGYIDGGASQEEFYKFIKPILEKMDGTEELLVKLNREDLLRKQRTFDNGSIPHQIHLGELHAILRRQEDFYPFLKDNREKIEKILTFRIPYYVGPLARGNSRFAWMTRKSEETITPWNFEEVVDKGASAQSFIERMTNFDKNLPNEKVLPKHSLLYEYFTVYNELTKVKYVTEGMRKPAFLSGEQKKAIVDLLFKTNRKVTVKQLKEDYFKKIECFDSVEISGVEDRFNASLGTYHDLLKIIKDKDFLDNEENEDILEDIVLTLTLFEDREMIEERLKTYAHLFDDKVMKQLKRRRYTGWGRLSRKLINGIRDKQSGKTILDFLKSDGFANRNFMQLIHDDSLTFKEDIQKAQVSGQGDSLHEHIANLAGSPAIKKGILQTVKVVDELVKVMGRHKPENIVIEMARENQTTQKGQKNSRERMKRIEEGIKELGSQILKEHPVENTQLQNEKLYLYYLQNGRDMYVDQELDINRLSDYDVDHIVPQSFLKDDSIDNKVLTRSDKARGKSDNVPSEEVVKKMKNYWRQLLNAKLITQRKFDNLTKAERGGLSELDKAGFIKRQLVETRQITKHVAQILDSRMNTKYDENDKLIREVKVITLKSKLVSDFRKDFQFYKVREINNYHHAHDAYLNAVVGTALIKKYPKLESEFVYGDYKVYDVRKMIAKSEQEIGKATAKYFFYSNIMNFFKTEITLANGEIRKRPLIETNGETGEIVWDKGRDFATVRKVLSMPQVNIVKKTEVQTGGFSKESILPKRNSDKLIARKKDWDPKKYGGFDSPTVAYSVLVVAKVEKGKSKKLKSVKELLGITIMERSSFEKNPIDFLEAKGYKEVKKDLIIKLPKYSLFELENGRKRMLASAGELQKGNELALPSKYVNFLYLASHYEKLKGSPEDNEQKQLFVEQHKHYLDEIIEQISEFSKRVILADANLDKVLSAYNKHRDKPIREQAENIIHLFTLTNLGAPAAFKYFDTTIDRKRYTSTKEVLDATLIHQSITGLYETRIDLSQLGGDGGGGGGSGGGGSGGGGSGGGGSGGGGSGGGGSGGLDDEYRLYSPLVKPDQNIQFWLEQFPQAWAETAGMGLAKQVPPQVIQLKASATPVSVRQYPLSKEAQEGIRPHVQRLIQQGILVPVQSPWNTPLLPVRKPGTNDYRPVQDLREVNKRVQDIHPTVPNPYNLLCALPPQRSWYTVLDLKDAFFCLRLHPTSQPLFAFEWRDPGTGRTGQLTWTRLPQGFKNSPTIFNEALHRDLANFRIQHPQVTLLQYVDDLLLAGATKQDCLEGTKALLLELSDLGYRASAKKAQICRREVTYLGYSLRDGQRWLTEARKKTVVQIPAPTTAKQVREFLGKAGFCRLFIPGFATLAAPLYPLTKPKGEFSWAPEHQKAFDAIKKALLSAPALALPDVTKPFTLYVDERKGVARGVLTQTLGPWRRPVAYLSKKLDPVASGWPVCLKAIAAVAILVKDADKLTLGQNITVIAPHALENIVRQPPDRWMTNARMTHYQSLLLTERVTFAPPAALNPATLLPEETDEPVTHDCHQLLIEETGVRKDLTDIPLTGEVLTWFTDGSSYVVEGKRMAGAAVVDGTRTIWASSLPEGTSAQKAELMALTQALRLAEGKSINIYTDSRYAFATAHVHGAIYKQRGWLTSAGREIKNKEEILSLLEALHLPKRLAIIHCPGHQKAKDPISRGNQMADRVAKQAAQGVNLLPAGKRTADGSEFEKRTADGSEFESPKKKAKVE

SEQ ID NO: 257 - protein, 2086 aa, synthetic construct; identical to SEQ ID NO: 64

SEQ ID NO: 258 - protein, 2088 aa, synthetic construct
MPAAKRVKLDGGDKKYSIGLDIGTNSVGWAVITDEYKVPSKKFKVLGNTDRHSIKKNLIGALLFDSGETAEATRLKRTARRRYTRRKNRICYLQEIFSNEMAKVDDSFFHRLEESFLVEEDKKHERHPIFGNIVDEVAYHEKYPTIYHLRKKLVDSTDKADLRLIYLALAHMIKFRGHFLIEGDLNPDNSDVDKLFIQLVQTYNQLFEENPINASGVDAKAILSARLSKSRRLENLIAQLPGEKKNGLFGNLIALSLGLTPNFKSNFDLAEDAKLQLSKDTYDDDLDNLLAQIGDQYADLFLAAKNLSDAILLSDILRVNTEITKAPLSASMIKRYDEHHQDLTLLKALVRQQLPEKYKEIFFDQSKNGYAGYIDGGASQEEFYKFIKPILEKMDGTEELLVKLNREDLLRKQRTFDNGSIPHQIHLGELHAILRRQEDFYPFLKDNREKIEKILTFRIPYYVGPLARGNSRFAWMTRKSEETITPWNFEEVVDKGASAQSFIERMTNFDKNLPNEKVLPKHSLLYEYFTVYNELTKVKYVTEGMRKPAFLSGEQKKAIVDLLFKTNRKVTVKQLKEDYFKKIECFDSVEISGVEDRFNASLGTYHDLLKIIKDKDFLDNEENEDILEDIVLTLTLFEDREMIEERLKTYAHLFDDKVMKQLKRRRYTGWGRLSRKLINGIRDKQSGKTILDFLKSDGFANRNFMQLIHDDSLTFKEDIQKAQVSGQGDSLHEHIANLAGSPAIKKGILQTVKVVDELVKVMGRHKPENIVIEMARENQTTQKGQKNSRERMKRIEEGIKELGSQILKEHPVENTQLQNEKLYLYYLQNGRDMYVDQELDINRLSDYDVDHIVPQSFLKDDSIDNKVLTRSDKARGKSDNVPSEEVVKKMKNYWRQLLNAKLITQRKFDNLTKAERGGLSELDKAGFIKRQLVETRQITKHVAQILDSRMNTKYDENDKLIREVKVITLKSKLVSDFRKDFQFYKVREINNYHHAHDAYLNAVVGTALIKKYPKLESEFVYGDYKVYDVRKMIAKSEQEIGKATAKYFFYSNIMNFFKTEITLANGEIRKRPLIETNGETGEIVWDKGRDFATVRKVLSMPQVNIVKKTEVQTGGFSKESILPKRNSDKLIARKKDWDPKKYGGFDSPTVAYSVLVVAKVEKGKSKKLKSVKELLGITIMERSSFEKNPIDFLEAKGYKEVKKDLIIKLPKYSLFELENGRKRMLASAGELQKGNELALPSKYVNFLYLASHYEKLKGSPEDNEQKQLFVEQHKHYLDEIIEQISEFSKRVILADANLDKVLSAYNKHRDKPIREQAENIIHLFTLTNLGAPAAFKYFDTTIDRKRYTSTKEVLDATLIHQSITGLYETRIDLSQLGGDGGGSSEAAAKGGSGGLDDEYRLYSPLVKPDQNIQFWLEQFPQAWAETAGMGLAKQVPPQVIQLKASATPVSVRQYPLSKEAQEGIRPHVQRLIQQGILVPVQSPWNTPLLPVRKPGTNDYRPVQDLREVNKRVQDIHPTVPNPYNLLCALPPQRSWYTVLDLKDAFFCLRLHPTSQPLFAFEWRDPGTGRTGQLTWTRLPQGFKNSPTIFNEALHRDLANFRIQHPQVTLLQYVDDLLLAGATKQDCLEGTKALLLELSDLGYRASAKKAQICRREVTYLGYSLRDGQRWLTEARKKTVVQIPAPTTAKQVREFLGKAGFCRLFIPGFATLAAPLYPLTKPKGEFSWAPEHQKAFDAIKKALLSAPALALPDVTKPFTLYVDERKGVARGVLTQTLGPWRRPVAYLSKKLDPVASGWPVCLKAIAAVAILVKDADKLTLGQNITVIAPHALENIVRQPPDRWMTNARMTHYQSLLLTERVTFAPPAALNPATLLPEETDEPVTHDCHQLLIEETGVRKDLTDIPLTGEVLTWFTDGSSYVVEGKRMAGAAVVDGTRTIWASSLPEGTSAQKAELMALTQALRLAEGKSINIYTDSRYAFATAHVHGAIYKQRGWLTSAGREIKNKEEILSLLEALHLPKRLAIIHCPGHQKAKDPISRGNQMADRVAKQAAQGVNLLPAGKRTADGSEFEKRTADGSEFESPKKKAKVE

SEQ ID NO: 259 - protein, 2083 aa, synthetic construct
MPAAKRVKLDGGDKKYSIGLDIGTNSVGWAVITDEYKVPSKKFKVLGNTDRHSIKKNLIGALLFDSGETAEATRLKRTARRRYTRRKNRICYLQEIFSNEMAKVDDSFFHRLEESFLVEEDKKHERHPIFGNIVDEVAYHEKYPTIYHLRKKLVDSTDKADLRLIYLALAHMIKFRGHFLIEGDLNPDNSDVDKLFIQLVQTYNQLFEENPINASGVDAKAILSARLSKSRRLENLIAQLPGEKKNGLFGNLIALSLGLTPNFKSNFDLAEDAKLQLSKDTYDDDLDNLLAQIGDQYADLFLAAKNLSDAILLSDILRVNTEITKAPLSASMIKRYDEHHQDLTLLKALVRQQLPEKYKEIFFDQSKNGYAGYIDGGASQEEFYKFIKPILEKMDGTEELLVKLNREDLLRKQRTFDNGSIPHQIHLGELHAILRRQEDFYPFLKDNREKIEKILTFRIPYYVGPLARGNSRFAWMTRKSEETITPWNFEEVVDKGASAQSFIERMTNFDKNLPNEKVLPKHSLLYEYFTVYNELTKVKYVTEGMRKPAFLSGEQKKAIVDLLFKTNRKVTVKQLKEDYFKKIECFDSVEISGVEDRFNASLGTYHDLLKIIKDKDFLDNEENEDILEDIVLTLTLFEDREMIEERLKTYAHLFDDKVMKQLKRRRYTGWGRLSRKLINGIRDKQSGKTILDFLKSDGFANRNFMQLIHDDSLTFKEDIQKAQVSGQGDSLHEHIANLAGSPAIKKGILQTVKVVDELVKVMGRHKPENIVIEMARENQTTQKGQKNSRERMKRIEEGIKELGSQILKEHPVENTQLQNEKLYLYYLQNGRDMYVDQELDINRLSDYDVDHIVPQSFLKDDSIDNKVLTRSDKARGKSDNVPSEEVVKKMKNYWRQLLNAKLITQRKFDNLTKAERGGLSELDKAGFIKRQLVETRQITKHVAQILDSRMNTKYDENDKLIREVKVITLKSKLVSDFRKDFQFYKVREINNYHHAHDAYLNAVVGTALIKKYPKLESEFVYGDYKVYDVRKMIAKSEQEIGKATAKYFFYSNIMNFFKTEITLANGEIRKRPLIETNGETGEIVWDKGRDFATVRKVLSMPQVNIVKKTEVQTGGFSKESILPKRNSDKLIARKKDWDPKKYGGFDSPTVAYSVLVVAKVEKGKSKKLKSVKELLGITIMERSSFEKNPIDFLEAKGYKEVKKDLIIKLPKYSLFELENGRKRMLASAGELQKGNELALPSKYVNFLYLASHYEKLKGSPEDNEQKQLFVEQHKHYLDEIIEQISEFSKRVILADANLDKVLSAYNKHRDKPIREQAENIIHLFTLTNLGAPAAFKYFDTTIDRKRYTSTKEVLDATLIHQSITGLYETRIDLSQLGGDGGGGSGGSGGLDDEYRLYSPLVKPDQNIQFWLEQFPQAWAETAGMGLAKQVPPQVIQLKASATPVSVRQYPLSKEAQEGIRPHVQRLIQQGILVPVQSPWNTPLLPVRKPGTNDYRPVQDLREVNKRVQDIHPTVPNPYNLLCALPPQRSWYTVLDLKDAFFCLRLHPTSQPLFAFEWRDPGTGRTGQLTWTRLPQGFKNSPTIFNEALHRDLANFRIQHPQVTLLQYVDDLLLAGATKQDCLEGTKALLLELSDLGYRASAKKAQICRREVTYLGYSLRDGQRWLTEARKKTVVQIPAPTTAKQVREFLGKAGFCRLFIPGFATLAAPLYPLTKPKGEFSWAPEHQKAFDAIKKALLSAPALALPDVTKPFTLYVDERKGVARGVLTQTLGPWRRPVAYLSKKLDPVASGWPVCLKAIAAVAILVKDADKLTLGQNITVIAPHALENIVRQPPDRWMTNARMTHYQSLLLTERVTFAPPAALNPATLLPEETDEPVTHDCHQLLIEETGVRKDLTDIPLTGEVLTWFTDGSSYVVEGKRMAGAAVVDGTRTIWASSLPEGTSAQKAELMALTQALRLAEGKSINIYTDSRYAFATAHVHGAIYKQRGWLTSAGREIKNKEEILSLLEALHLPKRLAIIHCPGHQKAKDPISRGNQMADRVAKQAAQGVNLLPAGKRTADGSEFEKRTADGSEFESPKKKAKVE

SEQ ID NO: 260 - protein, 2088 aa, synthetic construct; identical to SEQ ID NO: 93

SEQ ID NO: 261 - protein, 2083 aa, synthetic construct; identical to SEQ ID NO: 81

SEQ ID NO: 262 - protein, 2080 aa, synthetic construct
MPAAKRVKLDGGDKKYSIGLDIGTNSVGWAVITDEYKVPSKKFKVLGNTDRHSIKKNLIGALLFDSGETAEATRLKRTARRRYTRRKNRICYLQEIFSNEMAKVDDSFFHRLEESFLVEEDKKHERHPIFGNIVDEVAYHEKYPTIYHLRKKLVDSTDKADLRLIYLALAHMIKFRGHFLIEGDLNPDNSDVDKLFIQLVQTYNQLFEENPINASGVDAKAILSARLSKSRRLENLIAQLPGEKKNGLFGNLIALSLGLTPNFKSNFDLAEDAKLQLSKDTYDDDLDNLLAQIGDQYADLFLAAKNLSDAILLSDILRVNTEITKAPLSASMIKRYDEHHQDLTLLKALVRQQLPEKYKEIFFDQSKNGYAGYIDGGASQEEFYKFIKPILEKMDGTEELLVKLNREDLLRKQRTFDNGSIPHQIHLGELHAILRRQEDFYPFLKDNREKIEKILTFRIPYYVGPLARGNSRFAWMTRKSEETITPWNFEEVVDKGASAQSFIERMTNFDKNLPNEKVLPKHSLLYEYFTVYNELTKVKYVTEGMRKPAFLSGEQKKAIVDLLFKTNRKVTVKQLKEDYFKKIECFDSVEISGVEDRFNASLGTYHDLLKIIKDKDFLDNEENEDILEDIVLTLTLFEDREMIEERLKTYAHLFDDKVMKQLKRRRYTGWGRLSRKLINGIRDKQSGKTILDFLKSDGFANRNFMQLIHDDSLTFKEDIQKAQVSGQGDSLHEHIANLAGSPAIKKGILQTVKVVDELVKVMGRHKPENIVIEMARENQTTQKGQKNSRERMKRIEEGIKELGSQILKEHPVENTQLQNEKLYLYYLQNGRDMYVDQELDINRLSDYDVDHIVPQSFLKDDSIDNKVLTRSDKARGKSDNVPSEEVVKKMKNYWRQLLNAKLITQRKFDNLTKAERGGLSELDKAGFIKRQLVETRQITKHVAQILDSRMNTKYDENDKLIREVKVITLKSKLVSDFRKDFQFYKVREINNYHHAHDAYLNAVVGTALIKKYPKLESEFVYGDYKVYDVRKMIAKSEQEIGKATAKYFFYSNIMNFFKTEITLANGEIRKRPLIETNGETGEIVWDKGRDFATVRKVLSMPQVNIVKKTEVQTGGFSKESILPKRNSDKLIARKKDWDPKKYGGFDSPTVAYSVLVVAKVEKGKSKKLKSVKELLGITIMERSSFEKNPIDFLEAKGYKEVKKDLIIKLPKYSLFELENGRKRMLASAGELQKGNELALPSKYVNFLYLASHYEKLKGSPEDNEQKQLFVEQHKHYLDEIIEQISEFSKRVILADANLDKVLSAYNKHRDKPIREQAENIIHLFTLTNLGAPAAFKYFDTTIDRKRYTSTKEVLDATLIHQSITGLYETRIDLSQLGGDGGGGSGGLDDEYRLYSPLVKPDQNIQFWLEQFPQAWAETAGMGLAKQVPPQVIQLKASATPVSVRQYPLSKEAQEGIRPHVQRLIQQGILVPVQSPWNTPLLPVRKPGTNDYRPVQDLREVNKRVQDIHPTVPNPYNLLCALPPQRSWYTVLDLKDAFFCLRLHPTSQPLFAFEWRDPGTGRTGQLTWTRLPQGFKNSPTIFNEALHRDLANFRIQHPQVTLLQYVDDLLLAGATKQDCLEGTKALLLELSDLGYRASAKKAQICRREVTYLGYSLRDGQRWLTEARKKTVVQIPAPTTAKQVREFLGKAGFCRLFIPGFATLAAPLYPLTKPKGEFSWAPEHQKAFDAIKKALLSAPALALPDVTKPFTLYVDERKGVARGVLTQTLGPWRRPVAYLSKKLDPVASGWPVCLKAIAAVAILVKDADKLTLGQNITVIAPHALENIVRQPPDRWMTNARMTHYQSLLLTERVTFAPPAALNPATLLPEETDEPVTHDCHQLLIEETGVRKDLTDIPLTGEVLTWFTDGSSYVVEGKRMAGAAVVDGTRTIWASSLPEGTSAQKAELMALTQALRLAEGKSINIYTDSRYAFATAHVHGAIYKQRGWLTSAGREIKNKEEILSLLEALHLPKRLAIIHCPGHQKAKDPISRGNQMADRVAKQAAQGVNLLPAGKRTADGSEFEKRTADGSEFESPKKKAKVE

SEQ ID NO: 263 - protein, 2088 aa, synthetic construct; identical to SEQ ID NO: 92

SEQ ID NO: 264 - protein, 2088 aa, synthetic construct; identical to SEQ ID NO: 53

SEQ ID NO: 265 - protein, 2083 aa, synthetic construct; identical to SEQ ID NO: 79

SEQ ID NO: 266 - protein, 2082 aa, synthetic construct
MPAAKRVKLDGGDKKYSIGLDIGTNSVGWAVITDEYKVPSKKFKVLGNTDRHSIKKNLIGALLFDSGETAEATRLKRTARRRYTRRKNRICYLQEIFSNEMAKVDDSFFHRLEESFLVEEDKKHERHPIFGNIVDEVAYHEKYPTIYHLRKKLVDSTDKADLRLIYLALAHMIKFRGHFLIEGDLNPDNSDVDKLFIQLVQTYNQLFEENPINASGVDAKAILSARLSKSRRLENLIAQLPGEKKNGLFGNLIALSLGLTPNFKSNFDLAEDAKLQLSKDTYDDDLDNLLAQIGDQYADLFLAAKNLSDAILLSDILRVNTEITKAPLSASMIKRYDEHHQDLTLLKALVRQQLPEKYKEIFFDQSKNGYAGYIDGGASQEEFYKFIKPILEKMDGTEELLVKLNREDLLRKQRTFDNGSIPHQIHLGELHAILRRQEDFYPFLKDNREKIEKILTFRIPYYVGPLARGNSRFAWMTRKSEETITPWNFEEVVDKGASAQSFIERMTNFDKNLPNEKVLPKHSLLYEYFTVYNELTKVKYVTEGMRKPAFLSGEQKKAIVDLLFKTNRKVTVKQLKEDYFKKIECFDSVEISGVEDRFNASLGTYHDLLKIIKDKDFLDNEENEDILEDIVLTLTLFEDREMIEERLKTYAHLFDDKVMKQLKRRRYTGWGRLSRKLINGIRDKQSGKTILDFLKSDGFANRNFMQLIHDDSLTFKEDIQKAQVSGQGDSLHEHIANLAGSPAIKKGILQTVKVVDELVKVMGRHKPENIVIEMARENQTTQKGQKNSRERMKRIEEGIKELGSQILKEHPVENTQLQNEKLYLYYLQNGRDMYVDQELDINRLSDYDVDHIVPQSFLKDDSIDNKVLTRSDKARGKSDNVPSEEVVKKMKNYWRQLLNAKLITQRKFDNLTKAERGGLSELDKAGFIKRQLVETRQITKHVAQILDSRMNTKYDENDKLIREVKVITLKSKLVSDFRKDFQFYKVREINNYHHAHDAYLNAVVGTALIKKYPKLESEFVYGDYKVYDVRKMIAKSEQEIGKATAKYFFYSNIMNFFKTEITLANGEIRKRPLIETNGETGEIVWDKGRDFATVRKVLSMPQVNIVKKTEVQTGGFSKESILPKRNSDKLIARKKDWDPKKYGGFDSPTVAYSVLVVAKVEKGKSKKLKSVKELLGITIMERSSFEKNPIDFLEAKGYKEVKKDLIIKLPKYSLFELENGRKRMLASAGELQKGNELALPSKYVNFLYLASHYEKLKGSPEDNEQKQLFVEQHKHYLDEIIEQISEFSKRVILADANLDKVLSAYNKHRDKPIREQAENIIHLFTLTNLGAPAAFKYFDTTIDRKRYTSTKEVLDATLIHQSITGLYETRIDLSQLGGDGGPAPAPGGLDDEYRLYSPLVKPDQNIQFWLEQFPQAWAETAGMGLAKQVPPQVIQLKASATPVSVRQYPLSKEAQEGIRPHVQRLIQQGILVPVQSPWNTPLLPVRKPGTNDYRPVQDLREVNKRVQDIHPTVPNPYNLLCALPPQRSWYTVLDLKDAFFCLRLHPTSQPLFAFEWRDPGTGRTGQLTWTRLPQGFKNSPTIFNEALHRDLANFRIQHPQVTLLQYVDDLLLAGATKQDCLEGTKALLLELSDLGYRASAKKAQICRREVTYLGYSLRDGQRWLTEARKKTVVQIPAPTTAKQVREFLGKAGFCRLFIPGFATLAAPLYPLTKPKGEFSWAPEHQKAFDAIKKALLSAPALALPDVTKPFTLYVDERKGVARGVLTQTLGPWRRPVAYLSKKLDPVASGWPVCLKAIAAVAILVKDADKLTLGQNITVIAPHALENIVRQPPDRWMTNARMTHYQSLLLTERVTFAPPAALNPATLLPEETDEPVTHDCHQLLIEETGVRKDLTDIPLTGEVLTWFTDGSSYVVEGKRMAGAAVVDGTRTIWASSLPEGTSAQKAELMALTQALRLAEGKSINIYTDSRYAFATAHVHGAIYKQRGWLTSAGREIKNKEEILSLLEALHLPKRLAIIHCPGHQKAKDPISRGNQMADRVAKQAAQGVNLLPAGKRTADGSEFEKRTADGSEFESPKKKAKVE

SEQ ID NO: 267 - protein, 2086 aa, synthetic construct
MPAAKRVKLDGGDKKYSIGLDIGTNSVGWAVITDEYKVPSKKFKVLGNTDRHSIKKNLIGALLFDSGETAEATRLKRTARRRYTRRKNRICYLQEIFSNEMAKVDDSFFHRLEESFLVEEDKKHERHPIFGNIVDEVAYHEKYPTIYHLRKKLVDSTDKADLRLIYLALAHMIKFRGHFLIEGDLNPDNSDVDKLFIQLVQTYNQLFEENPINASGVDAKAILSARLSKSRRLENLIAQLPGEKKNGLFGNLIALSLGLTPNFKSNFDLAEDAKLQLSKDTYDDDLDNLLAQIGDQYADLFLAAKNLSDAILLSDILRVNTEITKAPLSASMIKRYDEHHQDLTLLKALVRQQLPEKYKEIFFDQSKNGYAGYIDGGASQEEFYKFIKPILEKMDGTEELLVKLNREDLLRKQRTFDNGSIPHQIHLGELHAILRRQEDFYPFLKDNREKIEKILTFRIPYYVGPLARGNSRFAWMTRKSEETITPWNFEEVVDKGASAQSFIERMTNFDKNLPNEKVLPKHSLLYEYFTVYNELTKVKYVTEGMRKPAFLSGEQKKAIVDLLFKTNRKVTVKQLKEDYFKKIECFDSVEISGVEDRFNASLGTYHDLLKIIKDKDFLDNEENEDILEDIVLTLTLFEDREMIEERLKTYAHLFDDKVMKQLKRRRYTGWGRLSRKLINGIRDKQSGKTILDFLKSDGFANRNFMQLIHDDSLTFKEDIQKAQVSGQGDSLHEHIANLAGSPAIKKGILQTVKVVDELVKVMGRHKPENIVIEMARENQTTQKGQKNSRERMKRIEEGIKELGSQILKEHPVENTQLQNEKLYLYYLQNGRDMYVDQELDINRLSDYDVDHIVPQSFLKDDSIDNKVLTRSDKARGKSDNVPSEEVVKKMKNYWRQLLNAKLITQRKFDNLTKAERGGLSELDKAGFIKRQLVETRQITKHVAQILDSRMNTKYDENDKLIREVKVITLKSKLVSDFRKDFQFYKVREINNYHHAHDAYLNAVVGTALIKKYPKLESEFVYGDYKVYDVRKMIAKSEQEIGKATAKYFFYSNIMNFFKTEITLANGEIRKRPLIETNGETGEIVWDKGRDFATVRKVLSMPQVNIVKKTEVQTGGFSKESILPKRNSDKLIARKKDWDPKKYGGFDSPTVAYSVLVVAKVEKGKSKKLKSVKELLGITIMERSSFEKNPIDFLEAKGYKEVKKDLIIKLPKYSLFELENGRKRMLASAGELQKGNELALPSKYVNFLYLASHYEKLKGSPEDNEQKQLFVEQHKHYLDEIIEQISEFSKRVILADANLDKVLSAYNKHRDKPIREQAENIIHLFTLTNLGAPAAFKYFDTTIDRKRYTSTKEVLDATLIHQSITGLYETRIDLSQLGGDGGGGSPAPGSSGGLDDEYRLYSPLVKPDQNIQFWLEQFPQAWAETAGMGLAKQVPPQVIQLKASATPVSVRQYPLSKEAQEGIRPHVQRLIQQGILVPVQSPWNTPLLPVRKPGTNDYRPVQDLREVNKRVQDIHPTVPNPYNLLCALPPQRSWYTVLDLKDAFFCLRLHPTSQPLFAFEWRDPGTGRTGQLTWTRLPQGFKNSPTIFNEALHRDLANFRIQHPQVTLLQYVDDLLLAGATKQDCLEGTKALLLELSDLGYRASAKKAQICRREVTYLGYSLRDGQRWLTEARKKTVVQIPAPTTAKQVREFLGKAGFCRLFIPGFATLAAPLYPLTKPKGEFSWAPEHQKAFDAIKKALLSAPALALPDVTKPFTLYVDERKGVARGVLTQTLGPWRRPVAYLSKKLDPVASGWPVCLKAIAAVAILVKDADKLTLGQNITVIAPHALENIVRQPPDRWMTNARMTHYQSLLLTERVTFAPPAALNPATLLPEETDEPVTHDCHQLLIEETGVRKDLTDIPLTGEVLTWFTDGSSYVVEGKRMAGAAVVDGTRTIWASSLPEGTSAQKAELMALTQALRLAEGKSINIYTDSRYAFATAHVHGAIYKQRGWLTSAGREIKNKEEILSLLEALHLPKRLAIIHCPGHQKAKDPISRGNQMADRVAKQAAQGVNLLPAGKRTADGSEFEKRTADGSEFESPKKKAKVE

SEQ ID NO: 268 - protein, 2086 aa, synthetic construct; identical to SEQ ID NO: 38

SEQ ID NO: 269 - protein, 2080 aa, synthetic construct
MPAAKRVKLDGGDKKYSIGLDIGTNSVGWAVITDEYKVPSKKFKVLGNTDRHSIKKNLIGALLFDSGETAEATRLKRTARRRYTRRKNRICYLQEIFSNEMAKVDDSFFHRLEESFLVEEDKKHERHPIFGNIVDEVAYHEKYPTIYHLRKKLVDSTDKADLRLIYLALAHMIKFRGHFLIEGDLNPDNSDVDKLFIQLVQTYNQLFEENPINASGVDAKAILSARLSKSRRLENLIAQLPGEKKNGLFGNLIALSLGLTPNFKSNFDLAEDAKLQLSKDTYDDDLDNLLAQIGDQYADLFLAAKNLSDAILLSDILRVNTEITKAPLSASMIKRYDEHHQDLTLLKALVRQQLPEKYKEIFFDQSKNGYAGYIDGGASQEEFYKFIKPILEKMDGTEELLVKLNREDLLRKQRTFDNGSIPHQIHLGELHAILRRQEDFYPFLKDNREKIEKILTFRIPYYVGPLARGNSRFAWMTRKSEETITPWNFEEVVDKGASAQSFIERMTNFDKNLPNEKVLPKHSLLYEYFTVYNELTKVKYVTEGMRKPAFLSGEQKKAIVDLLFKTNRKVTVKQLKEDYFKKIECFDSVEISGVEDRFNASLGTYHDLLKIIKDKDFLDNEENEDILEDIVLTLTLFEDREMIEERLKTYAHLFDDKVMKQLKRRRYTGWGRLSRKLINGIRDKQSGKTILDFLKSDGFANRNFMQLIHDDSLTFKEDIQKAQVSGQGDSLHEHIANLAGSPAIKKGILQTVKVVDELVKVMGRHKPENIVIEMARENQTTQKGQKNSRERMKRIEEGIKELGSQILKEHPVENTQLQNEKLYLYYLQNGRDMYVDQELDINRLSDYDVDHIVPQSFLKDDSIDNKVLTRSDKARGKSDNVPSEEVVKKMKNYWRQLLNAKLITQRKFDNLTKAERGGLSELDKAGFIKRQLVETRQITKHVAQILDSRMNTKYDENDKLIREVKVITLKSKLVSDFRKDFQFYKVREINNYHHAHDAYLNAVVGTALIKKYPKLESEFVYGDYKVYDVRKMIAKSEQEIGKATAKYFFYSNIMNFFKTEITLANGEIRKRPLIETNGETGEIVWDKGRDFATVRKVLSMPQVNIVKKTEVQTGGFSKESILPKRNSDKLIARKKDWDPKKYGGFDSPTVAYSVLVVAKVEKGKSKKLKSVKELLGITIMERSSFEKNPIDFLEAKGYKEVKKDLIIKLPKYSLFELENGRKRMLASAGELQKGNELALPSKYVNFLYLASHYEKLKGSPEDNEQKQLFVEQHKHYLDEIIEQISEFSKRVILADANLDKVLSAYNKHRDKPIREQAENIIHLFTLTNLGAPAAFKYFDTTIDRKRYTSTKEVLDATLIHQSITGLYETRIDLSQLGGDGGPAPGGLDDEYRLYSPLVKPDQNIQFWLEQFPQAWAETAGMGLAKQVPPQVIQLKASATPVSVRQYPLSKEAQEGIRPHVQRLIQQGILVPVQSPWNTPLLPVRKPGTNDYRPVQDLREVNKRVQDIHPTVPNPYNLLCALPPQRSWYTVLDLKDAFFCLRLHPTSQPLFAFEWRDPGTGRTGQLTWTRLPQGFKNSPTIFNEALHRDLANFRIQHPQVTLLQYVDDLLLAGATKQDCLEGTKALLLELSDLGYRASAKKAQICRREVTYLGYSLRDGQRWLTEARKKTVVQIPAPTTAKQVREFLGKAGFCRLFIPGFATLAAPLYPLTKPKGEFSWAPEHQKAFDAIKKALLSAPALALPDVTKPFTLYVDERKGVARGVLTQTLGPWRRPVAYLSKKLDPVASGWPVCLKAIAAVAILVKDADKLTLGQNITVIAPHALENIVRQPPDRWMTNARMTHYQSLLLTERVTFAPPAALNPATLLPEETDEPVTHDCHQLLIEETGVRKDLTDIPLTGEVLTWFTDGSSYVVEGKRMAGAAVVDGTRTIWASSLPEGTSAQKAELMALTQALRLAEGKSINIYTDSRYAFATAHVHGAIYKQRGWLTSAGREIKNKEEILSLLEALHLPKRLAIIHCPGHQKAKDPISRGNQMADRVAKQAAQGVNLLPAGKRTADGSEFEKRTADGSEFESPKKKAKVE

SEQ ID NO: 270 - protein, 2086 aa, synthetic construct; identical to SEQ ID NO: 69

SEQ ID NO: 271 - protein, 2083 aa, synthetic construct; identical to SEQ ID NO: 88

SEQ ID NO: 272 - protein, 2086 aa, synthetic construct; identical to SEQ ID NO: 85

SEQ ID NO: 273 - protein, 2085 aa, synthetic construct
MPAAKRVKLDGGDKKYSIGLDIGTNSVGWAVITDEYKVPSKKFKVLGNTDRHSIKKNLIGALLFDSGETAEATRLKRTARRRYTRRKNRICYLQEIFSNEMAKVDDSFFHRLEESFLVEEDKKHERHPIFGNIVDEVAYHEKYPTIYHLRKKLVDSTDKADLRLIYLALAHMIKFRGHFLIEGDLNPDNSDVDKLFIQLVQTYNQLFEENPINASGVDAKAILSARLSKSRRLENLIAQLPGEKKNGLFGNLIALSLGLTPNFKSNFDLAEDAKLQLSKDTYDDDLDNLLAQIGDQYADLFLAAKNLSDAILLSDILRVNTEITKAPLSASMIKRYDEHHQDLTLLKALVRQQLPEKYKEIFFDQSKNGYAGYIDGGASQEEFYKFIKPILEKMDGTEELLVKLNREDLLRKQRTFDNGSIPHQIHLGELHAILRRQEDFYPFLKDNREKIEKILTFRIPYYVGPLARGNSRFAWMTRKSEETITPWNFEEVVDKGASAQSFIERMTNFDKNLPNEKVLPKHSLLYEYFTVYNELTKVKYVTEGMRKPAFLSGEQKKAIVDLLFKTNRKVTVKQLKEDYFKKIECFDSVEISGVEDRFNASLGTYHDLLKIIKDKDFLDNEENEDILEDIVLTLTLFEDREMIEERLKTYAHLFDDKVMKQLKRRRYTGWGRLSRKLINGIRDKQSGKTILDFLKSDGFANRNFMQLIHDDSLTFKEDIQKAQVSGQGDSLHEHIANLAGSPAIKKGILQTVKVVDELVKVMGRHKPENIVIEMARENQTTQKGQKNSRERMKRIEEGIKELGSQILKEHPVENTQLQNEKLYLYYLQNGRDMYVDQELDINRLSDYDVDHIVPQSFLKDDSIDNKVLTRSDKARGKSDNVPSEEVVKKMKNYWRQLLNAKLITQRKFDNLTKAERGGLSELDKAGFIKRQLVETRQITKHVAQILDSRMNTKYDENDKLIREVKVITLKSKLVSDFRKDFQFYKVREINNYHHAHDAYLNAVVGTALIKKYPKLESEFVYGDYKVYDVRKMIAKSEQEIGKATAKYFFYSNIMNFFKTEITLANGEIRKRPLIETNGETGEIVWDKGRDFATVRKVLSMPQVNIVKKTEVQTGGFSKESILPKRNSDKLIARKKDWDPKKYGGFDSPTVAYSVLVVAKVEKGKSKKLKSVKELLGITIMERSSFEKNPIDFLEAKGYKEVKKDLIIKLPKYSLFELENGRKRMLASAGELQKGNELALPSKYVNFLYLASHYEKLKGSPEDNEQKQLFVEQHKHYLDEIIEQISEFSKRVILADANLDKVLSAYNKHRDKPIREQAENIIHLFTLTNLGAPAAFKYFDTTIDRKRYTSTKEVLDATLIHQSITGLYETRIDLSQLGGDGGGGGEAAAKGGLDDEYRLYSPLVKPDQNIQFWLEQFPQAWAETAGMGLAKQVPPQVIQLKASATPVSVRQYPLSKEAQEGIRPHVQRLIQQGILVPVQSPWNTPLLPVRKPGTNDYRPVQDLREVNKRVQDIHPTVPNPYNLLCALPPQRSWYTVLDLKDAFFCLRLHPTSQPLFAFEWRDPGTGRTGQLTWTRLPQGFKNSPTIFNEALHRDLANFRIQHPQVTLLQYVDDLLLAGATKQDCLEGTKALLLELSDLGYRASAKKAQICRREVTYLGYSLRDGQRWLTEARKKTVVQIPAPTTAKQVREFLGKAGFCRLFIPGFATLAAPLYPLTKPKGEFSWAPEHQKAFDAIKKALLSAPALALPDVTKPFTLYVDERKGVARGVLTQTLGPWRRPVAYLSKKLDPVASGWPVCLKAIAAVAILVKDADKLTLGQNITVIAPHALENIVRQPPDRWMTNARMTHYQSLLLTERVTFAPPAALNPATLLPEETDEPVTHDCHQLLIEETGVRKDLTDIPLTGEVLTWFTDGSSYVVEGKRMAGAAVVDGTRTIWASSLPEGTSAQKAELMALTQALRLAEGKSINIYTDSRYAFATAHVHGAIYKQRGWLTSAGREIKNKEEILSLLEALHLPKRLAIIHCPGHQKAKDPISRGNQMADRVAKQAAQGVNLLPAGKRTADGSEFEKRTADGSEFESPKKKAKVE

SEQ ID NO: 274 - protein, 2086 aa, synthetic construct
MPAAKRVKLDGGDKKYSIGLDIGTNSVGWAVITDEYKVPSKKFKVLGNTDRHSIKKNLIGALLFDSGETAEATRLKRTARRRYTRRKNRICYLQEIFSNEMAKVDDSFFHRLEESFLVEEDKKHERHPIFGNIVDEVAYHEKYPTIYHLRKKLVDSTDKADLRLIYLALAHMIKFRGHFLIEGDLNPDNSDVDKLFIQLVQTYNQLFEENPINASGVDAKAILSARLSKSRRLENLIAQLPGEKKNGLFGNLIALSLGLTPNFKSNFDLAEDAKLQLSKDTYDDDLDNLLAQIGDQYADLFLAAKNLSDAILLSDILRVNTEITKAPLSASMIKRYDEHHQDLTLLKALVRQQLPEKYKEIFFDQSKNGYAGYIDGGASQEEFYKFIKPILEKMDGTEELLVKLNREDLLRKQRTFDNGSIPHQIHLGELHAILRRQEDFYPFLKDNREKIEKILTFRIPYYVGPLARGNSRFAWMTRKSEETITPWNFEEVVDKGASAQSFIERMTNFDKNLPNEKVLPKHSLLYEYFTVYNELTKVKYVTEGMRKPAFLSGEQKKAIVDLLFKTNRKVTVKQLKEDYFKKIECFDSVEISGVEDRFNASLGTYHDLLKIIKDKDFLDNEENEDILEDIVLTLTLFEDREMIEERLKTYAHLFDDKVMKQLKRRRYTGWGRLSRKLINGIRDKQSGKTILDFLKSDGFANRNFMQLIHDDSLTFKEDIQKAQVSGQGDSLHEHIANLAGSPAIKKGILQTVKVVDELVKVMGRHKPENIVIEMARENQTTQKGQKNSRERMKRIEEGIKELGSQILKEHPVENTQLQNEKLYLYYLQNGRDMYVDQELDINRLSDYDVDHIVPQSFLKDDSIDNKVLTRSDKARGKSDNVPSEEVVKKMKNYWRQLLNAKLITQRKFDNLTKAERGGLSELDKAGFIKRQLVETRQITKHVAQILDSRMNTKYDENDKLIREVKVITLKSKLVSDFRKDFQFYKVREINNYHHAHDAYLNAVVGTALIKKYPKLESEFVYGDYKVYDVRKMIAKSEQEIGKATAKYFFYSNIMNFFKTEITLANGEIRKRPLIETNGETGEIVWDKGRDFATVRKVLSMPQVNIVKKTEVQTGGFSKESILPKRNSDKLIARKKDWDPKKYGGFDSPTVAYSVLVVAKVEKGKSKKLKSVKELLGITIMERSSFEKNPIDFLEAKGYKEVKKDLIIKLPKYSLFELENGRKRMLASAGELQKGNELALPSKYVNFLYLASHYEKLKGSPEDNEQKQLFVEQHKHYLDEIIEQISEFSKRVILADANLDKVLSAYNKHRDKPIREQAENIIHLFTLTNLGAPAAFKYFDTTIDRKRYTSTKEVLDATLIHQSITGLYETRIDLSQLGGDGGGGSGGGGSSGGLDDEYRLYSPLVKPDQNIQFWLEQFPQAWAETAGMGLAKQVPPQVIQLKASATPVSVRQYPLSKEAQEGIRPHVQRLIQQGILVPVQSPWNTPLLPVRKPGTNDYRPVQDLREVNKRVQDIHPTVPNPYNLLCALPPQRSWYTVLDLKDAFFCLRLHPTSQPLFAFEWRDPGTGRTGQLTWTRLPQGFKNSPTIFNEALHRDLANFRIQHPQVTLLQYVDDLLLAGATKQDCLEGTKALLLELSDLGYRASAKKAQICRREVTYLGYSLRDGQRWLTEARKKTVVQIPAPTTAKQVREFLGKAGFCRLFIPGFATLAAPLYPLTKPKGEFSWAPEHQKAFDAIKKALLSAPALALPDVTKPFTLYVDERKGVARGVLTQTLGPWRRPVAYLSKKLDPVASGWPVCLKAIAAVAILVKDADKLTLGQNITVIAPHALENIVRQPPDRWMTNARMTHYQSLLLTERVTFAPPAALNPATLLPEETDEPVTHDCHQLLIEETGVRKDLTDIPLTGEVLTWFTDGSSYVVEGKRMAGAAVVDGTRTIWASSLPEGTSAQKAELMALTQALRLAEGKSINIYTDSRYAFATAHVHGAIYKQRGWLTSAGREIKNKEEILSLLEALHLPKRLAIIHCPGHQKAKDPISRGNQMADRVAKQAAQGVNLLPAGKRTADGSEFEKRTADGSEFESPKKKAKVE

SEQ ID NO: 275 - protein, 2086 aa, synthetic construct; identical to SEQ ID NO: 91

SEQ ID NO: 276 - protein, 2086 aa, synthetic construct; identical to SEQ ID NO: 95

SEQ ID NO: 277 - protein, 2085 aa, synthetic construct
MPAAKRVKLDGGDKKYSIGLDIGTNSVGWAVITDEYKVPSKKFKVLGNTDRHSIKKNLIGALLFDSGETAEATRLKRTARRRYTRRKNRICYLQEIFSNEMAKVDDSFFHRLEESFLVEEDKKHERHPIFGNIVDEVAYHEKYPTIYHLRKKLVDSTDKADLRLIYLALAHMIKFRGHFLIEGDLNPDNSDVDKLFIQLVQTYNQLFEENPINASGVDAKAILSARLSKSRRLENLIAQLPGEKKNGLFGNLIALSLGLTPNFKSNFDLAEDAKLQLSKDTYDDDLDNLLAQIGDQYADLFLAAKNLSDAILLSDILRVNTEITKAPLSASMIKRYDEHHQDLTLLKALVRQQLPEKYKEIFFDQSKNGYAGYIDGGASQEEFYKFIKPILEKMDGTEELLVKLNREDLLRKQRTFDNGSIPHQIHLGELHAILRRQEDFYPFLKDNREKIEKILTFRIPYYVGPLARGNSRFAWMTRKSEETITPWNFEEVVDKGASAQSFIERMTNFDKNLPNEKVLPKHSLLYEYFTVYNELTKVKYVTEGMRKPAFLSGEQKKAIVDLLFKTNRKVTVKQLKEDYFKKIECFDSVEISGVEDRFNASLGTYHDLLKIIKDKDFLDNEENEDILEDIVLTLTLFEDREMIEERLKTYAHLFDDKVMKQLKRRRYTGWGRLSRKLINGIRDKQSGKTILDFLKSDGFANRNFMQLIHDDSLTFKEDIQKAQVSGQGDSLHEHIANLAGSPAIKKGILQTVKVVDELVKVMGRHKPENIVIEMARENQTTQKGQKNSRERMKRIEEGIKELGSQILKEHPVENTQLQNEKLYLYYLQNGRDMYVDQELDINRLSDYDVDHIVPQSFLKDDSIDNKVLTRSDKARGKSDNVPSEEVVKKMKNYWRQLLNAKLITQRKFDNLTKAERGGLSELDKAGFIKRQLVETRQITKHVAQILDSRMNTKYDENDKLIREVKVITLKSKLVSDFRKDFQFYKVREINNYHHAHDAYLNAVVGTALIKKYPKLESEFVYGDYKVYDVRKMIAKSEQEIGKATAKYFFYSNIMNFFKTEITLANGEIRKRPLIETNGETGEIVWDKGRDFATVRKVLSMPQVNIVKKTEVQTGGFSKESILPKRNSDKLIARKKDWDPKKYGGFDSPTVAYSVLVVAKVEKGKSKKLKSVKELLGITIMERSSFEKNPIDFLEAKGYKEVKKDLIIKLPKYSLFELENGRKRMLASAGELQKGNELALPSKYVNFLYLASHYEKLKGSPEDNEQKQLFVEQHKHYLDEIIEQISEFSKRVILADANLDKVLSAYNKHRDKPIREQAENIIHLFTLTNLGAPAAFKYFDTTIDRKRYTSTKEVLDATLIHQSITGLYETRIDLSQLGGDGGGGSEAAAKGGLDDEYRLYSPLVKPDQNIQFWLEQFPQAWAETAGMGLAKQVPPQVIQLKASATPVSVRQYPLSKEAQEGIRPHVQRLIQQGILVPVQSPWNTPLLPVRKPGTNDYRPVQDLREVNKRVQDIHPTVPNPYNLLCALPPQRSWYTVLDLKDAFFCLRLHPTSQPLFAFEWRDPGTGRTGQLTWTRLPQGFKNSPTIFNEALHRDLANFRIQHPQVTLLQYVDDLLLAGATKQDCLEGTKALLLELSDLGYRASAKKAQICRREVTYLGYSLRDGQRWLTEARKKTVVQIPAPTTAKQVREFLGKAGFCRLFIPGFATLAAPLYPLTKPKGEFSWAPEHQKAFDAIKKALLSAPALALPDVTKPFTLYVDERKGVARGVLTQTLGPWRRPVAYLSKKLDPVASGWPVCLKAIAAVAILVKDADKLTLGQNITVIAPHALENIVRQPPDRWMTNARMTHYQSLLLTERVTFAPPAALNPATLLPEETDEPVTHDCHQLLIEETGVRKDLTDIPLTGEVLTWFTDGSSYVVEGKRMAGAAVVDGTRTIWASSLPEGTSAQKAELMALTQALRLAEGKSINIYTDSRYAFATAHVHGAIYKQRGWLTSAGREIKNKEEILSLLEALHLPKRLAIIHCPGHQKAKDPISRGNQMADRVAKQAAQGVNLLPAGKRTADGSEFEKRTADGSEFESPKKKAKVE

SEQ ID NO: 278 - protein, 2090 aa, synthetic construct; identical to SEQ ID NO: 112

SEQ ID NO: 279 - protein, 2094 aa, synthetic construct
MPAAKRVKLDGGDKKYSIGLDIGTNSVGWAVITDEYKVPSKKFKVLGNTDRHSIKKNLIGALLFDSGETAEATRLKRTARRRYTRRKNRICYLQEIFSNEMAKVDDSFFHRLEESFLVEEDKKHERHPIFGNIVDEVAYHEKYPTIYHLRKKLVDSTDKADLRLIYLALAHMIKFRGHFLIEGDLNPDNSDVDKLFIQLVQTYNQLFEENPINASGVDAKAILSARLSKSRRLENLIAQLPGEKKNGLFGNLIALSLGLTPNFKSNFDLAEDAKLQLSKDTYDDDLDNLLAQIGDQYADLFLAAKNLSDAILLSDILRVNTEITKAPLSASMIKRYDEHHQDLTLLKALVRQQLPEKYKEIFFDQSKNGYAGYIDGGASQEEFYKFIKPILEKMDGTEELLVKLNREDLLRKQRTFDNGSIPHQIHLGELHAILRRQEDFYPFLKDNREKIEKILTFRIPYYVGPLARGNSRFAWMTRKSEETITPWNFEEVVDKGASAQSFIERMTNFDKNLPNEKVLPKHSLLYEYFTVYNELTKVKYVTEGMRKPAFLSGEQKKAIVDLLFKTNRKVTVKQLKEDYFKKIECFDSVEISGVEDRFNASLGTYHDLLKIIKDKDFLDNEENEDILEDIVLTLTLFEDREMIEERLKTYAHLFDDKVMKQLKRRRYTGWGRLSRKLINGIRDKQSGKTILDFLKSDGFANRNFMQLIHDDSLTFKEDIQKAQVSGQGDSLHEHIANLAGSPAIKKGILQTVKVVDELVKVMGRHKPENIVIEMARENQTTQKGQKNSRERMKRIEEGIKELGSQILKEHPVENTQLQNEKLYLYYLQNGRDMYVDQELDINRLSDYDVDHIVPQSFLKDDSIDNKVLTRSDKARGKSDNVPSEEVVKKMKNYWRQLLNAKLITQRKFDNLTKAERGGLSELDKAGFIKRQLVETRQITKHVAQILDSRMNTKYDENDKLIREVKVITLKSKLVSDFRKDFQFYKVREINNYHHAHDAYLNAVVGTALIKKYPKLESEFVYGDYKVYDVRKMIAKSEQEIGKATAKYFFYSNIMNFFKTEITLANGEIRKRPLIETNGETGEIVWDKGRDFATVRKVLSMPQVNIVKKTEVQTGGFSKESILPKRNSDKLIARKKDWDPKKYGGFDSPTVAYSVLVVAKVEKGKSKKLKSVKELLGITIMERSSFEKNPIDFLEAKGYKEVKKDLIIKLPKYSLFELENGRKRMLASAGELQKGNELALPSKYVNFLYLASHYEKLKGSPEDNEQKQLFVEQHKHYLDEIIEQISEFSKRVILADANLDKVLSAYNKHRDKPIREQAENIIHLFTLTNLGAPAAFKYFDTTIDRKRYTSTKEVLDATLIHQSITGLYETRIDLSQLGGDGGEAAAKEAAAKEAAAKGGTLQLDDEYRLYSPLVKPDQNIQFWLEQFPQAWAETAGMGLAKQVPPQVIQLKASATPVSVRQYPLSKEAQEGIRPHVQRLIQQGILVPVQSPWNTPLLPVRKPGTNDYRPVQDLREVNKRVQDIHPTVPNPYNLLCALPPQRSWYTVLDLKDAFFCLRLHPTSQPLFAFEWRDPGTGRTGQLTWTRLPQGFKNSPTIFDEALHRDLANFRIQHPQVTLLQYVDDLLLAGATKQDCLEGTKALLLELSDLGYRASAKKAQICRREVTYLGYSLRDGQRWLTEARKKTVVQIPAPTTAKQVREFLGTAGFCRLWIPGFATLAAPLYPLTKEKGEFSWAPEHQKAFDAIKKALLSAPALALPDVTKPFTLYVDERKGVARGVLTQTLGPWRRPVAYLSKKLDPVASGWPVCLKAIAAVAILVKDADKLTLGQNITVIAPHALENIVRQPPDRWMTNARMTHYQSLLLTERVTFAPPAALNPATLLPEETDEPVTHDCHQLLIEETGVRKDLTDIPLTGEVLTWFTDGSSYVVEGKRMAGAAVVDGTRTIWASSLPEGTSAQKAELMALTQALRLAEGKSINIYTDSRYAFATAHVHGAIYKQRGLLTSAGREIKNKEEILSLLEALHLPKRLAIIHCPGHQKAKDPISRGNQMADRVAKQAAQGVNLLAGKRTADGSEFEKRTADGSEFESPKKKAKVE

SEQ ID NO: 280 - protein, 2109 aa, synthetic construct
MPAAKRVKLDGGDKKYSIGLDIGTNSVGWAVITDEYKVPSKKFKVLGNTDRHSIKKNLIGALLFDSGETAEATRLKRTARRRYTRRKNRICYLQEIFSNEMAKVDDSFFHRLEESFLVEEDKKHERHPIFGNIVDEVAYHEKYPTIYHLRKKLVDSTDKADLRLIYLALAHMIKFRGHFLIEGDLNPDNSDVDKLFIQLVQTYNQLFEENPINASGVDAKAILSARLSKSRRLENLIAQLPGEKKNGLFGNLIALSLGLTPNFKSNFDLAEDAKLQLSKDTYDDDLDNLLAQIGDQYADLFLAAKNLSDAILLSDILRVNTEITKAPLSASMIKRYDEHHQDLTLLKALVRQQLPEKYKEIFFDQSKNGYAGYIDGGASQEEFYKFIKPILEKMDGTEELLVKLNREDLLRKQRTFDNGSIPHQIHLGELHAILRRQEDFYPFLKDNREKIEKILTFRIPYYVGPLARGNSRFAWMTRKSEETITPWNFEEVVDKGASAQSFIERMTNFDKNLPNEKVLPKHSLLYEYFTVYNELTKVKYVTEGMRKPAFLSGEQKKAIVDLLFKTNRKVTVKQLKEDYFKKIECFDSVEISGVEDRFNASLGTYHDLLKIIKDKDFLDNEENEDILEDIVLTLTLFEDREMIEERLKTYAHLFDDKVMKQLKRRRYTGWGRLSRKLINGIRDKQSGKTILDFLKSDGFANRNFMQLIHDDSLTFKEDIQKAQVSGQGDSLHEHIANLAGSPAIKKGILQTVKVVDELVKVMGRHKPENIVIEMARENQTTQKGQKNSRERMKRIEEGIKELGSQILKEHPVENTQLQNEKLYLYYLQNGRDMYVDQELDINRLSDYDVDHIVPQSFLKDDSIDNKVLTRSDKARGKSDNVPSEEVVKKMKNYWRQLLNAKLITQRKFDNLTKAERGGLSELDKAGFIKRQLVETRQITKHVAQILDSRMNTKYDENDKLIREVKVITLKSKLVSDFRKDFQFYKVREINNYHHAHDAYLNAVVGTALIKKYPKLESEFVYGDYKVYDVRKMIAKSEQEIGKATAKYFFYSNIMNFFKTEITLANGEIRKRPLIETNGETGEIVWDKGRDFATVRKVLSMPQVNIVKKTEVQTGGFSKESILPKRNSDKLIARKKDWDPKKYGGFDSPTVAYSVLVVAKVEKGKSKKLKSVKELLGITIMERSSFEKNPIDFLEAKGYKEVKKDLIIKLPKYSLFELENGRKRMLASAGELQKGNELALPSKYVNFLYLASHYEKLKGSPEDNEQKQLFVEQHKHYLDEIIEQISEFSKRVILADANLDKVLSAYNKHRDKPIREQAENIIHLFTLTNLGAPAAFKYFDTTIDRKRYTSTKEVLDATLIHQSITGLYETRIDLSQLGGDGGEAAAKEAAAKEAAAKEAAAKEAAAKEAAAKGGTLQLDDEYRLYSPLVKPDQNIQFWLEQFPQAWAETAGMGLAKQVPPQVIQLKASATPVSVRQYPLSKEAQEGIRPHVQRLIQQGILVPVQSPWNTPLLPVRKPGTNDYRPVQDLREVNKRVQDIHPTVPNPYNLLCALPPQRSWYTVLDLKDAFFCLRLHPTSQPLFAFEWRDPGTGRTGQLTWTRLPQGFKNSPTIFDEALHRDLANFRIQHPQVTLLQYVDDLLLAGATKQDCLEGTKALLLELSDLGYRASAKKAQICRREVTYLGYSLRDGQRWLTEARKKTVVQIPAPTTAKQVREFLGTAGFCRLWIPGFATLAAPLYPLTKEKGEFSWAPEHQKAFDAIKKALLSAPALALPDVTKPFTLYVDERKGVARGVLTQTLGPWRRPVAYLSKKLDPVASGWPVCLKAIAAVAILVKDADKLTLGQNITVIAPHALENIVRQPPDRWMTNARMTHYQSLLLTERVTFAPPAALNPATLLPEETDEPVTHDCHQLLIEETGVRKDLTDIPLTGEVLTWFTDGSSYVVEGKRMAGAAVVDGTRTIWASSLPEGTSAQKAELMALTQALRLAEGKSINIYTDSRYAFATAHVHGAIYKQRGLLTSAGREIKNKEEILSLLEALHLPKRLAIIHCPGHQKAKDPISRGNQMADRVAKQAAQGVNLLAGKRTADGSEFEKRTADGSEFESPKKKAKVE

SEQ ID NO: 281 - protein, 2088 aa, synthetic construct
MPAAKRVKLDGGDKKYSIGLDIGTNSVGWAVITDEYKVPSKKFKVLGNTDRHSIKKNLIGALLFDSGETAEATRLKRTARRRYTRRKNRICYLQEIFSNEMAKVDDSFFHRLEESFLVEEDKKHERHPIFGNIVDEVAYHEKYPTIYHLRKKLVDSTDKADLRLIYLALAHMIKFRGHFLIEGDLNPDNSDVDKLFIQLVQTYNQLFEENPINASGVDAKAILSARLSKSRRLENLIAQLPGEKKNGLFGNLIALSLGLTPNFKSNFDLAEDAKLQLSKDTYDDDLDNLLAQIGDQYADLFLAAKNLSDAILLSDILRVNTEITKAPLSASMIKRYDEHHQDLTLLKALVRQQLPEKYKEIFFDQSKNGYAGYIDGGASQEEFYKFIKPILEKMDGTEELLVKLNREDLLRKQRTFDNGSIPHQIHLGELHAILRRQEDFYPFLKDNREKIEKILTFRIPYYVGPLARGNSRFAWMTRKSEETITPWNFEEVVDKGASAQSFIERMTNFDKNLPNEKVLPKHSLLYEYFTVYNELTKVKYVTEGMRKPAFLSGEQKKAIVDLLFKTNRKVTVKQLKEDYFKKIECFDSVEISGVEDRFNASLGTYHDLLKIIKDKDFLDNEENEDILEDIVLTLTLFEDREMIEERLKTYAHLFDDKVMKQLKRRRYTGWGRLSRKLINGIRDKQSGKTILDFLKSDGFANRNFMQLIHDDSLTFKEDIQKAQVSGQGDSLHEHIANLAGSPAIKKGILQTVKVVDELVKVMGRHKPENIVIEMARENQTTQKGQKNSRERMKRIEEGIKELGSQILKEHPVENTQLQNEKLYLYYLQNGRDMYVDQELDINRLSDYDVDHIVPQSFLKDDSIDNKVLTRSDKARGKSDNVPSEEVVKKMKNYWRQLLNAKLITQRKFDNLTKAERGGLSELDKAGFIKRQLVETRQITKHVAQILDSRMNTKYDENDKLIREVKVITLKSKLVSDFRKDFQFYKVREINNYHHAHDAYLNAVVGTALIKKYPKLESEFVYGDYKVYDVRKMIAKSEQEIGKATAKYFFYSNIMNFFKTEITLANGEIRKRPLIETNGETGEIVWDKGRDFATVRKVLSMPQVNIVKKTEVQTGGFSKESILPKRNSDKLIARKKDWDPKKYGGFDSPTVAYSVLVVAKVEKGKSKKLKSVKELLGITIMERSSFEKNPIDFLEAKGYKEVKKDLIIKLPKYSLFELENGRKRMLASAGELQKGNELALPSKYVNFLYLASHYEKLKGSPEDNEQKQLFVEQHKHYLDEIIEQISEFSKRVILADANLDKVLSAYNKHRDKPIREQAENIIHLFTLTNLGAPAAFKYFDTTIDRKRYTSTKEVLDATLIHQSITGLYETRIDLSQLGGDGGPAPGGSGSSGGTLQLDDEYRLYSPLVKPDQNIQFWLEQFPQAWAETAGMGLAKQVPPQVIQLKASATPVSVRQYPLSKEAQEGIRPHVQRLIQQGILVPVQSPWNTPLLPVRKPGTNDYRPVQDLREVNKRVQDIHPTVPNPYNLLCALPPQRSWYTVLDLKDAFFCLRLHPTSQPLFAFEWRDPGTGRTGQLTWTRLPQGFKNSPTIFDEALHRDLANFRIQHPQVTLLQYVDDLLLAGATKQDCLEGTKALLLELSDLGYRASAKKAQICRREVTYLGYSLRDGQRWLTEARKKTVVQIPAPTTAKQVREFLGTAGFCRLWIPGFATLAAPLYPLTKEKGEFSWAPEHQKAFDAIKKALLSAPALALPDVTKPFTLYVDERKGVARGVLTQTLGPWRRPVAYLSKKLDPVASGWPVCLKAIAAVAILVKDADKLTLGQNITVIAPHALENIVRQPPDRWMTNARMTHYQSLLLTERVTFAPPAALNPATLLPEETDEPVTHDCHQLLIEETGVRKDLTDIPLTGEVLTWFTDGSSYVVEGKRMAGAAVVDGTRTIWASSLPEGTSAQKAELMALTQALRLAEGKSINIYTDSRYAFATAHVHGAIYKQRGLLTSAGREIKNKEEILSLLEALHLPKRLAIIHCPGHQKAKDPISRGNQMADRVAKQAAQGVNLLAGKRTADGSEFEKRTADGSEFESPKKKAKVE

SEQ ID NO: 282 - protein, 2087 aa, synthetic construct
MPAAKRVKLDGGDKKYSIGLDIGTNSVGWAVITDEYKVPSKKFKVLGNTDRHSIKKNLIGALLFDSGETAEATRLKRTARRRYTRRKNRICYLQEIFSNEMAKVDDSFFHRLEESFLVEEDKKHERHPIFGNIVDEVAYHEKYPTIYHLRKKLVDSTDKADLRLIYLALAHMIKFRGHFLIEGDLNPDNSDVDKLFIQLVQTYNQLFEENPINASGVDAKAILSARLSKSRRLENLIAQLPGEKKNGLFGNLIALSLGLTPNFKSNFDLAEDAKLQLSKDTYDDDLDNLLAQIGDQYADLFLAAKNLSDAILLSDILRVNTEITKAPLSASMIKRYDEHHQDLTLLKALVRQQLPEKYKEIFFDQSKNGYAGYIDGGASQEEFYKFIKPILEKMDGTEELLVKLNREDLLRKQRTFDNGSIPHQIHLGELHAILRRQEDFYPFLKDNREKIEKILTFRIPYYVGPLARGNSRFAWMTRKSEETITPWNFEEVVDKGASAQSFIERMTNFDKNLPNEKVLPKHSLLYEYFTVYNELTKVKYVTEGMRKPAFLSGEQKKAIVDLLFKTNRKVTVKQLKEDYFKKIECFDSVEISGVEDRFNASLGTYHDLLKIIKDKDFLDNEENEDILEDIVLTLTLFEDREMIEERLKTYAHLFDDKVMKQLKRRRYTGWGRLSRKLINGIRDKQSGKTILDFLKSDGFANRNFMQLIHDDSLTFKEDIQKAQVSGQGDSLHEHIANLAGSPAIKKGILQTVKVVDELVKVMGRHKPENIVIEMARENQTTQKGQKNSRERMKRIEEGIKELGSQILKEHPVENTQLQNEKLYLYYLQNGRDMYVDQELDINRLSDYDVDHIVPQSFLKDDSIDNKVLTRSDKARGKSDNVPSEEVVKKMKNYWRQLLNAKLITQRKFDNLTKAERGGLSELDKAGFIKRQLVETRQITKHVAQILDSRMNTKYDENDKLIREVKVITLKSKLVSDFRKDFQFYKVREINNYHHAHDAYLNAVVGTALIKKYPKLESEFVYGDYKVYDVRKMIAKSEQEIGKATAKYFFYSNIMNFFKTEITLANGEIRKRPLIETNGETGEIVWDKGRDFATVRKVLSMPQVNIVKKTEVQTGGFSKESILPKRNSDKLIARKKDWDPKKYGGFDSPTVAYSVLVVAKVEKGKSKKLKSVKELLGITIMERSSFEKNPIDFLEAKGYKEVKKDLIIKLPKYSLFELENGRKRMLASAGELQKGNELALPSKYVNFLYLASHYEKLKGSPEDNEQKQLFVEQHKHYLDEIIEQISEFSKRVILADANLDKVLSAYNKHRDKPIREQAENIIHLFTLTNLGAPAAFKYFDTTIDRKRYTSTKEVLDATLIHQSITGLYETRIDLSQLGGDGGEAAAKGGGGGTLQLDDEYRLYSPLVKPDQNIQFWLEQFPQAWAETAGMGLAKQVPPQVIQLKASATPVSVRQYPLSKEAQEGIRPHVQRLIQQGILVPVQSPWNTPLLPVRKPGTNDYRPVQDLREVNKRVQDIHPTVPNPYNLLCALPPQRSWYTVLDLKDAFFCLRLHPTSQPLFAFEWRDPGTGRTGQLTWTRLPQGFKNSPTIFDEALHRDLANFRIQHPQVTLLQYVDDLLLAGATKQDCLEGTKALLLELSDLGYRASAKKAQICRREVTYLGYSLRDGQRWLTEARKKTVVQIPAPTTAKQVREFLGTAGFCRLWIPGFATLAAPLYPLTKEKGEFSWAPEHQKAFDAIKKALLSAPALALPDVTKPFTLYVDERKGVARGVLTQTLGPWRRPVAYLSKKLDPVASGWPVCLKAIAAVAILVKDADKLTLGQNITVIAPHALENIVRQPPDRWMTNARMTHYQSLLLTERVTFAPPAALNPATLLPEETDEPVTHDCHQLLIEETGVRKDLTDIPLTGEVLTWFTDGSSYVVEGKRMAGAAVVDGTRTIWASSLPEGTSAQKAELMALTQALRLAEGKSINIYTDSRYAFATAHVHGAIYKQRGLLTSAGREIKNKEEILSLLEALHLPKRLAIIHCPGHQKAKDPISRGNQMADRVAKQAAQGVNLLAGKRTADGSEFEKRTADGSEFESPKKKAKVE

SEQ ID NO: 283 - protein, 2091 aa, synthetic construct
MPAAKRVKLDGGDKKYSIGLDIGTNSVGWAVITDEYKVPSKKFKVLGNTDRHSIKKNLIGALLFDSGETAEATRLKRTARRRYTRRKNRICYLQEIFSNEMAKVDDSFFHRLEESFLVEEDKKHERHPIFGNIVDEVAYHEKYPTIYHLRKKLVDSTDKADLRLIYLALAHMIKFRGHFLIEGDLNPDNSDVDKLFIQLVQTYNQLFEENPINASGVDAKAILSARLSKSRRLENLIAQLPGEKKNGLFGNLIALSLGLTPNFKSNFDLAEDAKLQLSKDTYDDDLDNLLAQIGDQYADLFLAAKNLSDAILLSDILRVNTEITKAPLSASMIKRYDEHHQDLTLLKALVRQQLPEKYKEIFFDQSKNGYAGYIDGGASQEEFYKFIKPILEKMDGTEELLVKLNREDLLRKQRTFDNGSIPHQIHLGELHAILRRQEDFYPFLKDNREKIEKILTFRIPYYVGPLARGNSRFAWMTRKSEETITPWNFEEVVDKGASAQSFIERMTNFDKNLPNEKVLPKHSLLYEYFTVYNELTKVKYVTEGMRKPAFLSGEQKKAIVDLLFKTNRKVTVKQLKEDYFKKIECFDSVEISGVEDRFNASLGTYHDLLKIIKDKDFLDNEENEDILEDIVLTLTLFEDREMIEERLKTYAHLFDDKVMKQLKRRRYTGWGRLSRKLINGIRDKQSGKTILDFLKSDGFANRNFMQLIHDDSLTFKEDIQKAQVSGQGDSLHEHIANLAGSPAIKKGILQTVKVVDELVKVMGRHKPENIVIEMARENQTTQKGQKNSRERMKRIEEGIKELGSQILKEHPVENTQLQNEKLYLYYLQNGRDMYVDQELDINRLSDYDVDHIVPQSFLKDDSIDNKVLTRSDKARGKSDNVPSEEVVKKMKNYWRQLLNAKLITQRKFDNLTKAERGGLSELDKAGFIKRQLVETRQITKHVAQILDSRMNTKYDENDKLIREVKVITLKSKLVSDFRKDFQFYKVREINNYHHAHDAYLNAVVGTALIKKYPKLESEFVYGDYKVYDVRKMIAKSEQEIGKATAKYFFYSNIMNFFKTEITLANGEIRKRPLIETNGETGEIVWDKGRDFATVRKVLSMPQVNIVKKTEVQTGGFSKESILPKRNSDKLIARKKDWDPKKYGGFDSPTVAYSVLVVAKVEKGKSKKLKSVKELLGITIMERSSFEKNPIDFLEAKGYKEVKKDLIIKLPKYSLFELENGRKRMLASAGELQKGNELALPSKYVNFLYLASHYEKLKGSPEDNEQKQLFVEQHKHYLDEIIEQISEFSKRVILADANLDKVLSAYNKHRDKPIREQAENIIHLFTLTNLGAPAAFKYFDTTIDRKRYTSTKEVLDATLIHQSITGLYETRIDLSQLGGDGGGSAGSAAGSGEFGGTLQLDDEYRLYSPLVKPDQNIQFWLEQFPQAWAETAGMGLAKQVPPQVIQLKASATPVSVRQYPLSKEAQEGIRPHVQRLIQQGILVPVQSPWNTPLLPVRKPGTNDYRPVQDLREVNKRVQDIHPTVPNPYNLLCALPPQRSWYTVLDLKDAFFCLRLHPTSQPLFAFEWRDPGTGRTGQLTWTRLPQGFKNSPTIFDEALHRDLANFRIQHPQVTLLQYVDDLLLAGATKQDCLEGTKALLLELSDLGYRASAKKAQICRREVTYLGYSLRDGQRWLTEARKKTVVQIPAPTTAKQVREFLGTAGFCRLWIPGFATLAAPLYPLTKEKGEFSWAPEHQKAFDAIKKALLSAPALALPDVTKPFTLYVDERKGVARGVLTQTLGPWRRPVAYLSKKLDPVASGWPVCLKAIAAVAILVKDADKLTLGQNITVIAPHALENIVRQPPDRWMTNARMTHYQSLLLTERVTFAPPAALNPATLLPEETDEPVTHDCHQLLIEETGVRKDLTDIPLTGEVLTWFTDGSSYVVEGKRMAGAAVVDGTRTIWASSLPEGTSAQKAELMALTQALRLAEGKSINIYTDSRYAFATAHVHGAIYKQRGLLTSAGREIKNKEEILSLLEALHLPKRLAIIHCPGHQKAKDPISRGNQMADRVAKQAAQGVNLLAGKRTADGSEFEKRTADGSEFESPKKKAKVE

SEQ ID NO: 284 - protein, 2088 aa, synthetic construct
MPAAKRVKLDGGDKKYSIGLDIGTNSVGWAVITDEYKVPSKKFKVLGNTDRHSIKKNLIGALLFDSGETAEATRLKRTARRRYTRRKNRICYLQEIFSNEMAKVDDSFFHRLEESFLVEEDKKHERHPIFGNIVDEVAYHEKYPTIYHLRKKLVDSTDKADLRLIYLALAHMIKFRGHFLIEGDLNPDNSDVDKLFIQLVQTYNQLFEENPINASGVDAKAILSARLSKSRRLENLIAQLPGEKKNGLFGNLIALSLGLTPNFKSNFDLAEDAKLQLSKDTYDDDLDNLLAQIGDQYADLFLAAKNLSDAILLSDILRVNTEITKAPLSASMIKRYDEHHQDLTLLKALVRQQLPEKYKEIFFDQSKNGYAGYIDGGASQEEFYKFIKPILEKMDGTEELLVKLNREDLLRKQRTFDNGSIPHQIHLGELHAILRRQEDFYPFLKDNREKIEKILTFRIPYYVGPLARGNSRFAWMTRKSEETITPWNFEEVVDKGASAQSFIERMTNFDKNLPNEKVLPKHSLLYEYFTVYNELTKVKYVTEGMRKPAFLSGEQKKAIVDLLFKTNRKVTVKQLKEDYFKKIECFDSVEISGVEDRFNASLGTYHDLLKIIKDKDFLDNEENEDILEDIVLTLTLFEDREMIEERLKTYAHLFDDKVMKQLKRRRYTGWGRLSRKLINGIRDKQSGKTILDFLKSDGFANRNFMQLIHDDSLTFKEDIQKAQVSGQGDSLHEHIANLAGSPAIKKGILQTVKVVDELVKVMGRHKPENIVIEMARENQTTQKGQKNSRERMKRIEEGIKELGSQILKEHPVENTQLQNEKLYLYYLQNGRDMYVDQELDINRLSDYDVDHIVPQSFLKDDSIDNKVLTRSDKARGKSDNVPSEEVVKKMKNYWRQLLNAKLITQRKFDNLTKAERGGLSELDKAGFIKRQLVETRQITKHVAQILDSRMNTKYDENDKLIREVKVITLKSKLVSDFRKDFQFYKVREINNYHHAHDAYLNAVVGTALIKKYPKLESEFVYGDYKVYDVRKMIAKSEQEIGKATAKYFFYSNIMNFFKTEITLANGEIRKRPLIETNGETGEIVWDKGRDFATVRKVLSMPQVNIVKKTEVQTGGFSKESILPKRNSDKLIARKKDWDPKKYGGFDSPTVAYSVLVVAKVEKGKSKKLKSVKELLGITIMERSSFEKNPIDFLEAKGYKEVKKDLIIKLPKYSLFELENGRKRMLASAGELQKGNELALPSKYVNFLYLASHYEKLKGSPEDNEQKQLFVEQHKHYLDEIIEQISEFSKRVILADANLDKVLSAYNKHRDKPIREQAENIIHLFTLTNLGAPAAFKYFDTTIDRKRYTSTKEVLDATLIHQSITGLYETRIDLSQLGGDGGGSSGGGGGSGGTLQLDDEYRLYSPLVKPDQNIQFWLEQFPQAWAETAGMGLAKQVPPQVIQLKASATPVSVRQYPLSKEAQEGIRPHVQRLIQQGILVPVQSPWNTPLLPVRKPGTNDYRPVQDLREVNKRVQDIHPTVPNPYNLLCALPPQRSWYTVLDLKDAFFCLRLHPTSQPLFAFEWRDPGTGRTGQLTWTRLPQGFKNSPTIFDEALHRDLANFRIQHPQVTLLQYVDDLLLAGATKQDCLEGTKALLLELSDLGYRASAKKAQICRREVTYLGYSLRDGQRWLTEARKKTVVQIPAPTTAKQVREFLGTAGFCRLWIPGFATLAAPLYPLTKEKGEFSWAPEHQKAFDAIKKALLSAPALALPDVTKPFTLYVDERKGVARGVLTQTLGPWRRPVAYLSKKLDPVASGWPVCLKAIAAVAILVKDADKLTLGQNITVIAPHALENIVRQPPDRWMTNARMTHYQSLLLTERVTFAPPAALNPATLLPEETDEPVTHDCHQLLIEETGVRKDLTDIPLTGEVLTWFTDGSSYVVEGKRMAGAAVVDGTRTIWASSLPEGTSAQKAELMALTQALRLAEGKSINIYTDSRYAFATAHVHGAIYKQRGLLTSAGREIKNKEEILSLLEALHLPKRLAIIHCPGHQKAKDPISRGNQMADRVAKQAAQGVNLLAGKRTADGSEFEKRTADGSEFESPKKKAKVE

SEQ ID NO: 285 - protein, 2090 aa, synthetic construct
MPAAKRVKLDGGDKKYSIGLDIGTNSVGWAVITDEYKVPSKKFKVLGNTDRHSIKKNLIGALLFDSGETAEATRLKRTARRRYTRRKNRICYLQEIFSNEMAKVDDSFFHRLEESFLVEEDKKHERHPIFGNIVDEVAYHEKYPTIYHLRKKLVDSTDKADLRLIYLALAHMIKFRGHFLIEGDLNPDNSDVDKLFIQLVQTYNQLFEENPINASGVDAKAILSARLSKSRRLENLIAQLPGEKKNGLFGNLIALSLGLTPNFKSNFDLAEDAKLQLSKDTYDDDLDNLLAQIGDQYADLFLAAKNLSDAILLSDILRVNTEITKAPLSASMIKRYDEHHQDLTLLKALVRQQLPEKYKEIFFDQSKNGYAGYIDGGASQEEFYKFIKPILEKMDGTEELLVKLNREDLLRKQRTFDNGSIPHQIHLGELHAILRRQEDFYPFLKDNREKIEKILTFRIPYYVGPLARGNSRFAWMTRKSEETITPWNFEEVVDKGASAQSFIERMTNFDKNLPNEKVLPKHSLLYEYFTVYNELTKVKYVTEGMRKPAFLSGEQKKAIVDLLFKTNRKVTVKQLKEDYFKKIECFDSVEISGVEDRFNASLGTYHDLLKIIKDKDFLDNEENEDILEDIVLTLTLFEDREMIEERLKTYAHLFDDKVMKQLKRRRYTGWGRLSRKLINGIRDKQSGKTILDFLKSDGFANRNFMQLIHDDSLTFKEDIQKAQVSGQGDSLHEHIANLAGSPAIKKGILQTVKVVDELVKVMGRHKPENIVIEMARENQTTQKGQKNSRERMKRIEEGIKELGSQILKEHPVENTQLQNEKLYLYYLQNGRDMYVDQELDINRLSDYDVDHIVPQSFLKDDSIDNKVLTRSDKARGKSDNVPSEEVVKKMKNYWRQLLNAKLITQRKFDNLTKAERGGLSELDKAGFIKRQLVETRQITKHVAQILDSRMNTKYDENDKLIREVKVITLKSKLVSDFRKDFQFYKVREINNYHHAHDAYLNAVVGTALIKKYPKLESEFVYGDYKVYDVRKMIAKSEQEIGKATAKYFFYSNIMNFFKTEITLANGEIRKRPLIETNGETGEIVWDKGRDFATVRKVLSMPQVNIVKKTEVQTGGFSKESILPKRNSDKLIARKKDWDPKKYGGFDSPTVAYSVLVVAKVEKGKSKKLKSVKELLGITIMERSSFEKNPIDFLEAKGYKEVKKDLIIKLPKYSLFELENGRKRMLASAGELQKGNELALPSKYVNFLYLASHYEKLKGSPEDNEQKQLFVEQHKHYLDEIIEQISEFSKRVILADANLDKVLSAYNKHRDKPIREQAENIIHLFTLTNLGAPAAFKYFDTTIDRKRYTSTKEVLDATLIHQSITGLYETRIDLSQLGGDGGGSSEAAAKGGGGGTLQLDDEYRLYSPLVKPDQNIQFWLEQFPQAWAETAGMGLAKQVPPQVIQLKASATPVSVRQYPLSKEAQEGIRPHVQRLIQQGILVPVQSPWNTPLLPVRKPGTNDYRPVQDLREVNKRVQDIHPTVPNPYNLLCALPPQRSWYTVLDLKDAFFCLRLHPTSQPLFAFEWRDPGTGRTGQLTWTRLPQGFKNSPTIFDEALHRDLANFRIQHPQVTLLQYVDDLLLAGATKQDCLEGTKALLLELSDLGYRASAKKAQICRREVTYLGYSLRDGQRWLTEARKKTVVQIPAPTTAKQVREFLGTAGFCRLWIPGFATLAAPLYPLTKEKGEFSWAPEHQKAFDAIKKALLSAPALALPDVTKPFTLYVDERKGVARGVLTQTLGPWRRPVAYLSKKLDPVASGWPVCLKAIAAVAILVKDADKLTLGQNITVIAPHALENIVRQPPDRWMTNARMTHYQSLLLTERVTFAPPAALNPATLLPEETDEPVTHDCHQLLIEETGVRKDLTDIPLTGEVLTWFTDGSSYVVEGKRMAGAAVVDGTRTIWASSLPEGTSAQKAELMALTQALRLAEGKSINIYTDSRYAFATAHVHGAIYKQRGLLTSAGREIKNKEEILSLLEALHLPKRLAIIHCPGHQKAKDPISRGNQMADRVAKQAAQGVNLLAGKRTADGSEFEKRTADGSEFESPKKKAKVE

SEQ ID NO: 286 - protein, 2090 aa, synthetic construct
MPAAKRVKLDGGDKKYSIGLDIGTNSVGWAVITDEYKVPSKKFKVLGNTDRHSIKKNLIGALLFDSGETAEATRLKRTARRRYTRRKNRICYLQEIFSNEMAKVDDSFFHRLEESFLVEEDKKHERHPIFGNIVDEVAYHEKYPTIYHLRKKLVDSTDKADLRLIYLALAHMIKFRGHFLIEGDLNPDNSDVDKLFIQLVQTYNQLFEENPINASGVDAKAILSARLSKSRRLENLIAQLPGEKKNGLFGNLIALSLGLTPNFKSNFDLAEDAKLQLSKDTYDDDLDNLLAQIGDQYADLFLAAKNLSDAILLSDILRVNTEITKAPLSASMIKRYDEHHQDLTLLKALVRQQLPEKYKEIFFDQSKNGYAGYIDGGASQEEFYKFIKPILEKMDGTEELLVKLNREDLLRKQRTFDNGSIPHQIHLGELHAILRRQEDFYPFLKDNREKIEKILTFRIPYYVGPLARGNSRFAWMTRKSEETITPWNFEEVVDKGASAQSFIERMTNFDKNLPNEKVLPKHSLLYEYFTVYNELTKVKYVTEGMRKPAFLSGEQKKAIVDLLFKTNRKVTVKQLKEDYFKKIECFDSVEISGVEDRFNASLGTYHDLLKIIKDKDFLDNEENEDILEDIVLTLTLFEDREMIEERLKTYAHLFDDKVMKQLKRRRYTGWGRLSRKLINGIRDKQSGKTILDFLKSDGFANRNFMQLIHDDSLTFKEDIQKAQVSGQGDSLHEHIANLAGSPAIKKGILQTVKVVDELVKVMGRHKPENIVIEMARENQTTQKGQKNSRERMKRIEEGIKELGSQILKEHPVENTQLQNEKLYLYYLQNGRDMYVDQELDINRLSDYDVDHIVPQSFLKDDSIDNKVLTRSDKARGKSDNVPSEEVVKKMKNYWRQLLNAKLITQRKFDNLTKAERGGLSELDKAGFIKRQLVETRQITKHVAQILDSRMNTKYDENDKLIREVKVITLKSKLVSDFRKDFQFYKVREINNYHHAHDAYLNAVVGTALIKKYPKLESEFVYGDYKVYDVRKMIAKSEQEIGKATAKYFFYSNIMNFFKTEITLANGEIRKRPLIETNGETGEIVWDKGRDFATVRKVLSMPQVNIVKKTEVQTGGFSKESILPKRNSDKLIARKKDWDPKKYGGFDSPTVAYSVLVVAKVEKGKSKKLKSVKELLGITIMERSSFEKNPIDFLEAKGYKEVKKDLIIKLPKYSLFELENGRKRMLASAGELQKGNELALPSKYVNFLYLASHYEKLKGSPEDNEQKQLFVEQHKHYLDEIIEQISEFSKRVILADANLDKVLSAYNKHRDKPIREQAENIIHLFTLTNLGAPAAFKYFDTTIDRKRYTSTKEVLDATLIHQSITGLYETRIDLSQLGGDGGGGSGGGEAAAKGGTLQLDDEYRLYSPLVKPDQNIQFWLEQFPQAWAETAGMGLAKQVPPQVIQLKASATPVSVRQYPLSKEAQEGIRPHVQRLIQQGILVPVQSPWNTPLLPVRKPGTNDYRPVQDLREVNKRVQDIHPTVPNPYNLLCALPPQRSWYTVLDLKDAFFCLRLHPTSQPLFAFEWRDPGTGRTGQLTWTRLPQGFKNSPTIFDEALHRDLANFRIQHPQVTLLQYVDDLLLAGATKQDCLEGTKALLLELSDLGYRASAKKAQICRREVTYLGYSLRDGQRWLTEARKKTVVQIPAPTTAKQVREFLGTAGFCRLWIPGFATLAAPLYPLTKEKGEFSWAPEHQKAFDAIKKALLSAPALALPDVTKPFTLYVDERKGVARGVLTQTLGPWRRPVAYLSKKLDPVASGWPVCLKAIAAVAILVKDADKLTLGQNITVIAPHALENIVRQPPDRWMTNARMTHYQSLLLTERVTFAPPAALNPATLLPEETDEPVTHDCHQLLIEETGVRKDLTDIPLTGEVLTWFTDGSSYVVEGKRMAGAAVVDGTRTIWASSLPEGTSAQKAELMALTQALRLAEGKSINIYTDSRYAFATAHVHGAIYKQRGLLTSAGREIKNKEEILSLLEALHLPKRLAIIHCPGHQKAKDPISRGNQMADRVAKQAAQGVNLLAGKRTADGSEFEKRTADGSEFESPKKKAKVE

SEQ ID NO: 287 - protein, 2090 aa, synthetic construct
MPAAKRVKLDGGDKKYSIGLDIGTNSVGWAVITDEYKVPSKKFKVLGNTDRHSIKKNLIGALLFDSGETAEATRLKRTARRRYTRRKNRICYLQEIFSNEMAKVDDSFFHRLEESFLVEEDKKHERHPIFGNIVDEVAYHEKYPTIYHLRKKLVDSTDKADLRLIYLALAHMIKFRGHFLIEGDLNPDNSDVDKLFIQLVQTYNQLFEENPINASGVDAKAILSARLSKSRRLENLIAQLPGEKKNGLFGNLIALSLGLTPNFKSNFDLAEDAKLQLSKDTYDDDLDNLLAQIGDQYADLFLAAKNLSDAILLSDILRVNTEITKAPLSASMIKRYDEHHQDLTLLKALVRQQLPEKYKEIFFDQSKNGYAGYIDGGASQEEFYKFIKPILEKMDGTEELLVKLNREDLLRKQRTFDNGSIPHQIHLGELHAILRRQEDFYPFLKDNREKIEKILTFRIPYYVGPLARGNSRFAWMTRKSEETITPWNFEEVVDKGASAQSFIERMTNFDKNLPNEKVLPKHSLLYEYFTVYNELTKVKYVTEGMRKPAFLSGEQKKAIVDLLFKTNRKVTVKQLKEDYFKKIECFDSVEISGVEDRFNASLGTYHDLLKIIKDKDFLDNEENEDILEDIVLTLTLFEDREMIEERLKTYAHLFDDKVMKQLKRRRYTGWGRLSRKLINGIRDKQSGKTILDFLKSDGFANRNFMQLIHDDSLTFKEDIQKAQVSGQGDSLHEHIANLAGSPAIKKGILQTVKVVDELVKVMGRHKPENIVIEMARENQTTQKGQKNSRERMKRIEEGIKELGSQILKEHPVENTQLQNEKLYLYYLQNGRDMYVDQELDINRLSDYDVDHIVPQSFLKDDSIDNKVLTRSDKARGKSDNVPSEEVVKKMKNYWRQLLNAKLITQRKFDNLTKAERGGLSELDKAGFIKRQLVETRQITKHVAQILDSRMNTKYDENDKLIREVKVITLKSKLVSDFRKDFQFYKVREINNYHHAHDAYLNAVVGTALIKKYPKLESEFVYGDYKVYDVRKMIAKSEQEIGKATAKYFFYSNIMNFFKTEITLANGEIRKRPLIETNGETGEIVWDKGRDFATVRKVLSMPQVNIVKKTEVQTGGFSKESILPKRNSDKLIARKKDWDPKKYGGFDSPTVAYSVLVVAKVEKGKSKKLKSVKELLGITIMERSSFEKNPIDFLEAKGYKEVKKDLIIKLPKYSLFELENGRKRMLASAGELQKGNELALPSKYVNFLYLASHYEKLKGSPEDNEQKQLFVEQHKHYLDEIIEQISEFSKRVILADANLDKVLSAYNKHRDKPIREQAENIIHLFTLTNLGAPAAFKYFDTTIDRKRYTSTKEVLDATLIHQSITGLYETRIDLSQLGGDGGEAAAKPAPGGSGGTLQLDDEYRLYSPLVKPDQNIQFWLEQFPQAWAETAGMGLAKQVPPQVIQLKASATPVSVRQYPLSKEAQEGIRPHVQRLIQQGILVPVQSPWNTPLLPVRKPGTNDYRPVQDLREVNKRVQDIHPTVPNPYNLLCALPPQRSWYTVLDLKDAFFCLRLHPTSQPLFAFEWRDPGTGRTGQLTWTRLPQGFKNSPTIFDEALHRDLANFRIQHPQVTLLQYVDDLLLAGATKQDCLEGTKALLLELSDLGYRASAKKAQICRREVTYLGYSLRDGQRWLTEARKKTVVQIPAPTTAKQVREFLGTAGFCRLWIPGFATLAAPLYPLTKEKGEFSWAPEHQKAFDAIKKALLSAPALALPDVTKPFTLYVDERKGVARGVLTQTLGPWRRPVAYLSKKLDPVASGWPVCLKAIAAVAILVKDADKLTLGQNITVIAPHALENIVRQPPDRWMTNARMTHYQSLLLTERVTFAPPAALNPATLLPEETDEPVTHDCHQLLIEETGVRKDLTDIPLTGEVLTWFTDGSSYVVEGKRMAGAAVVDGTRTIWASSLPEGTSAQKAELMALTQALRLAEGKSINIYTDSRYAFATAHVHGAIYKQRGLLTSAGREIKNKEEILSLLEALHLPKRLAIIHCPGHQKAKDPISRGNQMADRVAKQAAQGVNLLAGKRTADGSEFEKRTADGSEFESPKKKAKVE

SEQ ID NO: 288 - protein, 2090 aa, synthetic construct
MPAAKRVKLDGGDKKYSIGLDIGTNSVGWAVITDEYKVPSKKFKVLGNTDRHSIKKNLIGALLFDSGETAEATRLKRTARRRYTRRKNRICYLQEIFSNEMAKVDDSFFHRLEESFLVEEDKKHERHPIFGNIVDEVAYHEKYPTIYHLRKKLVDSTDKADLRLIYLALAHMIKFRGHFLIEGDLNPDNSDVDKLFIQLVQTYNQLFEENPINASGVDAKAILSARLSKSRRLENLIAQLPGEKKNGLFGNLIALSLGLTPNFKSNFDLAEDAKLQLSKDTYDDDLDNLLAQIGDQYADLFLAAKNLSDAILLSDILRVNTEITKAPLSASMIKRYDEHHQDLTLLKALVRQQLPEKYKEIFFDQSKNGYAGYIDGGASQEEFYKFIKPILEKMDGTEELLVKLNREDLLRKQRTFDNGSIPHQIHLGELHAILRRQEDFYPFLKDNREKIEKILTFRIPYYVGPLARGNSRFAWMTRKSEETITPWNFEEVVDKGASAQSFIERMTNFDKNLPNEKVLPKHSLLYEYFTVYNELTKVKYVTEGMRKPAFLSGEQKKAIVDLLFKTNRKVTVKQLKEDYFKKIECFDSVEISGVEDRFNASLGTYHDLLKIIKDKDFLDNEENEDILEDIVLTLTLFEDREMIEERLKTYAHLFDDKVMKQLKRRRYTGWGRLSRKLINGIRDKQSGKTILDFLKSDGFANRNFMQLIHDDSLTFKEDIQKAQVSGQGDSLHEHIANLAGSPAIKKGILQTVKVVDELVKVMGRHKPENIVIEMARENQTTQKGQKNSRERMKRIEEGIKELGSQILKEHPVENTQLQNEKLYLYYLQNGRDMYVDQELDINRLSDYDVDHIVPQSFLKDDSIDNKVLTRSDKARGKSDNVPSEEVVKKMKNYWRQLLNAKLITQRKFDNLTKAERGGLSELDKAGFIKRQLVETRQITKHVAQILDSRMNTKYDENDKLIREVKVITLKSKLVSDFRKDFQFYKVREINNYHHAHDAYLNAVVGTALIKKYPKLESEFVYGDYKVYDVRKMIAKSEQEIGKATAKYFFYSNIMNFFKTEITLANGEIRKRPLIETNGETGEIVWDKGRDFATVRKVLSMPQVNIVKKTEVQTGGFSKESILPKRNSDKLIARKKDWDPKKYGGFDSPTVAYSVLVVAKVEKGKSKKLKSVKELLGITIMERSSFEKNPIDFLEAKGYKEVKKDLIIKLPKYSLFELENGRKRMLASAGELQKGNELALPSKYVNFLYLASHYEKLKGSPEDNEQKQLFVEQHKHYLDEIIEQISEFSKRVILADANLDKVLSAYNKHRDKPIREQAENIIHLFTLTNLGAPAAFKYFDTTIDRKRYTSTKEVLDATLIHQSITGLYETRIDLSQLGGDGGEAAAKGGGGGSGGTLQLDDEYRLYSPLVKPDQNIQFWLEQFPQAWAETAGMGLAKQVPPQVIQLKASATPVSVRQYPLSKEAQEGIRPHVQRLIQQGILVPVQSPWNTPLLPVRKPGTNDYRPVQDLREVNKRVQDIHPTVPNPYNLLCALPPQRSWYTVLDLKDAFFCLRLHPTSQPLFAFEWRDPGTGRTGQLTWTRLPQGFKNSPTIFDEALHRDLANFRIQHPQVTLLQYVDDLLLAGATKQDCLEGTKALLLELSDLGYRASAKKAQICRREVTYLGYSLRDGQRWLTEARKKTVVQIPAPTTAKQVREFLGTAGFCRLWIPGFATLAAPLYPLTKEKGEFSWAPEHQKAFDAIKKALLSAPALALPDVTKPFTLYVDERKGVARGVLTQTLGPWRRPVAYLSKKLDPVASGWPVCLKAIAAVAILVKDADKLTLGQNITVIAPHALENIVRQPPDRWMTNARMTHYQSLLLTERVTFAPPAALNPATLLPEETDEPVTHDCHQLLIEETGVRKDLTDIPLTGEVLTWFTDGSSYVVEGKRMAGAAVVDGTRTIWASSLPEGTSAQKAELMALTQALRLAEGKSINIYTDSRYAFATAHVHGAIYKQRGLLTSAGREIKNKEEILSLLEALHLPKRLAIIHCPGHQKAKDPISRGNQMADRVAKQAAQGVNLLAGKRTADGSEFEKRTADGSEFESPKKKAKVE

SEQ ID NO: 289 - protein, 2082 aa, synthetic construct
MPAAKRVKLDGGDKKYSIGLDIGTNSVGWAVITDEYKVPSKKFKVLGNTDRHSIKKNLIGALLFDSGETAEATRLKRTARRRYTRRKNRICYLQEIFSNEMAKVDDSFFHRLEESFLVEEDKKHERHPIFGNIVDEVAYHEKYPTIYHLRKKLVDSTDKADLRLIYLALAHMIKFRGHFLIEGDLNPDNSDVDKLFIQLVQTYNQLFEENPINASGVDAKAILSARLSKSRRLENLIAQLPGEKKNGLFGNLIALSLGLTPNFKSNFDLAEDAKLQLSKDTYDDDLDNLLAQIGDQYADLFLAAKNLSDAILLSDILRVNTEITKAPLSASMIKRYDEHHQDLTLLKALVRQQLPEKYKEIFFDQSKNGYAGYIDGGASQEEFYKFIKPILEKMDGTEELLVKLNREDLLRKQRTFDNGSIPHQIHLGELHAILRRQEDFYPFLKDNREKIEKILTFRIPYYVGPLARGNSRFAWMTRKSEETITPWNFEEVVDKGASAQSFIERMTNFDKNLPNEKVLPKHSLLYEYFTVYNELTKVKYVTEGMRKPAFLSGEQKKAIVDLLFKTNRKVTVKQLKEDYFKKIECFDSVEISGVEDRFNASLGTYHDLLKIIKDKDFLDNEENEDILEDIVLTLTLFEDREMIEERLKTYAHLFDDKVMKQLKRRRYTGWGRLSRKLINGIRDKQSGKTILDFLKSDGFANRNFMQLIHDDSLTFKEDIQKAQVSGQGDSLHEHIANLAGSPAIKKGILQTVKVVDELVKVMGRHKPENIVIEMARENQTTQKGQKNSRERMKRIEEGIKELGSQILKEHPVENTQLQNEKLYLYYLQNGRDMYVDQELDINRLSDYDVDHIVPQSFLKDDSIDNKVLTRSDKARGKSDNVPSEEVVKKMKNYWRQLLNAKLITQRKFDNLTKAERGGLSELDKAGFIKRQLVETRQITKHVAQILDSRMNTKYDENDKLIREVKVITLKSKLVSDFRKDFQFYKVREINNYHHAHDAYLNAVVGTALIKKYPKLESEFVYGDYKVYDVRKMIAKSEQEIGKATAKYFFYSNIMNFFKTEITLANGEIRKRPLIETNGETGEIVWDKGRDFATVRKVLSMPQVNIVKKTEVQTGGFSKESILPKRNSDKLIARKKDWDPKKYGGFDSPTVAYSVLVVAKVEKGKSKKLKSVKELLGITIMERSSFEKNPIDFLEAKGYKEVKKDLIIKLPKYSLFELENGRKRMLASAGELQKGNELALPSKYVNFLYLASHYEKLKGSPEDNEQKQLFVEQHKHYLDEIIEQISEFSKRVILADANLDKVLSAYNKHRDKPIREQAENIIHLFTLTNLGAPAAFKYFDTTIDRKRYTSTKEVLDATLIHQSITGLYETRIDLSQLGGDGGGGGGGTLQLDDEYRLYSPLVKPDQNIQFWLEQFPQAWAETAGMGLAKQVPPQVIQLKASATPVSVRQYPLSKEAQEGIRPHVQRLIQQGILVPVQSPWNTPLLPVRKPGTNDYRPVQDLREVNKRVQDIHPTVPNPYNLLCALPPQRSWYTVLDLKDAFFCLRLHPTSQPLFAFEWRDPGTGRTGQLTWTRLPQGFKNSPTIFDEALHRDLANFRIQHPQVTLLQYVDDLLLAGATKQDCLEGTKALLLELSDLGYRASAKKAQICRREVTYLGYSLRDGQRWLTEARKKTVVQIPAPTTAKQVREFLGTAGFCRLWIPGFATLAAPLYPLTKEKGEFSWAPEHQKAFDAIKKALLSAPALALPDVTKPFTLYVDERKGVARGVLTQTLGPWRRPVAYLSKKLDPVASGWPVCLKAIAAVAILVKDADKLTLGQNITVIAPHALENIVRQPPDRWMTNARMTHYQSLLLTERVTFAPPAALNPATLLPEETDEPVTHDCHQLLIEETGVRKDLTDIPLTGEVLTWFTDGSSYVVEGKRMAGAAVVDGTRTIWASSLPEGTSAQKAELMALTQALRLAEGKSINIYTDSRYAFATAHVHGAIYKQRGLLTSAGREIKNKEEILSLLEALHLPKRLAIIHCPGHQKAKDPISRGNQMADRVAKQAAQGVNLLAGKRTADGSEFEKRTADGSEFESPKKKAKVE

SEQ ID NO: 290 - protein, 2090 aa, synthetic construct
MPAAKRVKLDGGDKKYSIGLDIGTNSVGWAVITDEYKVPSKKFKVLGNTDRHSIKKNLIGALLFDSGETAEATRLKRTARRRYTRRKNRICYLQEIFSNEMAKVDDSFFHRLEESFLVEEDKKHERHPIFGNIVDEVAYHEKYPTIYHLRKKLVDSTDKADLRLIYLALAHMIKFRGHFLIEGDLNPDNSDVDKLFIQLVQTYNQLFEENPINASGVDAKAILSARLSKSRRLENLIAQLPGEKKNGLFGNLIALSLGLTPNFKSNFDLAEDAKLQLSKDTYDDDLDNLLAQIGDQYADLFLAAKNLSDAILLSDILRVNTEITKAPLSASMIKRYDEHHQDLTLLKALVRQQLPEKYKEIFFDQSKNGYAGYIDGGASQEEFYKFIKPILEKMDGTEELLVKLNREDLLRKQRTFDNGSIPHQIHLGELHAILRRQEDFYPFLKDNREKIEKILTFRIPYYVGPLARGNSRFAWMTRKSEETITPWNFEEVVDKGASAQSFIERMTNFDKNLPNEKVLPKHSLLYEYFTVYNELTKVKYVTEGMRKPAFLSGEQKKAIVDLLFKTNRKVTVKQLKEDYFKKIECFDSVEISGVEDRFNASLGTYHDLLKIIKDKDFLDNEENEDILEDIVLTLTLFEDREMIEERLKTYAHLFDDKVMKQLKRRRYTGWGRLSRKLINGIRDKQSGKTILDFLKSDGFANRNFMQLIHDDSLTFKEDIQKAQVSGQGDSLHEHIANLAGSPAIKKGILQTVKVVDELVKVMGRHKPENIVIEMARENQTTQKGQKNSRERMKRIEEGIKELGSQILKEHPVENTQLQNEKLYLYYLQNGRDMYVDQELDINRLSDYDVDHIVPQSFLKDDSIDNKVLTRSDKARGKSDNVPSEEVVKKMKNYWRQLLNAKLITQRKFDNLTKAERGGLSELDKAGFIKRQLVETRQITKHVAQILDSRMNTKYDENDKLIREVKVITLKSKLVSDFRKDFQFYKVREINNYHHAHDAYLNAVVGTALIKKYPKLESEFVYGDYKVYDVRKMIAKSEQEIGKATAKYFFYSNIMNFFKTEITLANGEIRKRPLIETNGETGEIVWDKGRDFATVRKVLSMPQVNIVKKTEVQTGGFSKESILPKRNSDKLIARKKDWDPKKYGGFDSPTVAYSVLVVAKVEKGKSKKLKSVKELLGITIMERSSFEKNPIDFLEAKGYKEVKKDLIIKLPKYSLFELENGRKRMLASAGELQKGNELALPSKYVNFLYLASHYEKLKGSPEDNEQKQLFVEQHKHYLDEIIEQISEFSKRVILADANLDKVLSAYNKHRDKPIREQAENIIHLFTLTNLGAPAAFKYFDTTIDRKRYTSTKEVLDATLIHQSITGLYETRIDLSQLGGDGGEAAAKGGGGSSGGTLQLDDEYRLYSPLVKPDQNIQFWLEQFPQAWAETAGMGLAKQVPPQVIQLKASATPVSVRQYPLSKEAQEGIRPHVQRLIQQGILVPVQSPWNTPLLPVRKPGTNDYRPVQDLREVNKRVQDIHPTVPNPYNLLCALPPQRSWYTVLDLKDAFFCLRLHPTSQPLFAFEWRDPGTGRTGQLTWTRLPQGFKNSPTIFDEALHRDLANFRIQHPQVTLLQYVDDLLLAGATKQDCLEGTKALLLELSDLGYRASAKKAQICRREVTYLGYSLRDGQRWLTEARKKTVVQIPAPTTAKQVREFLGTAGFCRLWIPGFATLAAPLYPLTKEKGEFSWAPEHQKAFDAIKKALLSAPALALPDVTKPFTLYVDERKGVARGVLTQTLGPWRRPVAYLSKKLDPVASGWPVCLKAIAAVAILVKDADKLTLGQNITVIAPHALENIVRQPPDRWMTNARMTHYQSLLLTERVTFAPPAALNPATLLPEETDEPVTHDCHQLLIEETGVRKDLTDIPLTGEVLTWFTDGSSYVVEGKRMAGAAVVDGTRTIWASSLPEGTSAQKAELMALTQALRLAEGKSINIYTDSRYAFATAHVHGAIYKQRGLLTSAGREIKNKEEILSLLEALHLPKRLAIIHCPGHQKAKDPISRGNQMADRVAKQAAQGVNLLAGKRTADGSEFEKRTADGSEFESPKKKAKVE

SEQ ID NO: 291 - protein, 2083 aa, synthetic construct
MPAAKRVKLDGGDKKYSIGLDIGTNSVGWAVITDEYKVPSKKFKVLGNTDRHSIKKNLIGALLFDSGETAEATRLKRTARRRYTRRKNRICYLQEIFSNEMAKVDDSFFHRLEESFLVEEDKKHERHPIFGNIVDEVAYHEKYPTIYHLRKKLVDSTDKADLRLIYLALAHMIKFRGHFLIEGDLNPDNSDVDKLFIQLVQTYNQLFEENPINASGVDAKAILSARLSKSRRLENLIAQLPGEKKNGLFGNLIALSLGLTPNFKSNFDLAEDAKLQLSKDTYDDDLDNLLAQIGDQYADLFLAAKNLSDAILLSDILRVNTEITKAPLSASMIKRYDEHHQDLTLLKALVRQQLPEKYKEIFFDQSKNGYAGYIDGGASQEEFYKFIKPILEKMDGTEELLVKLNREDLLRKQRTFDNGSIPHQIHLGELHAILRRQEDFYPFLKDNREKIEKILTFRIPYYVGPLARGNSRFAWMTRKSEETITPWNFEEVVDKGASAQSFIERMTNFDKNLPNEKVLPKHSLLYEYFTVYNELTKVKYVTEGMRKPAFLSGEQKKAIVDLLFKTNRKVTVKQLKEDYFKKIECFDSVEISGVEDRFNASLGTYHDLLKIIKDKDFLDNEENEDILEDIVLTLTLFEDREMIEERLKTYAHLFDDKVMKQLKRRRYTGWGRLSRKLINGIRDKQSGKTILDFLKSDGFANRNFMQLIHDDSLTFKEDIQKAQVSGQGDSLHEHIANLAGSPAIKKGILQTVKVVDELVKVMGRHKPENIVIEMARENQTTQKGQKNSRERMKRIEEGIKELGSQILKEHPVENTQLQNEKLYLYYLQNGRDMYVDQELDINRLSDYDVDHIVPQSFLKDDSIDNKVLTRSDKARGKSDNVPSEEVVKKMKNYWRQLLNAKLITQRKFDNLTKAERGGLSELDKAGFIKRQLVETRQITKHVAQILDSRMNTKYDENDKLIREVKVITLKSKLVSDFRKDFQFYKVREINNYHHAHDAYLNAVVGTALIKKYPKLESEFVYGDYKVYDVRKMIAKSEQEIGKATAKYFFYSNIMNFFKTEITLANGEIRKRPLIETNGETGEIVWDKGRDFATVRKVLSMPQVNIVKKTEVQTGGFSKESILPKRNSDKLIARKKDWDPKKYGGFDSPTVAYSVLVVAKVEKGKSKKLKSVKELLGITIMERSSFEKNPIDFLEAKGYKEVKKDLIIKLPKYSLFELENGRKRMLASAGELQKGNELALPSKYVNFLYLASHYEKLKGSPEDNEQKQLFVEQHKHYLDEIIEQISEFSKRVILADANLDKVLSAYNKHRDKPIREQAENIIHLFTLTNLGAPAAFKYFDTTIDRKRYTSTKEVLDATLIHQSITGLYETRIDLSQLGGDGGGGGGGGTLQLDDEYRLYSPLVKPDQNIQFWLEQFPQAWAETAGMGLAKQVPPQVIQLKASATPVSVRQYPLSKEAQEGIRPHVQRLIQQGILVPVQSPWNTPLLPVRKPGTNDYRPVQDLREVNKRVQDIHPTVPNPYNLLCALPPQRSWYTVLDLKDAFFCLRLHPTSQPLFAFEWRDPGTGRTGQLTWTRLPQGFKNSPTIFDEALHRDLANFRIQHPQVTLLQYVDDLLLAGATKQDCLEGTKALLLELSDLGYRASAKKAQICRREVTYLGYSLRDGQRWLTEARKKTVVQIPAPTTAKQVREFLGTAGFCRLWIPGFATLAAPLYPLTKEKGEFSWAPEHQKAFDAIKKALLSAPALALPDVTKPFTLYVDERKGVARGVLTQTLGPWRRPVAYLSKKLDPVASGWPVCLKAIAAVAILVKDADKLTLGQNITVIAPHALENIVRQPPDRWMTNARMTHYQSLLLTERVTFAPPAALNPATLLPEETDEPVTHDCHQLLIEETGVRKDLTDIPLTGEVLTWFTDGSSYVVEGKRMAGAAVVDGTRTIWASSLPEGTSAQKAELMALTQALRLAEGKSINIYTDSRYAFATAHVHGAIYKQRGLLTSAGREIKNKEEILSLLEALHLPKRLAIIHCPGHQKAKDPISRGNQMADRVAKQAAQGVNLLAGKRTADGSEFEKRTADGSEFESPKKKAKVE

SEQ ID NO: 292 - protein, 2097 aa, synthetic construct
MPAAKRVKLDGGDKKYSIGLDIGTNSVGWAVITDEYKVPSKKFKVLGNTDRHSIKKNLIGALLFDSGETAEATRLKRTARRRYTRRKNRICYLQEIFSNEMAKVDDSFFHRLEESFLVEEDKKHERHPIFGNIVDEVAYHEKYPTIYHLRKKLVDSTDKADLRLIYLALAHMIKFRGHFLIEGDLNPDNSDVDKLFIQLVQTYNQLFEENPINASGVDAKAILSARLSKSRRLENLIAQLPGEKKNGLFGNLIALSLGLTPNFKSNFDLAEDAKLQLSKDTYDDDLDNLLAQIGDQYADLFLAAKNLSDAILLSDILRVNTEITKAPLSASMIKRYDEHHQDLTLLKALVRQQLPEKYKEIFFDQSKNGYAGYIDGGASQEEFYKFIKPILEKMDGTEELLVKLNREDLLRKQRTFDNGSIPHQIHLGELHAILRRQEDFYPFLKDNREKIEKILTFRIPYYVGPLARGNSRFAWMTRKSEETITPWNFEEVVDKGASAQSFIERMTNFDKNLPNEKVLPKHSLLYEYFTVYNELTKVKYVTEGMRKPAFLSGEQKKAIVDLLFKTNRKVTVKQLKEDYFKKIECFDSVEISGVEDRFNASLGTYHDLLKIIKDKDFLDNEENEDILEDIVLTLTLFEDREMIEERLKTYAHLFDDKVMKQLKRRRYTGWGRLSRKLINGIRDKQSGKTILDFLKSDGFANRNFMQLIHDDSLTFKEDIQKAQVSGQGDSLHEHIANLAGSPAIKKGILQTVKVVDELVKVMGRHKPENIVIEMARENQTTQKGQKNSRERMKRIEEGIKELGSQILKEHPVENTQLQNEKLYLYYLQNGRDMYVDQELDINRLSDYDVDHIVPQSFLKDDSIDNKVLTRSDKARGKSDNVPSEEVVKKMKNYWRQLLNAKLITQRKFDNLTKAERGGLSELDKAGFIKRQLVETRQITKHVAQILDSRMNTKYDENDKLIREVKVITLKSKLVSDFRKDFQFYKVREINNYHHAHDAYLNAVVGTALIKKYPKLESEFVYGDYKVYDVRKMIAKSEQEIGKATAKYFFYSNIMNFFKTEITLANGEIRKRPLIETNGETGEIVWDKGRDFATVRKVLSMPQVNIVKKTEVQTGGFSKESILPKRNSDKLIARKKDWDPKKYGGFDSPTVAYSVLVVAKVEKGKSKKLKSVKELLGITIMERSSFEKNPIDFLEAKGYKEVKKDLIIKLPKYSLFELENGRKRMLASAGELQKGNELALPSKYVNFLYLASHYEKLKGSPEDNEQKQLFVEQHKHYLDEIIEQISEFSKRVILADANLDKVLSAYNKHRDKPIREQAENIIHLFTLTNLGAPAAFKYFDTTIDRKRYTSTKEVLDATLIHQSITGLYETRIDLSQLGGDGGGGSGGSGGSGGSGGSGGSGGTLQLDDEYRLYSPLVKPDQNIQFWLEQFPQAWAETAGMGLAKQVPPQVIQLKASATPVSVRQYPLSKEAQEGIRPHVQRLIQQGILVPVQSPWNTPLLPVRKPGTNDYRPVQDLREVNKRVQDIHPTVPNPYNLLCALPPQRSWYTVLDLKDAFFCLRLHPTSQPLFAFEWRDPGTGRTGQLTWTRLPQGFKNSPTIFDEALHRDLANFRIQHPQVTLLQYVDDLLLAGATKQDCLEGTKALLLELSDLGYRASAKKAQICRREVTYLGYSLRDGQRWLTEARKKTVVQIPAPTTAKQVREFLGTAGFCRLWIPGFATLAAPLYPLTKEKGEFSWAPEHQKAFDAIKKALLSAPALALPDVTKPFTLYVDERKGVARGVLTQTLGPWRRPVAYLSKKLDPVASGWPVCLKAIAAVAILVKDADKLTLGQNITVIAPHALENIVRQPPDRWMTNARMTHYQSLLLTERVTFAPPAALNPATLLPEETDEPVTHDCHQLLIEETGVRKDLTDIPLTGEVLTWFTDGSSYVVEGKRMAGAAVVDGTRTIWASSLPEGTSAQKAELMALTQALRLAEGKSINIYTDSRYAFATAHVHGAIYKQRGLLTSAGREIKNKEEILSLLEALHLPKRLAIIHCPGHQKAKDPISRGNQMADRVAKQAAQGVNLLAGKRTADGSEFEKRTADGSEFESPKKKAKVE

SEQ ID NO: 293 - protein, 2087 aa, synthetic construct
MPAAKRVKLDGGDKKYSIGLDIGTNSVGWAVITDEYKVPSKKFKVLGNTDRHSIKKNLIGALLFDSGETAEATRLKRTARRRYTRRKNRICYLQEIFSNEMAKVDDSFFHRLEESFLVEEDKKHERHPIFGNIVDEVAYHEKYPTIYHLRKKLVDSTDKADLRLIYLALAHMIKFRGHFLIEGDLNPDNSDVDKLFIQLVQTYNQLFEENPINASGVDAKAILSARLSKSRRLENLIAQLPGEKKNGLFGNLIALSLGLTPNFKSNFDLAEDAKLQLSKDTYDDDLDNLLAQIGDQYADLFLAAKNLSDAILLSDILRVNTEITKAPLSASMIKRYDEHHQDLTLLKALVRQQLPEKYKEIFFDQSKNGYAGYIDGGASQEEFYKFIKPILEKMDGTEELLVKLNREDLLRKQRTFDNGSIPHQIHLGELHAILRRQEDFYPFLKDNREKIEKILTFRIPYYVGPLARGNSRFAWMTRKSEETITPWNFEEVVDKGASAQSFIERMTNFDKNLPNEKVLPKHSLLYEYFTVYNELTKVKYVTEGMRKPAFLSGEQKKAIVDLLFKTNRKVTVKQLKEDYFKKIECFDSVEISGVEDRFNASLGTYHDLLKIIKDKDFLDNEENEDILEDIVLTLTLFEDREMIEERLKTYAHLFDDKVMKQLKRRRYTGWGRLSRKLINGIRDKQSGKTILDFLKSDGFANRNFMQLIHDDSLTFKEDIQKAQVSGQGDSLHEHIANLAGSPAIKKGILQTVKVVDELVKVMGRHKPENIVIEMARENQTTQKGQKNSRERMKRIEEGIKELGSQILKEHPVENTQLQNEKLYLYYLQNGRDMYVDQELDINRLSDYDVDHIVPQSFLKDDSIDNKVLTRSDKARGKSDNVPSEEVVKKMKNYWRQLLNAKLITQRKFDNLTKAERGGLSELDKAGFIKRQLVETRQITKHVAQILDSRMNTKYDENDKLIREVKVITLKSKLVSDFRKDFQFYKVREINNYHHAHDAYLNAVVGTALIKKYPKLESEFVYGDYKVYDVRKMIAKSEQEIGKATAKYFFYSNIMNFFKTEITLANGEIRKRPLIETNGETGEIVWDKGRDFATVRKVLSMPQVNIVKKTEVQTGGFSKESILPKRNSDKLIARKKDWDPKKYGGFDSPTVAYSVLVVAKVEKGKSKKLKSVKELLGITIMERSSFEKNPIDFLEAKGYKEVKKDLIIKLPKYSLFELENGRKRMLASAGELQKGNELALPSKYVNFLYLASHYEKLKGSPEDNEQKQLFVEQHKHYLDEIIEQISEFSKRVILADANLDKVLSAYNKHRDKPIREQAENIIHLFTLTNLGAPAAFKYFDTTIDRKRYTSTKEVLDATLIHQSITGLYETRIDLSQLGGDGGGSSEAAAKGGTLQLDDEYRLYSPLVKPDQNIQFWLEQFPQAWAETAGMGLAKQVPPQVIQLKASATPVSVRQYPLSKEAQEGIRPHVQRLIQQGILVPVQSPWNTPLLPVRKPGTNDYRPVQDLREVNKRVQDIHPTVPNPYNLLCALPPQRSWYTVLDLKDAFFCLRLHPTSQPLFAFEWRDPGTGRTGQLTWTRLPQGFKNSPTIFDEALHRDLANFRIQHPQVTLLQYVDDLLLAGATKQDCLEGTKALLLELSDLGYRASAKKAQICRREVTYLGYSLRDGQRWLTEARKKTVVQIPAPTTAKQVREFLGTAGFCRLWIPGFATLAAPLYPLTKEKGEFSWAPEHQKAFDAIKKALLSAPALALPDVTKPFTLYVDERKGVARGVLTQTLGPWRRPVAYLSKKLDPVASGWPVCLKAIAAVAILVKDADKLTLGQNITVIAPHALENIVRQPPDRWMTNARMTHYQSLLLTERVTFAPPAALNPATLLPEETDEPVTHDCHQLLIEETGVRKDLTDIPLTGEVLTWFTDGSSYVVEGKRMAGAAVVDGTRTIWASSLPEGTSAQKAELMALTQALRLAEGKSINIYTDSRYAFATAHVHGAIYKQRGLLTSAGREIKNKEEILSLLEALHLPKRLAIIHCPGHQKAKDPISRGNQMADRVAKQAAQGVNLLAGKRTADGSEFEKRTADGSEFESPKKKAKVE

SEQ ID NO: 294 - protein, 2088 aa, synthetic construct
MPAAKRVKLDGGDKKYSIGLDIGTNSVGWAVITDEYKVPSKKFKVLGNTDRHSIKKNLIGALLFDSGETAEATRLKRTARRRYTRRKNRICYLQEIFSNEMAKVDDSFFHRLEESFLVEEDKKHERHPIFGNIVDEVAYHEKYPTIYHLRKKLVDSTDKADLRLIYLALAHMIKFRGHFLIEGDLNPDNSDVDKLFIQLVQTYNQLFEENPINASGVDAKAILSARLSKSRRLENLIAQLPGEKKNGLFGNLIALSLGLTPNFKSNFDLAEDAKLQLSKDTYDDDLDNLLAQIGDQYADLFLAAKNLSDAILLSDILRVNTEITKAPLSASMIKRYDEHHQDLTLLKALVRQQLPEKYKEIFFDQSKNGYAGYIDGGASQEEFYKFIKPILEKMDGTEELLVKLNREDLLRKQRTFDNGSIPHQIHLGELHAILRRQEDFYPFLKDNREKIEKILTFRIPYYVGPLARGNSRFAWMTRKSEETITPWNFEEVVDKGASAQSFIERMTNFDKNLPNEKVLPKHSLLYEYFTVYNELTKVKYVTEGMRKPAFLSGEQKKAIVDLLFKTNRKVTVKQLKEDYFKKIECFDSVEISGVEDRFNASLGTYHDLLKIIKDKDFLDNEENEDILEDIVLTLTLFEDREMIEERLKTYAHLFDDKVMKQLKRRRYTGWGRLSRKLINGIRDKQSGKTILDFLKSDGFANRNFMQLIHDDSLTFKEDIQKAQVSGQGDSLHEHIANLAGSPAIKKGILQTVKVVDELVKVMGRHKPENIVIEMARENQTTQKGQKNSRERMKRIEEGIKELGSQILKEHPVENTQLQNEKLYLYYLQNGRDMYVDQELDINRLSDYDVDHIVPQSFLKDDSIDNKVLTRSDKARGKSDNVPSEEVVKKMKNYWRQLLNAKLITQRKFDNLTKAERGGLSELDKAGFIKRQLVETRQITKHVAQILDSRMNTKYDENDKLIREVKVITLKSKLVSDFRKDFQFYKVREINNYHHAHDAYLNAVVGTALIKKYPKLESEFVYGDYKVYDVRKMIAKSEQEIGKATAKYFFYSNIMNFFKTEITLANGEIRKRPLIETNGETGEIVWDKGRDFATVRKVLSMPQVNIVKKTEVQTGGFSKESILPKRNSDKLIARKKDWDPKKYGGFDSPTVAYSVLVVAKVEKGKSKKLKSVKELLGITIMERSSFEKNPIDFLEAKGYKEVKKDLIIKLPKYSLFELENGRKRMLASAGELQKGNELALPSKYVNFLYLASHYEKLKGSPEDNEQKQLFVEQHKHYLDEIIEQISEFSKRVILADANLDKVLSAYNKHRDKPIREQAENIIHLFTLTNLGAPAAFKYFDTTIDRKRYTSTKEVLDATLIHQSITGLYETRIDLSQLGGDGGGGSGGSGGSGGTLQLDDEYRLYSPLVKPDQNIQFWLEQFPQAWAETAGMGLAKQVPPQVIQLKASATPVSVRQYPLSKEAQEGIRPHVQRLIQQGILVPVQSPWNTPLLPVRKPGTNDYRPVQDLREVNKRVQDIHPTVPNPYNLLCALPPQRSWYTVLDLKDAFFCLRLHPTSQPLFAFEWRDPGTGRTGQLTWTRLPQGFKNSPTIFDEALHRDLANFRIQHPQVTLLQYVDDLLLAGATKQDCLEGTKALLLELSDLGYRASAKKAQICRREVTYLGYSLRDGQRWLTEARKKTVVQIPAPTTAKQVREFLGTAGFCRLWIPGFATLAAPLYPLTKEKGEFSWAPEHQKAFDAIKKALLSAPALALPDVTKPFTLYVDERKGVARGVLTQTLGPWRRPVAYLSKKLDPVASGWPVCLKAIAAVAILVKDADKLTLGQNITVIAPHALENIVRQPPDRWMTNARMTHYQSLLLTERVTFAPPAALNPATLLPEETDEPVTHDCHQLLIEETGVRKDLTDIPLTGEVLTWFTDGSSYVVEGKRMAGAAVVDGTRTIWASSLPEGTSAQKAELMALTQALRLAEGKSINIYTDSRYAFATAHVHGAIYKQRGLLTSAGREIKNKEEILSLLEALHLPKRLAIIHCPGHQKAKDPISRGNQMADRVAKQAAQGVNLLAGKRTADGSEFEKRTADGSEFESPKKKAKVE

SEQ ID NO: 295 - protein, 2088 aa, synthetic construct
MPAAKRVKLDGGDKKYSIGLDIGTNSVGWAVITDEYKVPSKKFKVLGNTDRHSIKKNLIGALLFDSGETAEATRLKRTARRRYTRRKNRICYLQEIFSNEMAKVDDSFFHRLEESFLVEEDKKHERHPIFGNIVDEVAYHEKYPTIYHLRKKLVDSTDKADLRLIYLALAHMIKFRGHFLIEGDLNPDNSDVDKLFIQLVQTYNQLFEENPINASGVDAKAILSARLSKSRRLENLIAQLPGEKKNGLFGNLIALSLGLTPNFKSNFDLAEDAKLQLSKDTYDDDLDNLLAQIGDQYADLFLAAKNLSDAILLSDILRVNTEITKAPLSASMIKRYDEHHQDLTLLKALVRQQLPEKYKEIFFDQSKNGYAGYIDGGASQEEFYKFIKPILEKMDGTEELLVKLNREDLLRKQRTFDNGSIPHQIHLGELHAILRRQEDFYPFLKDNREKIEKILTFRIPYYVGPLARGNSRFAWMTRKSEETITPWNFEEVVDKGASAQSFIERMTNFDKNLPNEKVLPKHSLLYEYFTVYNELTKVKYVTEGMRKPAFLSGEQKKAIVDLLFKTNRKVTVKQLKEDYFKKIECFDSVEISGVEDRFNASLGTYHDLLKIIKDKDFLDNEENEDILEDIVLTLTLFEDREMIEERLKTYAHLFDDKVMKQLKRRRYTGWGRLSRKLINGIRDKQSGKTILDFLKSDGFANRNFMQLIHDDSLTFKEDIQKAQVSGQGDSLHEHIANLAGSPAIKKGILQTVKVVDELVKVMGRHKPENIVIEMARENQTTQKGQKNSRERMKRIEEGIKELGSQILKEHPVENTQLQNEKLYLYYLQNGRDMYVDQELDINRLSDYDVDHIVPQSFLKDDSIDNKVLTRSDKARGKSDNVPSEEVVKKMKNYWRQLLNAKLITQRKFDNLTKAERGGLSELDKAGFIKRQLVETRQITKHVAQILDSRMNTKYDENDKLIREVKVITLKSKLVSDFRKDFQFYKVREINNYHHAHDAYLNAVVGTALIKKYPKLESEFVYGDYKVYDVRKMIAKSEQEIGKATAKYFFYSNIMNFFKTEITLANGEIRKRPLIETNGETGEIVWDKGRDFATVRKVLSMPQVNIVKKTEVQTGGFSKESILPKRNSDKLIARKKDWDPKKYGGFDSPTVAYSVLVVAKVEKGKSKKLKSVKELLGITIMERSSFEKNPIDFLEAKGYKEVKKDLIIKLPKYSLFELENGRKRMLASAGELQKGNELALPSKYVNFLYLASHYEKLKGSPEDNEQKQLFVEQHKHYLDEIIEQISEFSKRVILADANLDKVLSAYNKHRDKPIREQAENIIHLFTLTNLGAPAAFKYFDTTIDRKRYTSTKEVLDATLIHQSITGLYETRIDLSQLGGDGGGSSPAPGGSGGTLQLDDEYRLYSPLVKPDQNIQFWLEQFPQAWAETAGMGLAKQVPPQVIQLKASATPVSVRQYPLSKEAQEGIRPHVQRLIQQGILVPVQSPWNTPLLPVRKPGTNDYRPVQDLREVNKRVQDIHPTVPNPYNLLCALPPQRSWYTVLDLKDAFFCLRLHPTSQPLFAFEWRDPGTGRTGQLTWTRLPQGFKNSPTIFDEALHRDLANFRIQHPQVTLLQYVDDLLLAGATKQDCLEGTKALLLELSDLGYRASAKKAQICRREVTYLGYSLRDGQRWLTEARKKTVVQIPAPTTAKQVREFLGTAGFCRLWIPGFATLAAPLYPLTKEKGEFSWAPEHQKAFDAIKKALLSAPALALPDVTKPFTLYVDERKGVARGVLTQTLGPWRRPVAYLSKKLDPVASGWPVCLKAIAAVAILVKDADKLTLGQNITVIAPHALENIVRQPPDRWMTNARMTHYQSLLLTERVTFAPPAALNPATLLPEETDEPVTHDCHQLLIEETGVRKDLTDIPLTGEVLTWFTDGSSYVVEGKRMAGAAVVDGTRTIWASSLPEGTSAQKAELMALTQALRLAEGKSINIYTDSRYAFATAHVHGAIYKQRGLLTSAGREIKNKEEILSLLEALHLPKRLAIIHCPGHQKAKDPISRGNQMADRVAKQAAQGVNLLAGKRTADGSEFEKRTADGSEFESPKKKAKVE

SEQ ID NO: 296 - protein, 2090 aa, synthetic construct
MPAAKRVKLDGGDKKYSIGLDIGTNSVGWAVITDEYKVPSKKFKVLGNTDRHSIKKNLIGALLFDSGETAEATRLKRTARRRYTRRKNRICYLQEIFSNEMAKVDDSFFHRLEESFLVEEDKKHERHPIFGNIVDEVAYHEKYPTIYHLRKKLVDSTDKADLRLIYLALAHMIKFRGHFLIEGDLNPDNSDVDKLFIQLVQTYNQLFEENPINASGVDAKAILSARLSKSRRLENLIAQLPGEKKNGLFGNLIALSLGLTPNFKSNFDLAEDAKLQLSKDTYDDDLDNLLAQIGDQYADLFLAAKNLSDAILLSDILRVNTEITKAPLSASMIKRYDEHHQDLTLLKALVRQQLPEKYKEIFFDQSKNGYAGYIDGGASQEEFYKFIKPILEKMDGTEELLVKLNREDLLRKQRTFDNGSIPHQIHLGELHAILRRQEDFYPFLKDNREKIEKILTFRIPYYVGPLARGNSRFAWMTRKSEETITPWNFEEVVDKGASAQSFIERMTNFDKNLPNEKVLPKHSLLYEYFTVYNELTKVKYVTEGMRKPAFLSGEQKKAIVDLLFKTNRKVTVKQLKEDYFKKIECFDSVEISGVEDRFNASLGTYHDLLKIIKDKDFLDNEENEDILEDIVLTLTLFEDREMIEERLKTYAHLFDDKVMKQLKRRRYTGWGRLSRKLINGIRDKQSGKTILDFLKSDGFANRNFMQLIHDDSLTFKEDIQKAQVSGQGDSLHEHIANLAGSPAIKKGILQTVKVVDELVKVMGRHKPENIVIEMARENQTTQKGQKNSRERMKRIEEGIKELGSQILKEHPVENTQLQNEKLYLYYLQNGRDMYVDQELDINRLSDYDVDHIVPQSFLKDDSIDNKVLTRSDKARGKSDNVPSEEVVKKMKNYWRQLLNAKLITQRKFDNLTKAERGGLSELDKAGFIKRQLVETRQITKHVAQILDSRMNTKYDENDKLIREVKVITLKSKLVSDFRKDFQFYKVREINNYHHAHDAYLNAVVGTALIKKYPKLESEFVYGDYKVYDVRKMIAKSEQEIGKATAKYFFYSNIMNFFKTEITLANGEIRKRPLIETNGETGEIVWDKGRDFATVRKVLSMPQVNIVKKTEVQTGGFSKESILPKRNSDKLIARKKDWDPKKYGGFDSPTVAYSVLVVAKVEKGKSKKLKSVKELLGITIMERSSFEKNPIDFLEAKGYKEVKKDLIIKLPKYSLFELENGRKRMLASAGELQKGNELALPSKYVNFLYLASHYEKLKGSPEDNEQKQLFVEQHKHYLDEIIEQISEFSKRVILADANLDKVLSAYNKHRDKPIREQAENIIHLFTLTNLGAPAAFKYFDTTIDRKRYTSTKEVLDATLIHQSITGLYETRIDLSQLGGDGGEAAAKGSSGGGGGTLQLDDEYRLYSPLVKPDQNIQFWLEQFPQAWAETAGMGLAKQVPPQVIQLKASATPVSVRQYPLSKEAQEGIRPHVQRLIQQGILVPVQSPWNTPLLPVRKPGTNDYRPVQDLREVNKRVQDIHPTVPNPYNLLCALPPQRSWYTVLDLKDAFFCLRLHPTSQPLFAFEWRDPGTGRTGQLTWTRLPQGFKNSPTIFDEALHRDLANFRIQHPQVTLLQYVDDLLLAGATKQDCLEGTKALLLELSDLGYRASAKKAQICRREVTYLGYSLRDGQRWLTEARKKTVVQIPAPTTAKQVREFLGTAGFCRLWIPGFATLAAPLYPLTKEKGEFSWAPEHQKAFDAIKKALLSAPALALPDVTKPFTLYVDERKGVARGVLTQTLGPWRRPVAYLSKKLDPVASGWPVCLKAIAAVAILVKDADKLTLGQNITVIAPHALENIVRQPPDRWMTNARMTHYQSLLLTERVTFAPPAALNPATLLPEETDEPVTHDCHQLLIEETGVRKDLTDIPLTGEVLTWFTDGSSYVVEGKRMAGAAVVDGTRTIWASSLPEGTSAQKAELMALTQALRLAEGKSINIYTDSRYAFATAHVHGAIYKQRGLLTSAGREIKNKEEILSLLEALHLPKRLAIIHCPGHQKAKDPISRGNQMADRVAKQAAQGVNLLAGKRTADGSEFEKRTADGSEFESPKKKAKVE

SEQ ID NO: 297 - protein, 2087 aa, synthetic construct
MPAAKRVKLDGGDKKYSIGLDIGTNSVGWAVITDEYKVPSKKFKVLGNTDRHSIKKNLIGALLFDSGETAEATRLKRTARRRYTRRKNRICYLQEIFSNEMAKVDDSFFHRLEESFLVEEDKKHERHPIFGNIVDEVAYHEKYPTIYHLRKKLVDSTDKADLRLIYLALAHMIKFRGHFLIEGDLNPDNSDVDKLFIQLVQTYNQLFEENPINASGVDAKAILSARLSKSRRLENLIAQLPGEKKNGLFGNLIALSLGLTPNFKSNFDLAEDAKLQLSKDTYDDDLDNLLAQIGDQYADLFLAAKNLSDAILLSDILRVNTEITKAPLSASMIKRYDEHHQDLTLLKALVRQQLPEKYKEIFFDQSKNGYAGYIDGGASQEEFYKFIKPILEKMDGTEELLVKLNREDLLRKQRTFDNGSIPHQIHLGELHAILRRQEDFYPFLKDNREKIEKILTFRIPYYVGPLARGNSRFAWMTRKSEETITPWNFEEVVDKGASAQSFIERMTNFDKNLPNEKVLPKHSLLYEYFTVYNELTKVKYVTEGMRKPAFLSGEQKKAIVDLLFKTNRKVTVKQLKEDYFKKIECFDSVEISGVEDRFNASLGTYHDLLKIIKDKDFLDNEENEDILEDIVLTLTLFEDREMIEERLKTYAHLFDDKVMKQLKRRRYTGWGRLSRKLINGIRDKQSGKTILDFLKSDGFANRNFMQLIHDDSLTFKEDIQKAQVSGQGDSLHEHIANLAGSPAIKKGILQTVKVVDELVKVMGRHKPENIVIEMARENQTTQKGQKNSRERMKRIEEGIKELGSQILKEHPVENTQLQNEKLYLYYLQNGRDMYVDQELDINRLSDYDVDHIVPQSFLKDDSIDNKVLTRSDKARGKSDNVPSEEVVKKMKNYWRQLLNAKLITQRKFDNLTKAERGGLSELDKAGFIKRQLVETRQITKHVAQILDSRMNTKYDENDKLIREVKVITLKSKLVSDFRKDFQFYKVREINNYHHAHDAYLNAVVGTALIKKYPKLESEFVYGDYKVYDVRKMIAKSEQEIGKATAKYFFYSNIMNFFKTEITLANGEIRKRPLIETNGETGEIVWDKGRDFATVRKVLSMPQVNIVKKTEVQTGGFSKESILPKRNSDKLIARKKDWDPKKYGGFDSPTVAYSVLVVAKVEKGKSKKLKSVKELLGITIMERSSFEKNPIDFLEAKGYKEVKKDLIIKLPKYSLFELENGRKRMLASAGELQKGNELALPSKYVNFLYLASHYEKLKGSPEDNEQKQLFVEQHKHYLDEIIEQISEFSKRVILADANLDKVLSAYNKHRDKPIREQAENIIHLFTLTNLGAPAAFKYFDTTIDRKRYTSTKEVLDATLIHQSITGLYETRIDLSQLGGDGGEAAAKPAPGGTLQLDDEYRLYSPLVKPDQNIQFWLEQFPQAWAETAGMGLAKQVPPQVIQLKASATPVSVRQYPLSKEAQEGIRPHVQRLIQQGILVPVQSPWNTPLLPVRKPGTNDYRPVQDLREVNKRVQDIHPTVPNPYNLLCALPPQRSWYTVLDLKDAFFCLRLHPTSQPLFAFEWRDPGTGRTGQLTWTRLPQGFKNSPTIFDEALHRDLANFRIQHPQVTLLQYVDDLLLAGATKQDCLEGTKALLLELSDLGYRASAKKAQICRREVTYLGYSLRDGQRWLTEARKKTVVQIPAPTTAKQVREFLGTAGFCRLWIPGFATLAAPLYPLTKEKGEFSWAPEHQKAFDAIKKALLSAPALALPDVTKPFTLYVDERKGVARGVLTQTLGPWRRPVAYLSKKLDPVASGWPVCLKAIAAVAILVKDADKLTLGQNITVIAPHALENIVRQPPDRWMTNARMTHYQSLLLTERVTFAPPAALNPATLLPEETDEPVTHDCHQLLIEETGVRKDLTDIPLTGEVLTWFTDGSSYVVEGKRMAGAAVVDGTRTIWASSLPEGTSAQKAELMALTQALRLAEGKSINIYTDSRYAFATAHVHGAIYKQRGLLTSAGREIKNKEEILSLLEALHLPKRLAIIHCPGHQKAKDPISRGNQMADRVAKQAAQGVNLLAGKRTADGSEFEKRTADGSEFESPKKKAKVE

SEQ ID NO: 298 - protein, 2094 aa, synthetic construct
MPAAKRVKLDGGDKKYSIGLDIGTNSVGWAVITDEYKVPSKKFKVLGNTDRHSIKKNLIGALLFDSGETAEATRLKRTARRRYTRRKNRICYLQEIFSNEMAKVDDSFFHRLEESFLVEEDKKHERHPIFGNIVDEVAYHEKYPTIYHLRKKLVDSTDKADLRLIYLALAHMIKFRGHFLIEGDLNPDNSDVDKLFIQLVQTYNQLFEENPINASGVDAKAILSARLSKSRRLENLIAQLPGEKKNGLFGNLIALSLGLTPNFKSNFDLAEDAKLQLSKDTYDDDLDNLLAQIGDQYADLFLAAKNLSDAILLSDILRVNTEITKAPLSASMIKRYDEHHQDLTLLKALVRQQLPEKYKEIFFDQSKNGYAGYIDGGASQEEFYKFIKPILEKMDGTEELLVKLNREDLLRKQRTFDNGSIPHQIHLGELHAILRRQEDFYPFLKDNREKIEKILTFRIPYYVGPLARGNSRFAWMTRKSEETITPWNFEEVVDKGASAQSFIERMTNFDKNLPNEKVLPKHSLLYEYFTVYNELTKVKYVTEGMRKPAFLSGEQKKAIVDLLFKTNRKVTVKQLKEDYFKKIECFDSVEISGVEDRFNASLGTYHDLLKIIKDKDFLDNEENEDILEDIVLTLTLFEDREMIEERLKTYAHLFDDKVMKQLKRRRYTGWGRLSRKLINGIRDKQSGKTILDFLKSDGFANRNFMQLIHDDSLTFKEDIQKAQVSGQGDSLHEHIANLAGSPAIKKGILQTVKVVDELVKVMGRHKPENIVIEMARENQTTQKGQKNSRERMKRIEEGIKELGSQILKEHPVENTQLQNEKLYLYYLQNGRDMYVDQELDINRLSDYDVDHIVPQSFLKDDSIDNKVLTRSDKARGKSDNVPSEEVVKKMKNYWRQLLNAKLITQRKFDNLTKAERGGLSELDKAGFIKRQLVETRQITKHVAQILDSRMNTKYDENDKLIREVKVITLKSKLVSDFRKDFQFYKVREINNYHHAHDAYLNAVVGTALIKKYPKLESEFVYGDYKVYDVRKMIAKSEQEIGKATAKYFFYSNIMNFFKTEITLANGEIRKRPLIETNGETGEIVWDKGRDFATVRKVLSMPQVNIVKKTEVQTGGFSKESILPKRNSDKLIARKKDWDPKKYGGFDSPTVAYSVLVVAKVEKGKSKKLKSVKELLGITIMERSSFEKNPIDFLEAKGYKEVKKDLIIKLPKYSLFELENGRKRMLASAGELQKGNELALPSKYVNFLYLASHYEKLKGSPEDNEQKQLFVEQHKHYLDEIIEQISEFSKRVILADANLDKVLSAYNKHRDKPIREQAENIIHLFTLTNLGAPAAFKYFDTTIDRKRYTSTKEVLDATLIHQSITGLYETRIDLSQLGGDGGEAAAKEAAAKEAAAKGGTLQLDDEYRLYSPLVKPDQNIQFWLEQFPQAWAETAGMGLAKQVPPQVIQLKASATPVSVRQYPLSKEAQEGIRPHVQRLIQQGILVPVQSPWNTPLLPVRKPGTNDYRPVQDLREVNKRVQDIHPTVPNPYNLLCALPPQRSWYTVLDLKDAFFCLRLHPTSQPLFAFEWRDPGTGRTGQLTWTRLPQGFKNSPTIFNEALHRDLANFRIQHPQVTLLQYVDDLLLAGATKQDCLEGTKALLLELSDLGYRASAKKAQICRREVTYLGYSLRDGQRWLTEARKKTVVQIPAPTTAKQVREFLGTAGFCRLWIPGFATLAAPLYPLTKPKGEFSWAPEHQKAFDAIKKALLSAPALALPDVTKPFTLYVDERKGVARGVLTQTLGPWRRPVAYLSKKLDPVASGWPVCLKAIAAVAILVKDADKLTLGQNITVIAPHALENIVRQPPDRWMTNARMTHYQSLLLTERVTFAPPAALNPATLLPEETDEPVTHDCHQLLIEETGVRKDLTDIPLTGEVLTWFTDGSSYVVEGKRMAGAAVVDGTRTIWASSLPEGTSAQKAELMALTQALRLAEGKSINIYTDSRYAFATAHVHGAIYKQRGWLTSAGREIKNKEEILSLLEALHLPKRLAIIHCPGHQKAKDPISRGNQMADRVAKQAAQGVNLLAGKRTADGSEFEKRTADGSEFESPKKKAKVE

SEQ ID NO: 299 - protein, 2090 aa, synthetic construct
MPAAKRVKLDGGDKKYSIGLDIGTNSVGWAVITDEYKVPSKKFKVLGNTDRHSIKKNLIGALLFDSGETAEATRLKRTARRRYTRRKNRICYLQEIFSNEMAKVDDSFFHRLEESFLVEEDKKHERHPIFGNIVDEVAYHEKYPTIYHLRKKLVDSTDKADLRLIYLALAHMIKFRGHFLIEGDLNPDNSDVDKLFIQLVQTYNQLFEENPINASGVDAKAILSARLSKSRRLENLIAQLPGEKKNGLFGNLIALSLGLTPNFKSNFDLAEDAKLQLSKDTYDDDLDNLLAQIGDQYADLFLAAKNLSDAILLSDILRVNTEITKAPLSASMIKRYDEHHQDLTLLKALVRQQLPEKYKEIFFDQSKNGYAGYIDGGASQEEFYKFIKPILEKMDGTEELLVKLNREDLLRKQRTFDNGSIPHQIHLGELHAILRRQEDFYPFLKDNREKIEKILTFRIPYYVGPLARGNSRFAWMTRKSEETITPWNFEEVVDKGASAQSFIERMTNFDKNLPNEKVLPKHSLLYEYFTVYNELTKVKYVTEGMRKPAFLSGEQKKAIVDLLFKTNRKVTVKQLKEDYFKKIECFDSVEISGVEDRFNASLGTYHDLLKIIKDKDFLDNEENEDILEDIVLTLTLFEDREMIEERLKTYAHLFDDKVMKQLKRRRYTGWGRLSRKLINGIRDKQSGKTILDFLKSDGFANRNFMQLIHDDSLTFKEDIQKAQVSGQGDSLHEHIANLAGSPAIKKGILQTVKVVDELVKVMGRHKPENIVIEMARENQTTQKGQKNSRERMKRIEEGIKELGSQILKEHPVENTQLQNEKLYLYYLQNGRDMYVDQELDINRLSDYDVDHIVPQSFLKDDSIDNKVLTRSDKARGKSDNVPSEEVVKKMKNYWRQLLNAKLITQRKFDNLTKAERGGLSELDKAGFIKRQLVETRQITKHVAQILDSRMNTKYDENDKLIREVKVITLKSKLVSDFRKDFQFYKVREINNYHHAHDAYLNAVVGTALIKKYPKLESEFVYGDYKVYDVRKMIAKSEQEIGKATAKYFFYSNIMNFFKTEITLANGEIRKRPLIETNGETGEIVWDKGRDFATVRKVLSMPQVNIVKKTEVQTGGFSKESILPKRNSDKLIARKKDWDPKKYGGFDSPTVAYSVLVVAKVEKGKSKKLKSVKELLGITIMERSSFEKNPIDFLEAKGYKEVKKDLIIKLPKYSLFELENGRKRMLASAGELQKGNELALPSKYVNFLYLASHYEKLKGSPEDNEQKQLFVEQHKHYLDEIIEQISEFSKRVILADANLDKVLSAYNKHRDKPIREQAENIIHLFTLTNLGAPAAFKYFDTTIDRKRYTSTKEVLDATLIHQSITGLYETRIDLSQLGGDGGEAAAKGGSGGGGGTLQLDDEYRLYSPLVKPDQNIQFWLEQFPQAWAETAGMGLAKQVPPQVIQLKASATPVSVRQYPLSKEAQEGIRPHVQRLIQQGILVPVQSPWNTPLLPVRKPGTNDYRPVQDLREVNKRVQDIHPTVPNPYNLLCALPPQRSWYTVLDLKDAFFCLRLHPTSQPLFAFEWRDPGTGRTGQLTWTRLPQGFKNSPTIFNEALHRDLANFRIQHPQVTLLQYVDDLLLAGATKQDCLEGTKALLLELSDLGYRASAKKAQICRREVTYLGYSLRDGQRWLTEARKKTVVQIPAPTTAKQVREFLGTAGFCRLWIPGFATLAAPLYPLTKPKGEFSWAPEHQKAFDAIKKALLSAPALALPDVTKPFTLYVDERKGVARGVLTQTLGPWRRPVAYLSKKLDPVASGWPVCLKAIAAVAILVKDADKLTLGQNITVIAPHALENIVRQPPDRWMTNARMTHYQSLLLTERVTFAPPAALNPATLLPEETDEPVTHDCHQLLIEETGVRKDLTDIPLTGEVLTWFTDGSSYVVEGKRMAGAAVVDGTRTIWASSLPEGTSAQKAELMALTQALRLAEGKSINIYTDSRYAFATAHVHGAIYKQRGWLTSAGREIKNKEEILSLLEALHLPKRLAIIHCPGHQKAKDPISRGNQMADRVAKQAAQGVNLLAGKRTADGSEFEKRTADGSEFESPKKKAKVE

SEQ ID NO: 300 - protein, 2125 aa, synthetic construct; identical to SEQ ID NO: 156

SEQ ID NO: 301 - protein, 2090 aa, synthetic construct
MPAAKRVKLDGGDKKYSIGLDIGTNSVGWAVITDEYKVPSKKFKVLGNTDRHSIKKNLIGALLFDSGETAEATRLKRTARRRYTRRKNRICYLQEIFSNEMAKVDDSFFHRLEESFLVEEDKKHERHPIFGNIVDEVAYHEKYPTIYHLRKKLVDSTDKADLRLIYLALAHMIKFRGHFLIEGDLNPDNSDVDKLFIQLVQTYNQLFEENPINASGVDAKAILSARLSKSRRLENLIAQLPGEKKNGLFGNLIALSLGLTPNFKSNFDLAEDAKLQLSKDTYDDDLDNLLAQIGDQYADLFLAAKNLSDAILLSDILRVNTEITKAPLSASMIKRYDEHHQDLTLLKALVRQQLPEKYKEIFFDQSKNGYAGYIDGGASQEEFYKFIKPILEKMDGTEELLVKLNREDLLRKQRTFDNGSIPHQIHLGELHAILRRQEDFYPFLKDNREKIEKILTFRIPYYVGPLARGNSRFAWMTRKSEETITPWNFEEVVDKGASAQSFIERMTNFDKNLPNEKVLPKHSLLYEYFTVYNELTKVKYVTEGMRKPAFLSGEQKKAIVDLLFKTNRKVTVKQLKEDYFKKIECFDSVEISGVEDRFNASLGTYHDLLKIIKDKDFLDNEENEDILEDIVLTLTLFEDREMIEERLKTYAHLFDDKVMKQLKRRRYTGWGRLSRKLINGIRDKQSGKTILDFLKSDGFANRNFMQLIHDDSLTFKEDIQKAQVSGQGDSLHEHIANLAGSPAIKKGILQTVKVVDELVKVMGRHKPENIVIEMARENQTTQKGQKNSRERMKRIEEGIKELGSQILKEHPVENTQLQNEKLYLYYLQNGRDMYVDQELDINRLSDYDVDHIVPQSFLKDDSIDNKVLTRSDKARGKSDNVPSEEVVKKMKNYWRQLLNAKLITQRKFDNLTKAERGGLSELDKAGFIKRQLVETRQITKHVAQILDSRMNTKYDENDKLIREVKVITLKSKLVSDFRKDFQFYKVREINNYHHAHDAYLNAVVGTALIKKYPKLESEFVYGDYKVYDVRKMIAKSEQEIGKATAKYFFYSNIMNFFKTEITLANGEIRKRPLIETNGETGEIVWDKGRDFATVRKVLSMPQVNIVKKTEVQTGGFSKESILPKRNSDKLIARKKDWDPKKYGGFDSPTVAYSVLVVAKVEKGKSKKLKSVKELLGITIMERSSFEKNPIDFLEAKGYKEVKKDLIIKLPKYSLFELENGRKRMLASAGELQKGNELALPSKYVNFLYLASHYEKLKGSPEDNEQKQLFVEQHKHYLDEIIEQISEFSKRVILADANLDKVLSAYNKHRDKPIREQAENIIHLFTLTNLGAPAAFKYFDTTIDRKRYTSTKEVLDATLIHQSITGLYETRIDLSQLGGDGGGGGEAAAKGSSGGTLQLDDEYRLYSPLVKPDQNIQFWLEQFPQAWAETAGMGLAKQVPPQVIQLKASATPVSVRQYPLSKEAQEGIRPHVQRLIQQGILVPVQSPWNTPLLPVRKPGTNDYRPVQDLREVNKRVQDIHPTVPNPYNLLCALPPQRSWYTVLDLKDAFFCLRLHPTSQPLFAFEWRDPGTGRTGQLTWTRLPQGFKNSPTIFNEALHRDLANFRIQHPQVTLLQYVDDLLLAGATKQDCLEGTKALLLELSDLGYRASAKKAQICRREVTYLGYSLRDGQRWLTEARKKTVVQIPAPTTAKQVREFLGTAGFCRLWIPGFATLAAPLYPLTKPKGEFSWAPEHQKAFDAIKKALLSAPALALPDVTKPFTLYVDERKGVARGVLTQTLGPWRRPVAYLSKKLDPVASGWPVCLKAIAAVAILVKDADKLTLGQNITVIAPHALENIVRQPPDRWMTNARMTHYQSLLLTERVTFAPPAALNPATLLPEETDEPVTHDCHQLLIEETGVRKDLTDIPLTGEVLTWFTDGSSYVVEGKRMAGAAVVDGTRTIWASSLPEGTSAQKAELMALTQALRLAEGKSINIYTDSRYAFATAHVHGAIYKQRGWLTSAGREIKNKEEILSLLEALHLPKRLAIIHCPGHQKAKDPISRGNQMADRVAKQAAQGVNLLAGKRTADGSEFEKRTADGSEFESPKKKAKVE

SEQ ID NO: 302 - protein, 2090 aa, synthetic construct; identical to SEQ ID NO: 164

SEQ ID NO: 303 - protein, 2112 aa, synthetic construct; identical to SEQ ID NO: 140

SEQ ID NO: 304 - protein, 2090 aa, synthetic construct
MPAAKRVKLDGGDKKYSIGLDIGTNSVGWAVITDEYKVPSKKFKVLGNTDRHSIKKNLIGALLFDSGETAEATRLKRTARRRYTRRKNRICYLQEIFSNEMAKVDDSFFHRLEESFLVEEDKKHERHPIFGNIVDEVAYHEKYPTIYHLRKKLVDSTDKADLRLIYLALAHMIKFRGHFLIEGDLNPDNSDVDKLFIQLVQTYNQLFEENPINASGVDAKAILSARLSKSRRLENLIAQLPGEKKNGLFGNLIALSLGLTPNFKSNFDLAEDAKLQLSKDTYDDDLDNLLAQIGDQYADLFLAAKNLSDAILLSDILRVNTEITKAPLSASMIKRYDEHHQDLTLLKALVRQQLPEKYKEIFFDQSKNGYAGYIDGGASQEEFYKFIKPILEKMDGTEELLVKLNREDLLRKQRTFDNGSIPHQIHLGELHAILRRQEDFYPFLKDNREKIEKILTFRIPYYVGPLARGNSRFAWMTRKSEETITPWNFEEVVDKGASAQSFIERMTNFDKNLPNEKVLPKHSLLYEYFTVYNELTKVKYVTEGMRKPAFLSGEQKKAIVDLLFKTNRKVTVKQLKEDYFKKIECFDSVEISGVEDRFNASLGTYHDLLKIIKDKDFLDNEENEDILEDIVLTLTLFEDREMIEERLKTYAHLFDDKVMKQLKRRRYTGWGRLSRKLINGIRDKQSGKTILDFLKSDGFANRNFMQLIHDDSLTFKEDIQKAQVSGQGDSLHEHIANLAGSPAIKKGILQTVKVVDELVKVMGRHKPENIVIEMARENQTTQKGQKNSRERMKRIEEGIKELGSQILKEHPVENTQLQNEKLYLYYLQNGRDMYVDQELDINRLSDYDVDHIVPQSFLKDDSIDNKVLTRSDKARGKSDNVPSEEVVKKMKNYWRQLLNAKLITQRKFDNLTKAERGGLSELDKAGFIKRQLVETRQITKHVAQILDSRMNTKYDENDKLIREVKVITLKSKLVSDFRKDFQFYKVREINNYHHAHDAYLNAVVGTALIKKYPKLESEFVYGDYKVYDVRKMIAKSEQEIGKATAKYFFYSNIMNFFKTEITLANGEIRKRPLIETNGETGEIVWDKGRDFATVRKVLSMPQVNIVKKTEVQTGGFSKESILPKRNSDKLIARKKDWDPKKYGGFDSPTVAYSVLVVAKVEKGKSKKLKSVKELLGITIMERSSFEKNPIDFLEAKGYKEVKKDLIIKLPKYSLFELENGRKRMLASAGELQKGNELALPSKYVNFLYLASHYEKLKGSPEDNEQKQLFVEQHKHYLDEIIEQISEFSKRVILADANLDKVLSAYNKHRDKPIREQAENIIHLFTLTNLGAPAAFKYFDTTIDRKRYTSTKEVLDATLIHQSITGLYETRIDLSQLGGDGGEAAAKPAPGSSGGTLQLDDEYRLYSPLVKPDQNIQFWLEQFPQAWAETAGMGLAKQVPPQVIQLKASATPVSVRQYPLSKEAQEGIRPHVQRLIQQGILVPVQSPWNTPLLPVRKPGTNDYRPVQDLREVNKRVQDIHPTVPNPYNLLCALPPQRSWYTVLDLKDAFFCLRLHPTSQPLFAFEWRDPGTGRTGQLTWTRLPQGFKNSPTIFNEALHRDLANFRIQHPQVTLLQYVDDLLLAGATKQDCLEGTKALLLELSDLGYRASAKKAQICRREVTYLGYSLRDGQRWLTEARKKTVVQIPAPTTAKQVREFLGTAGFCRLWIPGFATLAAPLYPLTKPKGEFSWAPEHQKAFDAIKKALLSAPALALPDVTKPFTLYVDERKGVARGVLTQTLGPWRRPVAYLSKKLDPVASGWPVCLKAIAAVAILVKDADKLTLGQNITVIAPHALENIVRQPPDRWMTNARMTHYQSLLLTERVTFAPPAALNPATLLPEETDEPVTHDCHQLLIEETGVRKDLTDIPLTGEVLTWFTDGSSYVVEGKRMAGAAVVDGTRTIWASSLPEGTSAQKAELMALTQALRLAEGKSINIYTDSRYAFATAHVHGAIYKQRGWLTSAGREIKNKEEILSLLEALHLPKRLAIIHCPGHQKAKDPISRGNQMADRVAKQAAQGVNLLAGKRTADGSEFEKRTADGSEFESPKKKAKVE

SEQ ID NO: 305 - protein, 2090 aa, synthetic construct; identical to SEQ ID NO: 127

SEQ ID NO: 306 - protein, 2087 aa, synthetic construct; identical to SEQ ID NO: 126

SEQ ID NO: 307 - protein, 2088 aa, synthetic construct
MPAAKRVKLDGGDKKYSIGLDIGTNSVGWAVITDEYKVPSKKFKVLGNTDRHSIKKNLIGALLFDSGETAEATRLKRTARRRYTRRKNRICYLQEIFSNEMAKVDDSFFHRLEESFLVEEDKKHERHPIFGNIVDEVAYHEKYPTIYHLRKKLVDSTDKADLRLIYLALAHMIKFRGHFLIEGDLNPDNSDVDKLFIQLVQTYNQLFEENPINASGVDAKAILSARLSKSRRLENLIAQLPGEKKNGLFGNLIALSLGLTPNFKSNFDLAEDAKLQLSKDTYDDDLDNLLAQIGDQYADLFLAAKNLSDAILLSDILRVNTEITKAPLSASMIKRYDEHHQDLTLLKALVRQQLPEKYKEIFFDQSKNGYAGYIDGGASQEEFYKFIKPILEKMDGTEELLVKLNREDLLRKQRTFDNGSIPHQIHLGELHAILRRQEDFYPFLKDNREKIEKILTFRIPYYVGPLARGNSRFAWMTRKSEETITPWNFEEVVDKGASAQSFIERMTNFDKNLPNEKVLPKHSLLYEYFTVYNELTKVKYVTEGMRKPAFLSGEQKKAIVDLLFKTNRKVTVKQLKEDYFKKIECFDSVEISGVEDRFNASLGTYHDLLKIIKDKDFLDNEENEDILEDIVLTLTLFEDREMIEERLKTYAHLFDDKVMKQLKRRRYTGWGRLSRKLINGIRDKQSGKTILDFLKSDGFANRNFMQLIHDDSLTFKEDIQKAQVSGQGDSLHEHIANLAGSPAIKKGILQTVKVVDELVKVMGRHKPENIVIEMARENQTTQKGQKNSRERMKRIEEGIKELGSQILKEHPVENTQLQNEKLYLYYLQNGRDMYVDQELDINRLSDYDVDHIVPQSFLKDDSIDNKVLTRSDKARGKSDNVPSEEVVKKMKNYWRQLLNAKLITQRKFDNLTKAERGGLSELDKAGFIKRQLVETRQITKHVAQILDSRMNTKYDENDKLIREVKVITLKSKLVSDFRKDFQFYKVREINNYHHAHDAYLNAVVGTALIKKYPKLESEFVYGDYKVYDVRKMIAKSEQEIGKATAKYFFYSNIMNFFKTEITLANGEIRKRPLIETNGETGEIVWDKGRDFATVRKVLSMPQVNIVKKTEVQTGGFSKESILPKRNSDKLIARKKDWDPKKYGGFDSPTVAYSVLVVAKVEKGKSKKLKSVKELLGITIMERSSFEKNPIDFLEAKGYKEVKKDLIIKLPKYSLFELENGRKRMLASAGELQKGNELALPSKYVNFLYLASHYEKLKGSPEDNEQKQLFVEQHKHYLDEIIEQISEFSKRVILADANLDKVLSAYNKHRDKPIREQAENIIHLFTLTNLGAPAAFKYFDTTIDRKRYTSTKEVLDATLIHQSITGLYETRIDLSQLGGDGGGGGGSSPAPGGTLQLDDEYRLYSPLVKPDQNIQFWLEQFPQAWAETAGMGLAKQVPPQVIQLKASATPVSVRQYPLSKEAQEGIRPHVQRLIQQGILVPVQSPWNTPLLPVRKPGTNDYRPVQDLREVNKRVQDIHPTVPNPYNLLCALPPQRSWYTVLDLKDAFFCLRLHPTSQPLFAFEWRDPGTGRTGQLTWTRLPQGFKNSPTIFNEALHRDLANFRIQHPQVTLLQYVDDLLLAGATKQDCLEGTKALLLELSDLGYRASAKKAQICRREVTYLGYSLRDGQRWLTEARKKTVVQIPAPTTAKQVREFLGTAGFCRLWIPGFATLAAPLYPLTKPKGEFSWAPEHQKAFDAIKKALLSAPALALPDVTKPFTLYVDERKGVARGVLTQTLGPWRRPVAYLSKKLDPVASGWPVCLKAIAAVAILVKDADKLTLGQNITVIAPHALENIVRQPPDRWMTNARMTHYQSLLLTERVTFAPPAALNPATLLPEETDEPVTHDCHQLLIEETGVRKDLTDIPLTGEVLTWFTDGSSYVVEGKRMAGAAVVDGTRTIWASSLPEGTSAQKAELMALTQALRLAEGKSINIYTDSRYAFATAHVHGAIYKQRGWLTSAGREIKNKEEILSLLEALHLPKRLAIIHCPGHQKAKDPISRGNQMADRVAKQAAQGVNLLAGKRTADGSEFEKRTADGSEFESPKKKAKVE

SEQ ID NO: 308 - protein, 2084 aa, synthetic construct; identical to SEQ ID NO: 151

SEQ ID NO: 309 - protein, 2092 aa, synthetic construct; identical to SEQ ID NO: 157

SEQ ID NO: 310 - protein, 2090 aa, synthetic construct
MPAAKRVKLDGGDKKYSIGLDIGTNSVGWAVITDEYKVPSKKFKVLGNTDRHSIKKNLIGALLFDSGETAEATRLKRTARRRYTRRKNRICYLQEIFSNEMAKVDDSFFHRLEESFLVEEDKKHERHPIFGNIVDEVAYHEKYPTIYHLRKKLVDSTDKADLRLIYLALAHMIKFRGHFLIEGDLNPDNSDVDKLFIQLVQTYNQLFEENPINASGVDAKAILSARLSKSRRLENLIAQLPGEKKNGLFGNLIALSLGLTPNFKSNFDLAEDAKLQLSKDTYDDDLDNLLAQIGDQYADLFLAAKNLSDAILLSDILRVNTEITKAPLSASMIKRYDEHHQDLTLLKALVRQQLPEKYKEIFFDQSKNGYAGYIDGGASQEEFYKFIKPILEKMDGTEELLVKLNREDLLRKQRTFDNGSIPHQIHLGELHAILRRQEDFYPFLKDNREKIEKILTFRIPYYVGPLARGNSRFAWMTRKSEETITPWNFEEVVDKGASAQSFIERMTNFDKNLPNEKVLPKHSLLYEYFTVYNELTKVKYVTEGMRKPAFLSGEQKKAIVDLLFKTNRKVTVKQLKEDYFKKIECFDSVEISGVEDRFNASLGTYHDLLKIIKDKDFLDNEENEDILEDIVLTLTLFEDREMIEERLKTYAHLFDDKVMKQLKRRRYTGWGRLSRKLINGIRDKQSGKTILDFLKSDGFANRNFMQLIHDDSLTFKEDIQKAQVSGQGDSLHEHIANLAGSPAIKKGILQTVKVVDELVKVMGRHKPENIVIEMARENQTTQKGQKNSRERMKRIEEGIKELGSQILKEHPVENTQLQNEKLYLYYLQNGRDMYVDQELDINRLSDYDVDHIVPQSFLKDDSIDNKVLTRSDKARGKSDNVPSEEVVKKMKNYWRQLLNAKLITQRKFDNLTKAERGGLSELDKAGFIKRQLVETRQITKHVAQILDSRMNTKYDENDKLIREVKVITLKSKLVSDFRKDFQFYKVREINNYHHAHDAYLNAVVGTALIKKYPKLESEFVYGDYKVYDVRKMIAKSEQEIGKATAKYFFYSNIMNFFKTEITLANGEIRKRPLIETNGETGEIVWDKGRDFATVRKVLSMPQVNIVKKTEVQTGGFSKESILPKRNSDKLIARKKDWDPKKYGGFDSPTVAYSVLVVAKVEKGKSKKLKSVKELLGITIMERSSFEKNPIDFLEAKGYKEVKKDLIIKLPKYSLFELENGRKRMLASAGELQKGNELALPSKYVNFLYLASHYEKLKGSPEDNEQKQLFVEQHKHYLDEIIEQISEFSKRVILADANLDKVLSAYNKHRDKPIREQAENIIHLFTLTNLGAPAAFKYFDTTIDRKRYTSTKEVLDATLIHQSITGLYETRIDLSQLGGDGGGSSPAPEAAAKGGTLQLDDEYRLYSPLVKPDQNIQFWLEQFPQAWAETAGMGLAKQVPPQVIQLKASATPVSVRQYPLSKEAQEGIRPHVQRLIQQGILVPVQSPWNTPLLPVRKPGTNDYRPVQDLREVNKRVQDIHPTVPNPYNLLCALPPQRSWYTVLDLKDAFFCLRLHPTSQPLFAFEWRDPGTGRTGQLTWTRLPQGFKNSPTIFNEALHRDLANFRIQHPQVTLLQYVDDLLLAGATKQDCLEGTKALLLELSDLGYRASAKKAQICRREVTYLGYSLRDGQRWLTEARKKTVVQIPAPTTAKQVREFLGTAGFCRLWIPGFATLAAPLYPLTKPKGEFSWAPEHQKAFDAIKKALLSAPALALPDVTKPFTLYVDERKGVARGVLTQTLGPWRRPVAYLSKKLDPVASGWPVCLKAIAAVAILVKDADKLTLGQNITVIAPHALENIVRQPPDRWMTNARMTHYQSLLLTERVTFAPPAALNPATLLPEETDEPVTHDCHQLLIEETGVRKDLTDIPLTGEVLTWFTDGSSYVVEGKRMAGAAVVDGTRTIWASSLPEGTSAQKAELMALTQALRLAEGKSINIYTDSRYAFATAHVHGAIYKQRGWLTSAGREIKNKEEILSLLEALHLPKRLAIIHCPGHQKAKDPISRGNQMADRVAKQAAQGVNLLAGKRTADGSEFEKRTADGSEFESPKKKAKVE

SEQ ID NO: 311 - protein, 2090 aa, synthetic construct
MPAAKRVKLDGGDKKYSIGLDIGTNSVGWAVITDEYKVPSKKFKVLGNTDRHSIKKNLIGALLFDSGETAEATRLKRTARRRYTRRKNRICYLQEIFSNEMAKVDDSFFHRLEESFLVEEDKKHERHPIFGNIVDEVAYHEKYPTIYHLRKKLVDSTDKADLRLIYLALAHMIKFRGHFLIEGDLNPDNSDVDKLFIQLVQTYNQLFEENPINASGVDAKAILSARLSKSRRLENLIAQLPGEKKNGLFGNLIALSLGLTPNFKSNFDLAEDAKLQLSKDTYDDDLDNLLAQIGDQYADLFLAAKNLSDAILLSDILRVNTEITKAPLSASMIKRYDEHHQDLTLLKALVRQQLPEKYKEIFFDQSKNGYAGYIDGGASQEEFYKFIKPILEKMDGTEELLVKLNREDLLRKQRTFDNGSIPHQIHLGELHAILRRQEDFYPFLKDNREKIEKILTFRIPYYVGPLARGNSRFAWMTRKSEETITPWNFEEVVDKGASAQSFIERMTNFDKNLPNEKVLPKHSLLYEYFTVYNELTKVKYVTEGMRKPAFLSGEQKKAIVDLLFKTNRKVTVKQLKEDYFKKIECFDSVEISGVEDRFNASLGTYHDLLKIIKDKDFLDNEENEDILEDIVLTLTLFEDREMIEERLKTYAHLFDDKVMKQLKRRRYTGWGRLSRKLINGIRDKQSGKTILDFLKSDGFANRNFMQLIHDDSLTFKEDIQKAQVSGQGDSLHEHIANLAGSPAIKKGILQTVKVVDELVKVMGRHKPENIVIEMARENQTTQKGQKNSRERMKRIEEGIKELGSQILKEHPVENTQLQNEKLYLYYLQNGRDMYVDQELDINRLSDYDVDHIVPQSFLKDDSIDNKVLTRSDKARGKSDNVPSEEVVKKMKNYWRQLLNAKLITQRKFDNLTKAERGGLSELDKAGFIKRQLVETRQITKHVAQILDSRMNTKYDENDKLIREVKVITLKSKLVSDFRKDFQFYKVREINNYHHAHDAYLNAVVGTALIKKYPKLESEFVYGDYKVYDVRKMIAKSEQEIGKATAKYFFYSNIMNFFKTEITLANGEIRKRPLIETNGETGEIVWDKGRDFATVRKVLSMPQVNIVKKTEVQTGGFSKESILPKRNSDKLIARKKDWDPKKYGGFDSPTVAYSVLVVAKVEKGKSKKLKSVKELLGITIMERSSFEKNPIDFLEAKGYKEVKKDLIIKLPKYSLFELENGRKRMLASAGELQKGNELALPSKYVNFLYLASHYEKLKGSPEDNEQKQLFVEQHKHYLDEIIEQISEFSKRVILADANLDKVLSAYNKHRDKPIREQAENIIHLFTLTNLGAPAAFKYFDTTIDRKRYTSTKEVLDATLIHQSITGLYETRIDLSQLGGDGGGGGGGSEAAAKGGTLQLDDEYRLYSPLVKPDQNIQFWLEQFPQAWAETAGMGLAKQVPPQVIQLKASATPVSVRQYPLSKEAQEGIRPHVQRLIQQGILVPVQSPWNTPLLPVRKPGTNDYRPVQDLREVNKRVQDIHPTVPNPYNLLCALPPQRSWYTVLDLKDAFFCLRLHPTSQPLFAFEWRDPGTGRTGQLTWTRLPQGFKNSPTIFNEALHRDLANFRIQHPQVTLLQYVDDLLLAGATKQDCLEGTKALLLELSDLGYRASAKKAQICRREVTYLGYSLRDGQRWLTEARKKTVVQIPAPTTAKQVREFLGTAGFCRLWIPGFATLAAPLYPLTKPKGEFSWAPEHQKAFDAIKKALLSAPALALPDVTKPFTLYVDERKGVARGVLTQTLGPWRRPVAYLSKKLDPVASGWPVCLKAIAAVAILVKDADKLTLGQNITVIAPHALENIVRQPPDRWMTNARMTHYQSLLLTERVTFAPPAALNPATLLPEETDEPVTHDCHQLLIEETGVRKDLTDIPLTGEVLTWFTDGSSYVVEGKRMAGAAVVDGTRTIWASSLPEGTSAQKAELMALTQALRLAEGKSINIYTDSRYAFATAHVHGAIYKQRGWLTSAGREIKNKEEILSLLEALHLPKRLAIIHCPGHQKAKDPISRGNQMADRVAKQAAQGVNLLAGKRTADGSEFEKRTADGSEFESPKKKAKVE

SEQ ID NO: 312 - protein, 2090 aa, synthetic construct; identical to SEQ ID NO: 116

SEQ ID NO: 313 - protein, 2109 aa, synthetic construct; identical to SEQ ID NO: 117

SEQ ID NO: 314 - protein, 2088 aa, synthetic construct
MPAAKRVKLDGGDKKYSIGLDIGTNSVGWAVITDEYKVPSKKFKVLGNTDRHSIKKNLIGALLFDSGETAEATRLKRTARRRYTRRKNRICYLQEIFSNEMAKVDDSFFHRLEESFLVEEDKKHERHPIFGNIVDEVAYHEKYPTIYHLRKKLVDSTDKADLRLIYLALAHMIKFRGHFLIEGDLNPDNSDVDKLFIQLVQTYNQLFEENPINASGVDAKAILSARLSKSRRLENLIAQLPGEKKNGLFGNLIALSLGLTPNFKSNFDLAEDAKLQLSKDTYDDDLDNLLAQIGDQYADLFLAAKNLSDAILLSDILRVNTEITKAPLSASMIKRYDEHHQDLTLLKALVRQQLPEKYKEIFFDQSKNGYAGYIDGGASQEEFYKFIKPILEKMDGTEELLVKLNREDLLRKQRTFDNGSIPHQIHLGELHAILRRQEDFYPFLKDNREKIEKILTFRIPYYVGPLARGNSRFAWMTRKSEETITPWNFEEVVDKGASAQSFIERMTNFDKNLPNEKVLPKHSLLYEYFTVYNELTKVKYVTEGMRKPAFLSGEQKKAIVDLLFKTNRKVTVKQLKEDYFKKIECFDSVEISGVEDRFNASLGTYHDLLKIIKDKDFLDNEENEDILEDIVLTLTLFEDREMIEERLKTYAHLFDDKVMKQLKRRRYTGWGRLSRKLINGIRDKQSGKTILDFLKSDGFANRNFMQLIHDDSLTFKEDIQKAQVSGQGDSLHEHIANLAGSPAIKKGILQTVKVVDELVKVMGRHKPENIVIEMARENQTTQKGQKNSRERMKRIEEGIKELGSQILKEHPVENTQLQNEKLYLYYLQNGRDMYVDQELDINRLSDYDVDHIVPQSFLKDDSIDNKVLTRSDKARGKSDNVPSEEVVKKMKNYWRQLLNAKLITQRKFDNLTKAERGGLSELDKAGFIKRQLVETRQITKHVAQILDSRMNTKYDENDKLIREVKVITLKSKLVSDFRKDFQFYKVREINNYHHAHDAYLNAVVGTALIKKYPKLESEFVYGDYKVYDVRKMIAKSEQEIGKATAKYFFYSNIMNFFKTEITLANGEIRKRPLIETNGETGEIVWDKGRDFATVRKVLSMPQVNIVKKTEVQTGGFSKESILPKRNSDKLIARKKDWDPKKYGGFDSPTVAYSVLVVAKVEKGKSKKLKSVKELLGITIMERSSFEKNPIDFLEAKGYKEVKKDLIIKLPKYSLFELENGRKRMLASAGELQKGNELALPSKYVNFLYLASHYEKLKGSPEDNEQKQLFVEQHKHYLDEIIEQISEFSKRVILADANLDKVLSAYNKHRDKPIREQAENIIHLFTLTNLGAPAAFKYFDTTIDRKRYTSTKEVLDATLIHQSITGLYETRIDLSQLGGDGGGGGPAPGSSGGTLQLDDEYRLYSPLVKPDQNIQFWLEQFPQAWAETAGMGLAKQVPPQVIQLKASATPVSVRQYPLSKEAQEGIRPHVQRLIQQGILVPVQSPWNTPLLPVRKPGTNDYRPVQDLREVNKRVQDIHPTVPNPYNLLCALPPQRSWYTVLDLKDAFFCLRLHPTSQPLFAFEWRDPGTGRTGQLTWTRLPQGFKNSPTIFNEALHRDLANFRIQHPQVTLLQYVDDLLLAGATKQDCLEGTKALLLELSDLGYRASAKKAQICRREVTYLGYSLRDGQRWLTEARKKTVVQIPAPTTAKQVREFLGTAGFCRLWIPGFATLAAPLYPLTKPKGEFSWAPEHQKAFDAIKKALLSAPALALPDVTKPFTLYVDERKGVARGVLTQTLGPWRRPVAYLSKKLDPVASGWPVCLKAIAAVAILVKDADKLTLGQNITVIAPHALENIVRQPPDRWMTNARMTHYQSLLLTERVTFAPPAALNPATLLPEETDEPVTHDCHQLLIEETGVRKDLTDIPLTGEVLTWFTDGSSYVVEGKRMAGAAVVDGTRTIWASSLPEGTSAQKAELMALTQALRLAEGKSINIYTDSRYAFATAHVHGAIYKQRGWLTSAGREIKNKEEILSLLEALHLPKRLAIIHCPGHQKAKDPISRGNQMADRVAKQAAQGVNLLAGKRTADGSEFEKRTADGSEFESPKKKAKVE

SEQ ID NO: 315 - protein, 2082 aa, synthetic construct; identical to SEQ ID NO: 120

SEQ ID NO: 316 - protein, 2097 aa, synthetic construct; identical to SEQ ID NO: 142

SEQ ID NO: 317 - protein, 2090 aa, synthetic construct
MPAAKRVKLDGGDKKYSIGLDIGTNSVGWAVITDEYKVPSKKFKVLGNTDRHSIKKNLIGALLFDSGETAEATRLKRTARRRYTRRKNRICYLQEIFSNEMAKVDDSFFHRLEESFLVEEDKKHERHPIFGNIVDEVAYHEKYPTIYHLRKKLVDSTDKADLRLIYLALAHMIKFRGHFLIEGDLNPDNSDVDKLFIQLVQTYNQLFEENPINASGVDAKAILSARLSKSRRLENLIAQLPGEKKNGLFGNLIALSLGLTPNFKSNFDLAEDAKLQLSKDTYDDDLDNLLAQIGDQYADLFLAAKNLSDAILLSDILRVNTEITKAPLSASMIKRYDEHHQDLTLLKALVRQQLPEKYKEIFFDQSKNGYAGYIDGGASQEEFYKFIKPILEKMDGTEELLVKLNREDLLRKQRTFDNGSIPHQIHLGELHAILRRQEDFYPFLKDNREKIEKILTFRIPYYVGPLARGNSRFAWMTRKSEETITPWNFEEVVDKGASAQSFIERMTNFDKNLPNEKVLPKHSLLYEYFTVYNELTKVKYVTEGMRKPAFLSGEQKKAIVDLLFKTNRKVTVKQLKEDYFKKIECFDSVEISGVEDRFNASLGTYHDLLKIIKDKDFLDNEENEDILEDIVLTLTLFEDREMIEERLKTYAHLFDDKVMKQLKRRRYTGWGRLSRKLINGIRDKQSGKTILDFLKSDGFANRNFMQLIHDDSLTFKEDIQKAQVSGQGDSLHEHIANLAGSPAIKKGILQTVKVVDELVKVMGRHKPENIVIEMARENQTTQKGQKNSRERMKRIEEGIKELGSQILKEHPVENTQLQNEKLYLYYLQNGRDMYVDQELDINRLSDYDVDHIVPQSFLKDDSIDNKVLTRSDKARGKSDNVPSEEVVKKMKNYWRQLLNAKLITQRKFDNLTKAERGGLSELDKAGFIKRQLVETRQITKHVAQILDSRMNTKYDENDKLIREVKVITLKSKLVSDFRKDFQFYKVREINNYHHAHDAYLNAVVGTALIKKYPKLESEFVYGDYKVYDVRKMIAKSEQEIGKATAKYFFYSNIMNFFKTEITLANGEIRKRPLIETNGETGEIVWDKGRDFATVRKVLSMPQVNIVKKTEVQTGGFSKESILPKRNSDKLIARKKDWDPKKYGGFDSPTVAYSVLVVAKVEKGKSKKLKSVKELLGITIMERSSFEKNPIDFLEAKGYKEVKKDLIIKLPKYSLFELENGRKRMLASAGELQKGNELALPSKYVNFLYLASHYEKLKGSPEDNEQKQLFVEQHKHYLDEIIEQISEFSKRVILADANLDKVLSAYNKHRDKPIREQAENIIHLFTLTNLGAPAAFKYFDTTIDRKRYTSTKEVLDATLIHQSITGLYETRIDLSQLGGDGGGSSGGGEAAAKGGTLQLDDEYRLYSPLVKPDQNIQFWLEQFPQAWAETAGMGLAKQVPPQVIQLKASATPVSVRQYPLSKEAQEGIRPHVQRLIQQGILVPVQSPWNTPLLPVRKPGTNDYRPVQDLREVNKRVQDIHPTVPNPYNLLCALPPQRSWYTVLDLKDAFFCLRLHPTSQPLFAFEWRDPGTGRTGQLTWTRLPQGFKNSPTIFNEALHRDLANFRIQHPQVTLLQYVDDLLLAGATKQDCLEGTKALLLELSDLGYRASAKKAQICRREVTYLGYSLRDGQRWLTEARKKTVVQIPAPTTAKQVREFLGTAGFCRLWIPGFATLAAPLYPLTKPKGEFSWAPEHQKAFDAIKKALLSAPALALPDVTKPFTLYVDERKGVARGVLTQTLGPWRRPVAYLSKKLDPVASGWPVCLKAIAAVAILVKDADKLTLGQNITVIAPHALENIVRQPPDRWMTNARMTHYQSLLLTERVTFAPPAALNPATLLPEETDEPVTHDCHQLLIEETGVRKDLTDIPLTGEVLTWFTDGSSYVVEGKRMAGAAVVDGTRTIWASSLPEGTSAQKAELMALTQALRLAEGKSINIYTDSRYAFATAHVHGAIYKQRGWLTSAGREIKNKEEILSLLEALHLPKRLAIIHCPGHQKAKDPISRGNQMADRVAKQAAQGVNLLAGKRTADGSEFEKRTADGSEFESPKKKAKVE

SEQ ID NO: 318 - protein, 2090 aa, synthetic construct; identical to SEQ ID NO: 121

SEQ ID NO: 319 - protein, 2090 aa, synthetic construct; identical to SEQ ID NO: 124

SEQ ID NO: 320 - protein, 2088 aa, synthetic construct
MPAAKRVKLDGGDKKYSIGLDIGTNSVGWAVITDEYKVPSKKFKVLGNTDRHSIKKNLIGALLFDSGETAEATRLKRTARRRYTRRKNRICYLQEIFSNEMAKVDDSFFHRLEESFLVEEDKKHERHPIFGNIVDEVAYHEKYPTIYHLRKKLVDSTDKADLRLIYLALAHMIKFRGHFLIEGDLNPDNSDVDKLFIQLVQTYNQLFEENPINASGVDAKAILSARLSKSRRLENLIAQLPGEKKNGLFGNLIALSLGLTPNFKSNFDLAEDAKLQLSKDTYDDDLDNLLAQIGDQYADLFLAAKNLSDAILLSDILRVNTEITKAPLSASMIKRYDEHHQDLTLLKALVRQQLPEKYKEIFFDQSKNGYAGYIDGGASQEEFYKFIKPILEKMDGTEELLVKLNREDLLRKQRTFDNGSIPHQIHLGELHAILRRQEDFYPFLKDNREKIEKILTFRIPYYVGPLARGNSRFAWMTRKSEETITPWNFEEVVDKGASAQSFIERMTNFDKNLPNEKVLPKHSLLYEYFTVYNELTKVKYVTEGMRKPAFLSGEQKKAIVDLLFKTNRKVTVKQLKEDYFKKIECFDSVEISGVEDRFNASLGTYHDLLKIIKDKDFLDNEENEDILEDIVLTLTLFEDREMIEERLKTYAHLFDDKVMKQLKRRRYTGWGRLSRKLINGIRDKQSGKTILDFLKSDGFANRNFMQLIHDDSLTFKEDIQKAQVSGQGDSLHEHIANLAGSPAIKKGILQTVKVVDELVKVMGRHKPENIVIEMARENQTTQKGQKNSRERMKRIEEGIKELGSQILKEHPVENTQLQNEKLYLYYLQNGRDMYVDQELDINRLSDYDVDHIVPQSFLKDDSIDNKVLTRSDKARGKSDNVPSEEVVKKMKNYWRQLLNAKLITQRKFDNLTKAERGGLSELDKAGFIKRQLVETRQITKHVAQILDSRMNTKYDENDKLIREVKVITLKSKLVSDFRKDFQFYKVREINNYHHAHDAYLNAVVGTALIKKYPKLESEFVYGDYKVYDVRKMIAKSEQEIGKATAKYFFYSNIMNFFKTEITLANGEIRKRPLIETNGETGEIVWDKGRDFATVRKVLSMPQVNIVKKTEVQTGGFSKESILPKRNSDKLIARKKDWDPKKYGGFDSPTVAYSVLVVAKVEKGKSKKLKSVKELLGITIMERSSFEKNPIDFLEAKGYKEVKKDLIIKLPKYSLFELENGRKRMLASAGELQKGNELALPSKYVNFLYLASHYEKLKGSPEDNEQKQLFVEQHKHYLDEIIEQISEFSKRVILADANLDKVLSAYNKHRDKPIREQAENIIHLFTLTNLGAPAAFKYFDTTIDRKRYTSTKEVLDATLIHQSITGLYETRIDLSQLGGDGGGGGGGSGSSGGTLQLDDEYRLYSPLVKPDQNIQFWLEQFPQAWAETAGMGLAKQVPPQVIQLKASATPVSVRQYPLSKEAQEGIRPHVQRLIQQGILVPVQSPWNTPLLPVRKPGTNDYRPVQDLREVNKRVQDIHPTVPNPYNLLCALPPQRSWYTVLDLKDAFFCLRLHPTSQPLFAFEWRDPGTGRTGQLTWTRLPQGFKNSPTIFNEALHRDLANFRIQHPQVTLLQYVDDLLLAGATKQDCLEGTKALLLELSDLGYRASAKKAQICRREVTYLGYSLRDGQRWLTEARKKTVVQIPAPTTAKQVREFLGTAGFCRLWIPGFATLAAPLYPLTKPKGEFSWAPEHQKAFDAIKKALLSAPALALPDVTKPFTLYVDERKGVARGVLTQTLGPWRRPVAYLSKKLDPVASGWPVCLKAIAAVAILVKDADKLTLGQNITVIAPHALENIVRQPPDRWMTNARMTHYQSLLLTERVTFAPPAALNPATLLPEETDEPVTHDCHQLLIEETGVRKDLTDIPLTGEVLTWFTDGSSYVVEGKRMAGAAVVDGTRTIWASSLPEGTSAQKAELMALTQALRLAEGKSINIYTDSRYAFATAHVHGAIYKQRGWLTSAGREIKNKEEILSLLEALHLPKRLAIIHCPGHQKAKDPISRGNQMADRVAKQAAQGVNLLAGKRTADGSEFEKRTADGSEFESPKKKAKVE

SEQ ID NO: 321 - protein, 2090 aa, synthetic construct; identical to SEQ ID NO: 138

SEQ ID NO: 322 - protein, 2090 aa, synthetic construct
MPAAKRVKLDGGDKKYSIGLDIGTNSVGWAVITDEYKVPSKKFKVLGNTDRHSIKKNLIGALLFDSGETAEATRLKRTARRRYTRRKNRICYLQEIFSNEMAKVDDSFFHRLEESFLVEEDKKHERHPIFGNIVDEVAYHEKYPTIYHLRKKLVDSTDKADLRLIYLALAHMIKFRGHFLIEGDLNPDNSDVDKLFIQLVQTYNQLFEENPINASGVDAKAILSARLSKSRRLENLIAQLPGEKKNGLFGNLIALSLGLTPNFKSNFDLAEDAKLQLSKDTYDDDLDNLLAQIGDQYADLFLAAKNLSDAILLSDILRVNTEITKAPLSASMIKRYDEHHQDLTLLKALVRQQLPEKYKEIFFDQSKNGYAGYIDGGASQEEFYKFIKPILEKMDGTEELLVKLNREDLLRKQRTFDNGSIPHQIHLGELHAILRRQEDFYPFLKDNREKIEKILTFRIPYYVGPLARGNSRFAWMTRKSEETITPWNFEEVVDKGASAQSFIERMTNFDKNLPNEKVLPKHSLLYEYFTVYNELTKVKYVTEGMRKPAFLSGEQKKAIVDLLFKTNRKVTVKQLKEDYFKKIECFDSVEISGVEDRFNASLGTYHDLLKIIKDKDFLDNEENEDILEDIVLTLTLFEDREMIEERLKTYAHLFDDKVMKQLKRRRYTGWGRLSRKLINGIRDKQSGKTILDFLKSDGFANRNFMQLIHDDSLTFKEDIQKAQVSGQGDSLHEHIANLAGSPAIKKGILQTVKVVDELVKVMGRHKPENIVIEMARENQTTQKGQKNSRERMKRIEEGIKELGSQILKEHPVENTQLQNEKLYLYYLQNGRDMYVDQELDINRLSDYDVDHIVPQSFLKDDSIDNKVLTRSDKARGKSDNVPSEEVVKKMKNYWRQLLNAKLITQRKFDNLTKAERGGLSELDKAGFIKRQLVETRQITKHVAQILDSRMNTKYDENDKLIREVKVITLKSKLVSDFRKDFQFYKVREINNYHHAHDAYLNAVVGTALIKKYPKLESEFVYGDYKVYDVRKMIAKSEQEIGKATAKYFFYSNIMNFFKTEITLANGEIRKRPLIETNGETGEIVWDKGRDFATVRKVLSMPQVNIVKKTEVQTGGFSKESILPKRNSDKLIARKKDWDPKKYGGFDSPTVAYSVLVVAKVEKGKSKKLKSVKELLGITIMERSSFEKNPIDFLEAKGYKEVKKDLIIKLPKYSLFELENGRKRMLASAGELQKGNELALPSKYVNFLYLASHYEKLKGSPEDNEQKQLFVEQHKHYLDEIIEQISEFSKRVILADANLDKVLSAYNKHRDKPIREQAENIIHLFTLTNLGAPAAFKYFDTTIDRKRYTSTKEVLDATLIHQSITGLYETRIDLSQLGGDGGGGGEAAAKGGSGGTLQLDDEYRLYSPLVKPDQNIQFWLEQFPQAWAETAGMGLAKQVPPQVIQLKASATPVSVRQYPLSKEAQEGIRPHVQRLIQQGILVPVQSPWNTPLLPVRKPGTNDYRPVQDLREVNKRVQDIHPTVPNPYNLLCALPPQRSWYTVLDLKDAFFCLRLHPTSQPLFAFEWRDPGTGRTGQLTWTRLPQGFKNSPTIFNEALHRDLANFRIQHPQVTLLQYVDDLLLAGATKQDCLEGTKALLLELSDLGYRASAKKAQICRREVTYLGYSLRDGQRWLTEARKKTVVQIPAPTTAKQVREFLGTAGFCRLWIPGFATLAAPLYPLTKPKGEFSWAPEHQKAFDAIKKALLSAPALALPDVTKPFTLYVDERKGVARGVLTQTLGPWRRPVAYLSKKLDPVASGWPVCLKAIAAVAILVKDADKLTLGQNITVIAPHALENIVRQPPDRWMTNARMTHYQSLLLTERVTFAPPAALNPATLLPEETDEPVTHDCHQLLIEETGVRKDLTDIPLTGEVLTWFTDGSSYVVEGKRMAGAAVVDGTRTIWASSLPEGTSAQKAELMALTQALRLAEGKSINIYTDSRYAFATAHVHGAIYKQRGWLTSAGREIKNKEEILSLLEALHLPKRLAIIHCPGHQKAKDPISRGNQMADRVAKQAAQGVNLLAGKRTADGSEFEKRTADGSEFESPKKKAKVE

SEQ ID NO: 323 - protein, 2090 aa, synthetic construct
MPAAKRVKLDGGDKKYSIGLDIGTNSVGWAVITDEYKVPSKKFKVLGNTDRHSIKKNLIGALLFDSGETAEATRLKRTARRRYTRRKNRICYLQEIFSNEMAKVDDSFFHRLEESFLVEEDKKHERHPIFGNIVDEVAYHEKYPTIYHLRKKLVDSTDKADLRLIYLALAHMIKFRGHFLIEGDLNPDNSDVDKLFIQLVQTYNQLFEENPINASGVDAKAILSARLSKSRRLENLIAQLPGEKKNGLFGNLIALSLGLTPNFKSNFDLAEDAKLQLSKDTYDDDLDNLLAQIGDQYADLFLAAKNLSDAILLSDILRVNTEITKAPLSASMIKRYDEHHQDLTLLKALVRQQLPEKYKEIFFDQSKNGYAGYIDGGASQEEFYKFIKPILEKMDGTEELLVKLNREDLLRKQRTFDNGSIPHQIHLGELHAILRRQEDFYPFLKDNREKIEKILTFRIPYYVGPLARGNSRFAWMTRKSEETITPWNFEEVVDKGASAQSFIERMTNFDKNLPNEKVLPKHSLLYEYFTVYNELTKVKYVTEGMRKPAFLSGEQKKAIVDLLFKTNRKVTVKQLKEDYFKKIECFDSVEISGVEDRFNASLGTYHDLLKIIKDKDFLDNEENEDILEDIVLTLTLFEDREMIEERLKTYAHLFDDKVMKQLKRRRYTGWGRLSRKLINGIRDKQSGKTILDFLKSDGFANRNFMQLIHDDSLTFKEDIQKAQVSGQGDSLHEHIANLAGSPAIKKGILQTVKVVDELVKVMGRHKPENIVIEMARENQTTQKGQKNSRERMKRIEEGIKELGSQILKEHPVENTQLQNEKLYLYYLQNGRDMYVDQELDINRLSDYDVDHIVPQSFLKDDSIDNKVLTRSDKARGKSDNVPSEEVVKKMKNYWRQLLNAKLITQRKFDNLTKAERGGLSELDKAGFIKRQLVETRQITKHVAQILDSRMNTKYDENDKLIREVKVITLKSKLVSDFRKDFQFYKVREINNYHHAHDAYLNAVVGTALIKKYPKLESEFVYGDYKVYDVRKMIAKSEQEIGKATAKYFFYSNIMNFFKTEITLANGEIRKRPLIETNGETGEIVWDKGRDFATVRKVLSMPQVNIVKKTEVQTGGFSKESILPKRNSDKLIARKKDWDPKKYGGFDSPTVAYSVLVVAKVEKGKSKKLKSVKELLGITIMERSSFEKNPIDFLEAKGYKEVKKDLIIKLPKYSLFELENGRKRMLASAGELQKGNELALPSKYVNFLYLASHYEKLKGSPEDNEQKQLFVEQHKHYLDEIIEQISEFSKRVILADANLDKVLSAYNKHRDKPIREQAENIIHLFTLTNLGAPAAFKYFDTTIDRKRYTSTKEVLDATLIHQSITGLYETRIDLSQLGGDGGGGSEAAAKGSSGGTLQLDDEYRLYSPLVKPDQNIQFWLEQFPQAWAETAGMGLAKQVPPQVIQLKASATPVSVRQYPLSKEAQEGIRPHVQRLIQQGILVPVQSPWNTPLLPVRKPGTNDYRPVQDLREVNKRVQDIHPTVPNPYNLLCALPPQRSWYTVLDLKDAFFCLRLHPTSQPLFAFEWRDPGTGRTGQLTWTRLPQGFKNSPTIFNEALHRDLANFRIQHPQVTLLQYVDDLLLAGATKQDCLEGTKALLLELSDLGYRASAKKAQICRREVTYLGYSLRDGQRWLTEARKKTVVQIPAPTTAKQVREFLGTAGFCRLWIPGFATLAAPLYPLTKPKGEFSWAPEHQKAFDAIKKALLSAPALALPDVTKPFTLYVDERKGVARGVLTQTLGPWRRPVAYLSKKLDPVASGWPVCLKAIAAVAILVKDADKLTLGQNITVIAPHALENIVRQPPDRWMTNARMTHYQSLLLTERVTFAPPAALNPATLLPEETDEPVTHDCHQLLIEETGVRKDLTDIPLTGEVLTWFTDGSSYVVEGKRMAGAAVVDGTRTIWASSLPEGTSAQKAELMALTQALRLAEGKSINIYTDSRYAFATAHVHGAIYKQRGWLTSAGREIKNKEEILSLLEALHLPKRLAIIHCPGHQKAKDPISRGNQMADRVAKQAAQGVNLLAGKRTADGSEFEKRTADGSEFESPKKKAKVE

SEQ ID NO: 324 - protein, 2090 aa, synthetic construct
MPAAKRVKLDGGDKKYSIGLDIGTNSVGWAVITDEYKVPSKKFKVLGNTDRHSIKKNLIGALLFDSGETAEATRLKRTARRRYTRRKNRICYLQEIFSNEMAKVDDSFFHRLEESFLVEEDKKHERHPIFGNIVDEVAYHEKYPTIYHLRKKLVDSTDKADLRLIYLALAHMIKFRGHFLIEGDLNPDNSDVDKLFIQLVQTYNQLFEENPINASGVDAKAILSARLSKSRRLENLIAQLPGEKKNGLFGNLIALSLGLTPNFKSNFDLAEDAKLQLSKDTYDDDLDNLLAQIGDQYADLFLAAKNLSDAILLSDILRVNTEITKAPLSASMIKRYDEHHQDLTLLKALVRQQLPEKYKEIFFDQSKNGYAGYIDGGASQEEFYKFIKPILEKMDGTEELLVKLNREDLLRKQRTFDNGSIPHQIHLGELHAILRRQEDFYPFLKDNREKIEKILTFRIPYYVGPLARGNSRFAWMTRKSEETITPWNFEEVVDKGASAQSFIERMTNFDKNLPNEKVLPKHSLLYEYFTVYNELTKVKYVTEGMRKPAFLSGEQKKAIVDLLFKTNRKVTVKQLKEDYFKKIECFDSVEISGVEDRFNASLGTYHDLLKIIKDKDFLDNEENEDILEDIVLTLTLFEDREMIEERLKTYAHLFDDKVMKQLKRRRYTGWGRLSRKLINGIRDKQSGKTILDFLKSDGFANRNFMQLIHDDSLTFKEDIQKAQVSGQGDSLHEHIANLAGSPAIKKGILQTVKVVDELVKVMGRHKPENIVIEMARENQTTQKGQKNSRERMKRIEEGIKELGSQILKEHPVENTQLQNEKLYLYYLQNGRDMYVDQELDINRLSDYDVDHIVPQSFLKDDSIDNKVLTRSDKARGKSDNVPSEEVVKKMKNYWRQLLNAKLITQRKFDNLTKAERGGLSELDKAGFIKRQLVETRQITKHVAQILDSRMNTKYDENDKLIREVKVITLKSKLVSDFRKDFQFYKVREINNYHHAHDAYLNAVVGTALIKKYPKLESEFVYGDYKVYDVRKMIAKSEQEIGKATAKYFFYSNIMNFFKTEITLANGEIRKRPLIETNGETGEIVWDKGRDFATVRKVLSMPQVNIVKKTEVQTGGFSKESILPKRNSDKLIARKKDWDPKKYGGFDSPTVAYSVLVVAKVEKGKSKKLKSVKELLGITIMERSSFEKNPIDFLEAKGYKEVKKDLIIKLPKYSLFELENGRKRMLASAGELQKGNELALPSKYVNFLYLASHYEKLKGSPEDNEQKQLFVEQHKHYLDEIIEQISEFSKRVILADANLDKVLSAYNKHRDKPIREQAENIIHLFTLTNLGAPAAFKYFDTTIDRKRYTSTKEVLDATLIHQSITGLYETRIDLSQLGGDGGGGGEAAAKPAPGGTLQLDDEYRLYSPLVKPDQNIQFWLEQFPQAWAETAGMGLAKQVPPQVIQLKASATPVSVRQYPLSKEAQEGIRPHVQRLIQQGILVPVQSPWNTPLLPVRKPGTNDYRPVQDLREVNKRVQDIHPTVPNPYNLLCALPPQRSWYTVLDLKDAFFCLRLHPTSQPLFAFEWRDPGTGRTGQLTWTRLPQGFKNSPTIFNEALHRDLANFRIQHPQVTLLQYVDDLLLAGATKQDCLEGTKALLLELSDLGYRASAKKAQICRREVTYLGYSLRDGQRWLTEARKKTVVQIPAPTTAKQVREFLGTAGFCRLWIPGFATLAAPLYPLTKPKGEFSWAPEHQKAFDAIKKALLSAPALALPDVTKPFTLYVDERKGVARGVLTQTLGPWRRPVAYLSKKLDPVASGWPVCLKAIAAVAILVKDADKLTLGQNITVIAPHALENIVRQPPDRWMTNARMTHYQSLLLTERVTFAPPAALNPATLLPEETDEPVTHDCHQLLIEETGVRKDLTDIPLTGEVLTWFTDGSSYVVEGKRMAGAAVVDGTRTIWASSLPEGTSAQKAELMALTQALRLAEGKSINIYTDSRYAFATAHVHGAIYKQRGWLTSAGREIKNKEEILSLLEALHLPKRLAIIHCPGHQKAKDPISRGNQMADRVAKQAAQGVNLLAGKRTADGSEFEKRTADGSEFESPKKKAKVE

SEQ ID NO: 325 - protein, 2087 aa, synthetic construct; identical to SEQ ID NO: 128

SEQ ID NO: 326 - protein, 2082 aa, synthetic construct
MPAAKRVKLDGGDKKYSIGLDIGTNSVGWAVITDEYKVPSKKFKVLGNTDRHSIKKNLIGALLFDSGETAEATRLKRTARRRYTRRKNRICYLQEIFSNEMAKVDDSFFHRLEESFLVEEDKKHERHPIFGNIVDEVAYHEKYPTIYHLRKKLVDSTDKADLRLIYLALAHMIKFRGHFLIEGDLNPDNSDVDKLFIQLVQTYNQLFEENPINASGVDAKAILSARLSKSRRLENLIAQLPGEKKNGLFGNLIALSLGLTPNFKSNFDLAEDAKLQLSKDTYDDDLDNLLAQIGDQYADLFLAAKNLSDAILLSDILRVNTEITKAPLSASMIKRYDEHHQDLTLLKALVRQQLPEKYKEIFFDQSKNGYAGYIDGGASQEEFYKFIKPILEKMDGTEELLVKLNREDLLRKQRTFDNGSIPHQIHLGELHAILRRQEDFYPFLKDNREKIEKILTFRIPYYVGPLARGNSRFAWMTRKSEETITPWNFEEVVDKGASAQSFIERMTNFDKNLPNEKVLPKHSLLYEYFTVYNELTKVKYVTEGMRKPAFLSGEQKKAIVDLLFKTNRKVTVKQLKEDYFKKIECFDSVEISGVEDRFNASLGTYHDLLKIIKDKDFLDNEENEDILEDIVLTLTLFEDREMIEERLKTYAHLFDDKVMKQLKRRRYTGWGRLSRKLINGIRDKQSGKTILDFLKSDGFANRNFMQLIHDDSLTFKEDIQKAQVSGQGDSLHEHIANLAGSPAIKKGILQTVKVVDELVKVMGRHKPENIVIEMARENQTTQKGQKNSRERMKRIEEGIKELGSQILKEHPVENTQLQNEKLYLYYLQNGRDMYVDQELDINRLSDYDVDHIVPQSFLKDDSIDNKVLTRSDKARGKSDNVPSEEVVKKMKNYWRQLLNAKLITQRKFDNLTKAERGGLSELDKAGFIKRQLVETRQITKHVAQILDSRMNTKYDENDKLIREVKVITLKSKLVSDFRKDFQFYKVREINNYHHAHDAYLNAVVGTALIKKYPKLESEFVYGDYKVYDVRKMIAKSEQEIGKATAKYFFYSNIMNFFKTEITLANGEIRKRPLIETNGETGEIVWDKGRDFATVRKVLSMPQVNIVKKTEVQTGGFSKESILPKRNSDKLIARKKDWDPKKYGGFDSPTVAYSVLVVAKVEKGKSKKLKSVKELLGITIMERSSFEKNPIDFLEAKGYKEVKKDLIIKLPKYSLFELENGRKRMLASAGELQKGNELALPSKYVNFLYLASHYEKLKGSPEDNEQKQLFVEQHKHYLDEIIEQISEFSKRVILADANLDKVLSAYNKHRDKPIREQAENIIHLFTLTNLGAPAAFKYFDTTIDRKRYTSTKEVLDATLIHQSITGLYETRIDLSQLGGDGGGGSGGTLQLDDEYRLYSPLVKPDQNIQFWLEQFPQAWAETAGMGLAKQVPPQVIQLKASATPVSVRQYPLSKEAQEGIRPHVQRLIQQGILVPVQSPWNTPLLPVRKPGTNDYRPVQDLREVNKRVQDIHPTVPNPYNLLCALPPQRSWYTVLDLKDAFFCLRLHPTSQPLFAFEWRDPGTGRTGQLTWTRLPQGFKNSPTIFNEALHRDLANFRIQHPQVTLLQYVDDLLLAGATKQDCLEGTKALLLELSDLGYRASAKKAQICRREVTYLGYSLRDGQRWLTEARKKTVVQIPAPTTAKQVREFLGTAGFCRLWIPGFATLAAPLYPLTKPKGEFSWAPEHQKAFDAIKKALLSAPALALPDVTKPFTLYVDERKGVARGVLTQTLGPWRRPVAYLSKKLDPVASGWPVCLKAIAAVAILVKDADKLTLGQNITVIAPHALENIVRQPPDRWMTNARMTHYQSLLLTERVTFAPPAALNPATLLPEETDEPVTHDCHQLLIEETGVRKDLTDIPLTGEVLTWFTDGSSYVVEGKRMAGAAVVDGTRTIWASSLPEGTSAQKAELMALTQALRLAEGKSINIYTDSRYAFATAHVHGAIYKQRGWLTSAGREIKNKEEILSLLEALHLPKRLAIIHCPGHQKAKDPISRGNQMADRVAKQAAQGVNLLAGKRTADGSEFEKRTADGSEFESPKKKAKVE

SEQ ID NO: 327 - protein, 2090 aa, synthetic construct; identical to SEQ ID NO: 132

SEQ ID NO: 328 - protein, 2095 aa, synthetic construct; identical to SEQ ID NO: 122

SEQ ID NO: 329 - protein, 2085 aa, synthetic construct; identical to SEQ ID NO: 143

SEQ ID NO: 330 - protein, 2090 aa, synthetic construct; identical to SEQ ID NO: 160

SEQ ID NO: 331 - protein, 2090 aa, synthetic construct
MPAAKRVKLDGGDKKYSIGLDIGTNSVGWAVITDEYKVPSKKFKVLGNTDRHSIKKNLIGALLFDSGETAEATRLKRTARRRYTRRKNRICYLQEIFSNEMAKVDDSFFHRLEESFLVEEDKKHERHPIFGNIVDEVAYHEKYPTIYHLRKKLVDSTDKADLRLIYLALAHMIKFRGHFLIEGDLNPDNSDVDKLFIQLVQTYNQLFEENPINASGVDAKAILSARLSKSRRLENLIAQLPGEKKNGLFGNLIALSLGLTPNFKSNFDLAEDAKLQLSKDTYDDDLDNLLAQIGDQYADLFLAAKNLSDAILLSDILRVNTEITKAPLSASMIKRYDEHHQDLTLLKALVRQQLPEKYKEIFFDQSKNGYAGYIDGGASQEEFYKFIKPILEKMDGTEELLVKLNREDLLRKQRTFDNGSIPHQIHLGELHAILRRQEDFYPFLKDNREKIEKILTFRIPYYVGPLARGNSRFAWMTRKSEETITPWNFEEVVDKGASAQSFIERMTNFDKNLPNEKVLPKHSLLYEYFTVYNELTKVKYVTEGMRKPAFLSGEQKKAIVDLLFKTNRKVTVKQLKEDYFKKIECFDSVEISGVEDRFNASLGTYHDLLKIIKDKDFLDNEENEDILEDIVLTLTLFEDREMIEERLKTYAHLFDDKVMKQLKRRRYTGWGRLSRKLINGIRDKQSGKTILDFLKSDGFANRNFMQLIHDDSLTFKEDIQKAQVSGQGDSLHEHIANLAGSPAIKKGILQTVKVVDELVKVMGRHKPENIVIEMARENQTTQKGQKNSRERMKRIEEGIKELGSQILKEHPVENTQLQNEKLYLYYLQNGRDMYVDQELDINRLSDYDVDHIVPQSFLKDDSIDNKVLTRSDKARGKSDNVPSEEVVKKMKNYWRQLLNAKLITQRKFDNLTKAERGGLSELDKAGFIKRQLVETRQITKHVAQILDSRMNTKYDENDKLIREVKVITLKSKLVSDFRKDFQFYKVREINNYHHAHDAYLNAVVGTALIKKYPKLESEFVYGDYKVYDVRKMIAKSEQEIGKATAKYFFYSNIMNFFKTEITLANGEIRKRPLIETNGETGEIVWDKGRDFATVRKVLSMPQVNIVKKTEVQTGGFSKESILPKRNSDKLIARKKDWDPKKYGGFDSPTVAYSVLVVAKVEKGKSKKLKSVKELLGITIMERSSFEKNPIDFLEAKGYKEVKKDLIIKLPKYSLFELENGRKRMLASAGELQKGNELALPSKYVNFLYLASHYEKLKGSPEDNEQKQLFVEQHKHYLDEIIEQISEFSKRVILADANLDKVLSAYNKHRDKPIREQAENIIHLFTLTNLGAPAAFKYFDTTIDRKRYTSTKEVLDATLIHQSITGLYETRIDLSQLGGDGGPAPEAAAKGGSGGTLQLDDEYRLYSPLVKPDQNIQFWLEQFPQAWAETAGMGLAKQVPPQVIQLKASATPVSVRQYPLSKEAQEGIRPHVQRLIQQGILVPVQSPWNTPLLPVRKPGTNDYRPVQDLREVNKRVQDIHPTVPNPYNLLCALPPQRSWYTVLDLKDAFFCLRLHPTSQPLFAFEWRDPGTGRTGQLTWTRLPQGFKNSPTIFNEALHRDLANFRIQHPQVTLLQYVDDLLLAGATKQDCLEGTKALLLELSDLGYRASAKKAQICRREVTYLGYSLRDGQRWLTEARKKTVVQIPAPTTAKQVREFLGTAGFCRLWIPGFATLAAPLYPLTKPKGEFSWAPEHQKAFDAIKKALLSAPALALPDVTKPFTLYVDERKGVARGVLTQTLGPWRRPVAYLSKKLDPVASGWPVCLKAIAAVAILVKDADKLTLGQNITVIAPHALENIVRQPPDRWMTNARMTHYQSLLLTERVTFAPPAALNPATLLPEETDEPVTHDCHQLLIEETGVRKDLTDIPLTGEVLTWFTDGSSYVVEGKRMAGAAVVDGTRTIWASSLPEGTSAQKAELMALTQALRLAEGKSINIYTDSRYAFATAHVHGAIYKQRGWLTSAGREIKNKEEILSLLEALHLPKRLAIIHCPGHQKAKDPISRGNQMADRVAKQAAQGVNLLAGKRTADGSEFEKRTADGSEFESPKKKAKVE

SEQ ID NO: 332 - protein, 2085 aa, synthetic construct
MPAAKRVKLDGGDKKYSIGLDIGTNSVGWAVITDEYKVPSKKFKVLGNTDRHSIKKNLIGALLFDSGETAEATRLKRTARRRYTRRKNRICYLQEIFSNEMAKVDDSFFHRLEESFLVEEDKKHERHPIFGNIVDEVAYHEKYPTIYHLRKKLVDSTDKADLRLIYLALAHMIKFRGHFLIEGDLNPDNSDVDKLFIQLVQTYNQLFEENPINASGVDAKAILSARLSKSRRLENLIAQLPGEKKNGLFGNLIALSLGLTPNFKSNFDLAEDAKLQLSKDTYDDDLDNLLAQIGDQYADLFLAAKNLSDAILLSDILRVNTEITKAPLSASMIKRYDEHHQDLTLLKALVRQQLPEKYKEIFFDQSKNGYAGYIDGGASQEEFYKFIKPILEKMDGTEELLVKLNREDLLRKQRTFDNGSIPHQIHLGELHAILRRQEDFYPFLKDNREKIEKILTFRIPYYVGPLARGNSRFAWMTRKSEETITPWNFEEVVDKGASAQSFIERMTNFDKNLPNEKVLPKHSLLYEYFTVYNELTKVKYVTEGMRKPAFLSGEQKKAIVDLLFKTNRKVTVKQLKEDYFKKIECFDSVEISGVEDRFNASLGTYHDLLKIIKDKDFLDNEENEDILEDIVLTLTLFEDREMIEERLKTYAHLFDDKVMKQLKRRRYTGWGRLSRKLINGIRDKQSGKTILDFLKSDGFANRNFMQLIHDDSLTFKEDIQKAQVSGQGDSLHEHIANLAGSPAIKKGILQTVKVVDELVKVMGRHKPENIVIEMARENQTTQKGQKNSRERMKRIEEGIKELGSQILKEHPVENTQLQNEKLYLYYLQNGRDMYVDQELDINRLSDYDVDHIVPQSFLKDDSIDNKVLTRSDKARGKSDNVPSEEVVKKMKNYWRQLLNAKLITQRKFDNLTKAERGGLSELDKAGFIKRQLVETRQITKHVAQILDSRMNTKYDENDKLIREVKVITLKSKLVSDFRKDFQFYKVREINNYHHAHDAYLNAVVGTALIKKYPKLESEFVYGDYKVYDVRKMIAKSEQEIGKATAKYFFYSNIMNFFKTEITLANGEIRKRPLIETNGETGEIVWDKGRDFATVRKVLSMPQVNIVKKTEVQTGGFSKESILPKRNSDKLIARKKDWDPKKYGGFDSPTVAYSVLVVAKVEKGKSKKLKSVKELLGITIMERSSFEKNPIDFLEAKGYKEVKKDLIIKLPKYSLFELENGRKRMLASAGELQKGNELALPSKYVNFLYLASHYEKLKGSPEDNEQKQLFVEQHKHYLDEIIEQISEFSKRVILADANLDKVLSAYNKHRDKPIREQAENIIHLFTLTNLGAPAAFKYFDTTIDRKRYTSTKEVLDATLIHQSITGLYETRIDLSQLGGDGGPAPGGGGGTLQLDDEYRLYSPLVKPDQNIQFWLEQFPQAWAETAGMGLAKQVPPQVIQLKASATPVSVRQYPLSKEAQEGIRPHVQRLIQQGILVPVQSPWNTPLLPVRKPGTNDYRPVQDLREVNKRVQDIHPTVPNPYNLLCALPPQRSWYTVLDLKDAFFCLRLHPTSQPLFAFEWRDPGTGRTGQLTWTRLPQGFKNSPTIFNEALHRDLANFRIQHPQVTLLQYVDDLLLAGATKQDCLEGTKALLLELSDLGYRASAKKAQICRREVTYLGYSLRDGQRWLTEARKKTVVQIPAPTTAKQVREFLGTAGFCRLWIPGFATLAAPLYPLTKPKGEFSWAPEHQKAFDAIKKALLSAPALALPDVTKPFTLYVDERKGVARGVLTQTLGPWRRPVAYLSKKLDPVASGWPVCLKAIAAVAILVKDADKLTLGQNITVIAPHALENIVRQPPDRWMTNARMTHYQSLLLTERVTFAPPAALNPATLLPEETDEPVTHDCHQLLIEETGVRKDLTDIPLTGEVLTWFTDGSSYVVEGKRMAGAAVVDGTRTIWASSLPEGTSAQKAELMALTQALRLAEGKSINIYTDSRYAFATAHVHGAIYKQRGWLTSAGREIKNKEEILSLLEALHLPKRLAIIHCPGHQKAKDPISRGNQMADRVAKQAAQGVNLLAGKRTADGSEFEKRTADGSEFESPKKKAKVE

SEQ ID NO: 333 - protein, 2083 aa, synthetic construct; identical to SEQ ID NO: 149

SEQ ID NO: 334 - protein, 2090 aa, synthetic construct; identical to SEQ ID NO: 146

SEQ ID NO: 335 - protein, 2087 aa, synthetic construct; identical to SEQ ID NO: 158

SEQ ID NO: 336 - protein, 2088 aa, synthetic construct
MPAAKRVKLDGGDKKYSIGLDIGTNSVGWAVITDEYKVPSKKFKVLGNTDRHSIKKNLIGALLFDSGETAEATRLKRTARRRYTRRKNRICYLQEIFSNEMAKVDDSFFHRLEESFLVEEDKKHERHPIFGNIVDEVAYHEKYPTIYHLRKKLVDSTDKADLRLIYLALAHMIKFRGHFLIEGDLNPDNSDVDKLFIQLVQTYNQLFEENPINASGVDAKAILSARLSKSRRLENLIAQLPGEKKNGLFGNLIALSLGLTPNFKSNFDLAEDAKLQLSKDTYDDDLDNLLAQIGDQYADLFLAAKNLSDAILLSDILRVNTEITKAPLSASMIKRYDEHHQDLTLLKALVRQQLPEKYKEIFFDQSKNGYAGYIDGGASQEEFYKFIKPILEKMDGTEELLVKLNREDLLRKQRTFDNGSIPHQIHLGELHAILRRQEDFYPFLKDNREKIEKILTFRIPYYVGPLARGNSRFAWMTRKSEETITPWNFEEVVDKGASAQSFIERMTNFDKNLPNEKVLPKHSLLYEYFTVYNELTKVKYVTEGMRKPAFLSGEQKKAIVDLLFKTNRKVTVKQLKEDYFKKIECFDSVEISGVEDRFNASLGTYHDLLKIIKDKDFLDNEENEDILEDIVLTLTLFEDREMIEERLKTYAHLFDDKVMKQLKRRRYTGWGRLSRKLINGIRDKQSGKTILDFLKSDGFANRNFMQLIHDDSLTFKEDIQKAQVSGQGDSLHEHIANLAGSPAIKKGILQTVKVVDELVKVMGRHKPENIVIEMARENQTTQKGQKNSRERMKRIEEGIKELGSQILKEHPVENTQLQNEKLYLYYLQNGRDMYVDQELDINRLSDYDVDHIVPQSFLKDDSIDNKVLTRSDKARGKSDNVPSEEVVKKMKNYWRQLLNAKLITQRKFDNLTKAERGGLSELDKAGFIKRQLVETRQITKHVAQILDSRMNTKYDENDKLIREVKVITLKSKLVSDFRKDFQFYKVREINNYHHAHDAYLNAVVGTALIKKYPKLESEFVYGDYKVYDVRKMIAKSEQEIGKATAKYFFYSNIMNFFKTEITLANGEIRKRPLIETNGETGEIVWDKGRDFATVRKVLSMPQVNIVKKTEVQTGGFSKESILPKRNSDKLIARKKDWDPKKYGGFDSPTVAYSVLVVAKVEKGKSKKLKSVKELLGITIMERSSFEKNPIDFLEAKGYKEVKKDLIIKLPKYSLFELENGRKRMLASAGELQKGNELALPSKYVNFLYLASHYEKLKGSPEDNEQKQLFVEQHKHYLDEIIEQISEFSKRVILADANLDKVLSAYNKHRDKPIREQAENIIHLFTLTNLGAPAAFKYFDTTIDRKRYTSTKEVLDATLIHQSITGLYETRIDLSQLGGDGGGGSGGGGSSGGTLQLDDEYRLYSPLVKPDQNIQFWLEQFPQAWAETAGMGLAKQVPPQVIQLKASATPVSVRQYPLSKEAQEGIRPHVQRLIQQGILVPVQSPWNTPLLPVRKPGTNDYRPVQDLREVNKRVQDIHPTVPNPYNLLCALPPQRSWYTVLDLKDAFFCLRLHPTSQPLFAFEWRDPGTGRTGQLTWTRLPQGFKNSPTIFNEALHRDLANFRIQHPQVTLLQYVDDLLLAGATKQDCLEGTKALLLELSDLGYRASAKKAQICRREVTYLGYSLRDGQRWLTEARKKTVVQIPAPTTAKQVREFLGTAGFCRLWIPGFATLAAPLYPLTKPKGEFSWAPEHQKAFDAIKKALLSAPALALPDVTKPFTLYVDERKGVARGVLTQTLGPWRRPVAYLSKKLDPVASGWPVCLKAIAAVAILVKDADKLTLGQNITVIAPHALENIVRQPPDRWMTNARMTHYQSLLLTERVTFAPPAALNPATLLPEETDEPVTHDCHQLLIEETGVRKDLTDIPLTGEVLTWFTDGSSYVVEGKRMAGAAVVDGTRTIWASSLPEGTSAQKAELMALTQALRLAEGKSINIYTDSRYAFATAHVHGAIYKQRGWLTSAGREIKNKEEILSLLEALHLPKRLAIIHCPGHQKAKDPISRGNQMADRVAKQAAQGVNLLAGKRTADGSEFEKRTADGSEFESPKKKAKVE

SEQ ID NO: 337 - protein, 2104 aa, synthetic construct; identical to SEQ ID NO: 150

SEQ ID NO: 338 - protein, 2088 aa, synthetic construct; identical to SEQ ID NO: 169

SEQ ID NO: 339 - protein, 2088 aa, synthetic construct; identical to SEQ ID NO: 162

SEQ ID NO: 340 - protein, 2088 aa, synthetic construct; identical to SEQ ID NO: 173

SEQ ID NO: 341 - protein, 2090 aa, synthetic construct; identical to SEQ ID NO: 141

SEQ ID NO: 342 - protein, 2094 aa, synthetic construct
MPAAKRVKLDGGDKKYSIGLDIGTNSVGWAVITDEYKVPSKKFKVLGNTDRHSIKKNLIGALLFDSGETAEATRLKRTARRRYTRRKNRICYLQEIFSNEMAKVDDSFFHRLEESFLVEEDKKHERHPIFGNIVDEVAYHEKYPTIYHLRKKLVDSTDKADLRLIYLALAHMIKFRGHFLIEGDLNPDNSDVDKLFIQLVQTYNQLFEENPINASGVDAKAILSARLSKSRRLENLIAQLPGEKKNGLFGNLIALSLGLTPNFKSNFDLAEDAKLQLSKDTYDDDLDNLLAQIGDQYADLFLAAKNLSDAILLSDILRVNTEITKAPLSASMIKRYDEHHQDLTLLKALVRQQLPEKYKEIFFDQSKNGYAGYIDGGASQEEFYKFIKPILEKMDGTEELLVKLNREDLLRKQRTFDNGSIPHQIHLGELHAILRRQEDFYPFLKDNREKIEKILTFRIPYYVGPLARGNSRFAWMTRKSEETITPWNFEEVVDKGASAQSFIERMTNFDKNLPNEKVLPKHSLLYEYFTVYNELTKVKYVTEGMRKPAFLSGEQKKAIVDLLFKTNRKVTVKQLKEDYFKKIECFDSVEISGVEDRFNASLGTYHDLLKIIKDKDFLDNEENEDILEDIVLTLTLFEDREMIEERLKTYAHLFDDKVMKQLKRRRYTGWGRLSRKLINGIRDKQSGKTILDFLKSDGFANRNFMQLIHDDSLTFKEDIQKAQVSGQGDSLHEHIANLAGSPAIKKGILQTVKVVDELVKVMGRHKPENIVIEMARENQTTQKGQKNSRERMKRIEEGIKELGSQILKEHPVENTQLQNEKLYLYYLQNGRDMYVDQELDINRLSDYDVDHIVPQSFLKDDSIDNKVLTRSDKARGKSDNVPSEEVVKKMKNYWRQLLNAKLITQRKFDNLTKAERGGLSELDKAGFIKRQLVETRQITKHVAQILDSRMNTKYDENDKLIREVKVITLKSKLVSDFRKDFQFYKVREINNYHHAHDAYLNAVVGTALIKKYPKLESEFVYGDYKVYDVRKMIAKSEQEIGKATAKYFFYSNIMNFFKTEITLANGEIRKRPLIETNGETGEIVWDKGRDFATVRKVLSMPQVNIVKKTEVQTGGFSKESILPKRNSDKLIARKKDWDPKKYGGFDSPTVAYSVLVVAKVEKGKSKKLKSVKELLGITIMERSSFEKNPIDFLEAKGYKEVKKDLIIKLPKYSLFELENGRKRMLASAGELQKGNELALPSKYVNFLYLASHYEKLKGSPEDNEQKQLFVEQHKHYLDEIIEQISEFSKRVILADANLDKVLSAYNKHRDKPIREQAENIIHLFTLTNLGAPAAFKYFDTTIDRKRYTSTKEVLDATLIHQSITGLYETRIDLSQLGGDGGEAAAKGGGGSEAAAKGGTLQLDDEYRLYSPLVKPDQNIQFWLEQFPQAWAETAGMGLAKQVPPQVIQLKASATPVSVRQYPLSKEAQEGIRPHVQRLIQQGILVPVQSPWNTPLLPVRKPGTNDYRPVQDLREVNKRVQDIHPTVPNPYNLLCALPPQRSWYTVLDLKDAFFCLRLHPTSQPLFAFEWRDPGTGRTGQLTWTRLPQGFKNSPTIFNEALHRDLANFRIQHPQVTLLQYVDDLLLAGATKQDCLEGTKALLLELSDLGYRASAKKAQICRREVTYLGYSLRDGQRWLTEARKKTVVQIPAPTTAKQVREFLGTAGFCRLWIPGFATLAAPLYPLTKPKGEFSWAPEHQKAFDAIKKALLSAPALALPDVTKPFTLYVDERKGVARGVLTQTLGPWRRPVAYLSKKLDPVASGWPVCLKAIAAVAILVKDADKLTLGQNITVIAPHALENIVRQPPDRWMTNARMTHYQSLLLTERVTFAPPAALNPATLLPEETDEPVTHDCHQLLIEETGVRKDLTDIPLTGEVLTWFTDGSSYVVEGKRMAGAAVVDGTRTIWASSLPEGTSAQKAELMALTQALRLAEGKSINIYTDSRYAFATAHVHGAIYKQRGWLTSAGREIKNKEEILSLLEALHLPKRLAIIHCPGHQKAKDPISRGNQMADRVAKQAAQGVNLLAGKRTADGSEFEKRTADGSEFESPKKKAKVE

SEQ ID NO: 343 - protein, 2087 aa, synthetic construct
MPAAKRVKLDGGDKKYSIGLDIGTNSVGWAVITDEYKVPSKKFKVLGNTDRHSIKKNLIGALLFDSGETAEATRLKRTARRRYTRRKNRICYLQEIFSNEMAKVDDSFFHRLEESFLVEEDKKHERHPIFGNIVDEVAYHEKYPTIYHLRKKLVDSTDKADLRLIYLALAHMIKFRGHFLIEGDLNPDNSDVDKLFIQLVQTYNQLFEENPINASGVDAKAILSARLSKSRRLENLIAQLPGEKKNGLFGNLIALSLGLTPNFKSNFDLAEDAKLQLSKDTYDDDLDNLLAQIGDQYADLFLAAKNLSDAILLSDILRVNTEITKAPLSASMIKRYDEHHQDLTLLKALVRQQLPEKYKEIFFDQSKNGYAGYIDGGASQEEFYKFIKPILEKMDGTEELLVKLNREDLLRKQRTFDNGSIPHQIHLGELHAILRRQEDFYPFLKDNREKIEKILTFRIPYYVGPLARGNSRFAWMTRKSEETITPWNFEEVVDKGASAQSFIERMTNFDKNLPNEKVLPKHSLLYEYFTVYNELTKVKYVTEGMRKPAFLSGEQKKAIVDLLFKTNRKVTVKQLKEDYFKKIECFDSVEISGVEDRFNASLGTYHDLLKIIKDKDFLDNEENEDILEDIVLTLTLFEDREMIEERLKTYAHLFDDKVMKQLKRRRYTGWGRLSRKLINGIRDKQSGKTILDFLKSDGFANRNFMQLIHDDSLTFKEDIQKAQVSGQGDSLHEHIANLAGSPAIKKGILQTVKVVDELVKVMGRHKPENIVIEMARENQTTQKGQKNSRERMKRIEEGIKELGSQILKEHPVENTQLQNEKLYLYYLQNGRDMYVDQELDINRLSDYDVDHIVPQSFLKDDSIDNKVLTRSDKARGKSDNVPSEEVVKKMKNYWRQLLNAKLITQRKFDNLTKAERGGLSELDKAGFIKRQLVETRQITKHVAQILDSRMNTKYDENDKLIREVKVITLKSKLVSDFRKDFQFYKVREINNYHHAHDAYLNAVVGTALIKKYPKLESEFVYGDYKVYDVRKMIAKSEQEIGKATAKYFFYSNIMNFFKTEITLANGEIRKRPLIETNGETGEIVWDKGRDFATVRKVLSMPQVNIVKKTEVQTGGFSKESILPKRNSDKLIARKKDWDPKKYGGFDSPTVAYSVLVVAKVEKGKSKKLKSVKELLGITIMERSSFEKNPIDFLEAKGYKEVKKDLIIKLPKYSLFELENGRKRMLASAGELQKGNELALPSKYVNFLYLASHYEKLKGSPEDNEQKQLFVEQHKHYLDEIIEQISEFSKRVILADANLDKVLSAYNKHRDKPIREQAENIIHLFTLTNLGAPAAFKYFDTTIDRKRYTSTKEVLDATLIHQSITGLYETRIDLSQLGGDGGEAAAKPAPGGTLQLDDEYRLYSPLVKPDQNIQFWLEQFPQAWAETAGMGLAKQVPPQVIQLKASATPVSVRQYPLSKEAQEGIRPHVQRLIQQGILVPVQSPWNTPLLPVRKPGTNDYRPVQDLREVNKRVQDIHPTVPNPYNLLCALPPQRSWYTVLDLKDAFFCLRLHPTSQPLFAFEWRDPGTGRTGQLTWTRLPQGFKNSPTIFNEALHRDLANFRIQHPQVTLLQYVDDLLLAGATKQDCLEGTKALLLELSDLGYRASAKKAQICRREVTYLGYSLRDGQRWLTEARKKTVVQIPAPTTAKQVREFLGTAGFCRLWIPGFATLAAPLYPLTKPKGEFSWAPEHQKAFDAIKKALLSAPALALPDVTKPFTLYVDERKGVARGVLTQTLGPWRRPVAYLSKKLDPVASGWPVCLKAIAAVAILVKDADKLTLGQNITVIAPHALENIVRQPPDRWMTNARMTHYQSLLLTERVTFAPPAALNPATLLPEETDEPVTHDCHQLLIEETGVRKDLTDIPLTGEVLTWFTDGSSYVVEGKRMAGAAVVDGTRTIWASSLPEGTSAQKAELMALTQALRLAEGKSINIYTDSRYAFATAHVHGAIYKQRGWLTSAGREIKNKEEILSLLEALHLPKRLAIIHCPGHQKAKDPISRGNQMADRVAKQAAQGVNLLAGKRTADGSEFEKRTADGSEFESPKKKAKVE

SEQ ID NO: 344 - protein, 2088 aa, synthetic construct; identical to SEQ ID NO: 131

SEQ ID NO: 345 - protein, 2085 aa, synthetic construct
MPAAKRVKLDGGDKKYSIGLDIGTNSVGWAVITDEYKVPSKKFKVLGNTDRHSIKKNLIGALLFDSGETAEATRLKRTARRRYTRRKNRICYLQEIFSNEMAKVDDSFFHRLEESFLVEEDKKHERHPIFGNIVDEVAYHEKYPTIYHLRKKLVDSTDKADLRLIYLALAHMIKFRGHFLIEGDLNPDNSDVDKLFIQLVQTYNQLFEENPINASGVDAKAILSARLSKSRRLENLIAQLPGEKKNGLFGNLIALSLGLTPNFKSNFDLAEDAKLQLSKDTYDDDLDNLLAQIGDQYADLFLAAKNLSDAILLSDILRVNTEITKAPLSASMIKRYDEHHQDLTLLKALVRQQLPEKYKEIFFDQSKNGYAGYIDGGASQEEFYKFIKPILEKMDGTEELLVKLNREDLLRKQRTFDNGSIPHQIHLGELHAILRRQEDFYPFLKDNREKIEKILTFRIPYYVGPLARGNSRFAWMTRKSEETITPWNFEEVVDKGASAQSFIERMTNFDKNLPNEKVLPKHSLLYEYFTVYNELTKVKYVTEGMRKPAFLSGEQKKAIVDLLFKTNRKVTVKQLKEDYFKKIECFDSVEISGVEDRFNASLGTYHDLLKIIKDKDFLDNEENEDILEDIVLTLTLFEDREMIEERLKTYAHLFDDKVMKQLKRRRYTGWGRLSRKLINGIRDKQSGKTILDFLKSDGFANRNFMQLIHDDSLTFKEDIQKAQVSGQGDSLHEHIANLAGSPAIKKGILQTVKVVDELVKVMGRHKPENIVIEMARENQTTQKGQKNSRERMKRIEEGIKELGSQILKEHPVENTQLQNEKLYLYYLQNGRDMYVDQELDINRLSDYDVDHIVPQSFLKDDSIDNKVLTRSDKARGKSDNVPSEEVVKKMKNYWRQLLNAKLITQRKFDNLTKAERGGLSELDKAGFIKRQLVETRQITKHVAQILDSRMNTKYDENDKLIREVKVITLKSKLVSDFRKDFQFYKVREINNYHHAHDAYLNAVVGTALIKKYPKLESEFVYGDYKVYDVRKMIAKSEQEIGKATAKYFFYSNIMNFFKTEITLANGEIRKRPLIETNGETGEIVWDKGRDFATVRKVLSMPQVNIVKKTEVQTGGFSKESILPKRNSDKLIARKKDWDPKKYGGFDSPTVAYSVLVVAKVEKGKSKKLKSVKELLGITIMERSSFEKNPIDFLEAKGYKEVKKDLIIKLPKYSLFELENGRKRMLASAGELQKGNELALPSKYVNFLYLASHYEKLKGSPEDNEQKQLFVEQHKHYLDEIIEQISEFSKRVILADANLDKVLSAYNKHRDKPIREQAENIIHLFTLTNLGAPAAFKYFDTTIDRKRYTSTKEVLDATLIHQSITGLYETRIDLSQLGGDGGGGSPAPGGTLQLDDEYRLYSPLVKPDQNIQFWLEQFPQAWAETAGMGLAKQVPPQVIQLKASATPVSVRQYPLSKEAQEGIRPHVQRLIQQGILVPVQSPWNTPLLPVRKPGTNDYRPVQDLREVNKRVQDIHPTVPNPYNLLCALPPQRSWYTVLDLKDAFFCLRLHPTSQPLFAFEWRDPGTGRTGQLTWTRLPQGFKNSPTIFNEALHRDLANFRIQHPQVTLLQYVDDLLLAGATKQDCLEGTKALLLELSDLGYRASAKKAQICRREVTYLGYSLRDGQRWLTEARKKTVVQIPAPTTAKQVREFLGTAGFCRLWIPGFATLAAPLYPLTKPKGEFSWAPEHQKAFDAIKKALLSAPALALPDVTKPFTLYVDERKGVARGVLTQTLGPWRRPVAYLSKKLDPVASGWPVCLKAIAAVAILVKDADKLTLGQNITVIAPHALENIVRQPPDRWMTNARMTHYQSLLLTERVTFAPPAALNPATLLPEETDEPVTHDCHQLLIEETGVRKDLTDIPLTGEVLTWFTDGSSYVVEGKRMAGAAVVDGTRTIWASSLPEGTSAQKAELMALTQALRLAEGKSINIYTDSRYAFATAHVHGAIYKQRGWLTSAGREIKNKEEILSLLEALHLPKRLAIIHCPGHQKAKDPISRGNQMADRVAKQAAQGVNLLAGKRTADGSEFEKRTADGSEFESPKKKAKVE

SEQ ID NO: 346 - protein, 2090 aa, synthetic construct
MPAAKRVKLDGGDKKYSIGLDIGTNSVGWAVITDEYKVPSKKFKVLGNTDRHSIKKNLIGALLFDSGETAEATRLKRTARRRYTRRKNRICYLQEIFSNEMAKVDDSFFHRLEESFLVEEDKKHERHPIFGNIVDEVAYHEKYPTIYHLRKKLVDSTDKADLRLIYLALAHMIKFRGHFLIEGDLNPDNSDVDKLFIQLVQTYNQLFEENPINASGVDAKAILSARLSKSRRLENLIAQLPGEKKNGLFGNLIALSLGLTPNFKSNFDLAEDAKLQLSKDTYDDDLDNLLAQIGDQYADLFLAAKNLSDAILLSDILRVNTEITKAPLSASMIKRYDEHHQDLTLLKALVRQQLPEKYKEIFFDQSKNGYAGYIDGGASQEEFYKFIKPILEKMDGTEELLVKLNREDLLRKQRTFDNGSIPHQIHLGELHAILRRQEDFYPFLKDNREKIEKILTFRIPYYVGPLARGNSRFAWMTRKSEETITPWNFEEVVDKGASAQSFIERMTNFDKNLPNEKVLPKHSLLYEYFTVYNELTKVKYVTEGMRKPAFLSGEQKKAIVDLLFKTNRKVTVKQLKEDYFKKIECFDSVEISGVEDRFNASLGTYHDLLKIIKDKDFLDNEENEDILEDIVLTLTLFEDREMIEERLKTYAHLFDDKVMKQLKRRRYTGWGRLSRKLINGIRDKQSGKTILDFLKSDGFANRNFMQLIHDDSLTFKEDIQKAQVSGQGDSLHEHIANLAGSPAIKKGILQTVKVVDELVKVMGRHKPENIVIEMARENQTTQKGQKNSRERMKRIEEGIKELGSQILKEHPVENTQLQNEKLYLYYLQNGRDMYVDQELDINRLSDYDVDHIVPQSFLKDDSIDNKVLTRSDKARGKSDNVPSEEVVKKMKNYWRQLLNAKLITQRKFDNLTKAERGGLSELDKAGFIKRQLVETRQITKHVAQILDSRMNTKYDENDKLIREVKVITLKSKLVSDFRKDFQFYKVREINNYHHAHDAYLNAVVGTALIKKYPKLESEFVYGDYKVYDVRKMIAKSEQEIGKATAKYFFYSNIMNFFKTEITLANGEIRKRPLIETNGETGEIVWDKGRDFATVRKVLSMPQVNIVKKTEVQTGGFSKESILPKRNSDKLIARKKDWDPKKYGGFDSPTVAYSVLVVAKVEKGKSKKLKSVKELLGITIMERSSFEKNPIDFLEAKGYKEVKKDLIIKLPKYSLFELENGRKRMLASAGELQKGNELALPSKYVNFLYLASHYEKLKGSPEDNEQKQLFVEQHKHYLDEIIEQISEFSKRVILADANLDKVLSAYNKHRDKPIREQAENIIHLFTLTNLGAPAAFKYFDTTIDRKRYTSTKEVLDATLIHQSITGLYETRIDLSQLGGDGGGGGPAPEAAAKGGTLQLDDEYRLYSPLVKPDQNIQFWLEQFPQAWAETAGMGLAKQVPPQVIQLKASATPVSVRQYPLSKEAQEGIRPHVQRLIQQGILVPVQSPWNTPLLPVRKPGTNDYRPVQDLREVNKRVQDIHPTVPNPYNLLCALPPQRSWYTVLDLKDAFFCLRLHPTSQPLFAFEWRDPGTGRTGQLTWTRLPQGFKNSPTIFNEALHRDLANFRIQHPQVTLLQYVDDLLLAGATKQDCLEGTKALLLELSDLGYRASAKKAQICRREVTYLGYSLRDGQRWLTEARKKTVVQIPAPTTAKQVREFLGTAGFCRLWIPGFATLAAPLYPLTKPKGEFSWAPEHQKAFDAIKKALLSAPALALPDVTKPFTLYVDERKGVARGVLTQTLGPWRRPVAYLSKKLDPVASGWPVCLKAIAAVAILVKDADKLTLGQNITVIAPHALENIVRQPPDRWMTNARMTHYQSLLLTERVTFAPPAALNPATLLPEETDEPVTHDCHQLLIEETGVRKDLTDIPLTGEVLTWFTDGSSYVVEGKRMAGAAVVDGTRTIWASSLPEGTSAQKAELMALTQALRLAEGKSINIYTDSRYAFATAHVHGAIYKQRGWLTSAGREIKNKEEILSLLEALHLPKRLAIIHCPGHQKAKDPISRGNQMADRVAKQAAQGVNLLAGKRTADGSEFEKRTADGSEFESPKKKAKVE

SEQ ID NO: 347 - protein, 2082 aa, synthetic construct; identical to SEQ ID NO: 177

SEQ ID NO: 348 - protein, 2090 aa, synthetic construct
MPAAKRVKLDGGDKKYSIGLDIGTNSVGWAVITDEYKVPSKKFKVLGNTDRHSIKKNLIGALLFDSGETAEATRLKRTARRRYTRRKNRICYLQEIFSNEMAKVDDSFFHRLEESFLVEEDKKHERHPIFGNIVDEVAYHEKYPTIYHLRKKLVDSTDKADLRLIYLALAHMIKFRGHFLIEGDLNPDNSDVDKLFIQLVQTYNQLFEENPINASGVDAKAILSARLSKSRRLENLIAQLPGEKKNGLFGNLIALSLGLTPNFKSNFDLAEDAKLQLSKDTYDDDLDNLLAQIGDQYADLFLAAKNLSDAILLSDILRVNTEITKAPLSASMIKRYDEHHQDLTLLKALVRQQLPEKYKEIFFDQSKNGYAGYIDGGASQEEFYKFIKPILEKMDGTEELLVKLNREDLLRKQRTFDNGSIPHQIHLGELHAILRRQEDFYPFLKDNREKIEKILTFRIPYYVGPLARGNSRFAWMTRKSEETITPWNFEEVVDKGASAQSFIERMTNFDKNLPNEKVLPKHSLLYEYFTVYNELTKVKYVTEGMRKPAFLSGEQKKAIVDLLFKTNRKVTVKQLKEDYFKKIECFDSVEISGVEDRFNASLGTYHDLLKIIKDKDFLDNEENEDILEDIVLTLTLFEDREMIEERLKTYAHLFDDKVMKQLKRRRYTGWGRLSRKLINGIRDKQSGKTILDFLKSDGFANRNFMQLIHDDSLTFKEDIQKAQVSGQGDSLHEHIANLAGSPAIKKGILQTVKVVDELVKVMGRHKPENIVIEMARENQTTQKGQKNSRERMKRIEEGIKELGSQILKEHPVENTQLQNEKLYLYYLQNGRDMYVDQELDINRLSDYDVDHIVPQSFLKDDSIDNKVLTRSDKARGKSDNVPSEEVVKKMKNYWRQLLNAKLITQRKFDNLTKAERGGLSELDKAGFIKRQLVETRQITKHVAQILDSRMNTKYDENDKLIREVKVITLKSKLVSDFRKDFQFYKVREINNYHHAHDAYLNAVVGTALIKKYPKLESEFVYGDYKVYDVRKMIAKSEQEIGKATAKYFFYSNIMNFFKTEITLANGEIRKRPLIETNGETGEIVWDKGRDFATVRKVLSMPQVNIVKKTEVQTGGFSKESILPKRNSDKLIARKKDWDPKKYGGFDSPTVAYSVLVVAKVEKGKSKKLKSVKELLGITIMERSSFEKNPIDFLEAKGYKEVKKDLIIKLPKYSLFELENGRKRMLASAGELQKGNELALPSKYVNFLYLASHYEKLKGSPEDNEQKQLFVEQHKHYLDEIIEQISEFSKRVILADANLDKVLSAYNKHRDKPIREQAENIIHLFTLTNLGAPAAFKYFDTTIDRKRYTSTKEVLDATLIHQSITGLYETRIDLSQLGGDGGEAAAKGGGPAPGGTLQLDDEYRLYSPLVKPDQNIQFWLEQFPQAWAETAGMGLAKQVPPQVIQLKASATPVSVRQYPLSKEAQEGIRPHVQRLIQQGILVPVQSPWNTPLLPVRKPGTNDYRPVQDLREVNKRVQDIHPTVPNPYNLLCALPPQRSWYTVLDLKDAFFCLRLHPTSQPLFAFEWRDPGTGRTGQLTWTRLPQGFKNSPTIFNEALHRDLANFRIQHPQVTLLQYVDDLLLAGATKQDCLEGTKALLLELSDLGYRASAKKAQICRREVTYLGYSLRDGQRWLTEARKKTVVQIPAPTTAKQVREFLGTAGFCRLWIPGFATLAAPLYPLTKPKGEFSWAPEHQKAFDAIKKALLSAPALALPDVTKPFTLYVDERKGVARGVLTQTLGPWRRPVAYLSKKLDPVASGWPVCLKAIAAVAILVKDADKLTLGQNITVIAPHALENIVRQPPDRWMTNARMTHYQSLLLTERVTFAPPAALNPATLLPEETDEPVTHDCHQLLIEETGVRKDLTDIPLTGEVLTWFTDGSSYVVEGKRMAGAAVVDGTRTIWASSLPEGTSAQKAELMALTQALRLAEGKSINIYTDSRYAFATAHVHGAIYKQRGWLTSAGREIKNKEEILSLLEALHLPKRLAIIHCPGHQKAKDPISRGNQMADRVAKQAAQGVNLLAGKRTADGSEFEKRTADGSEFESPKKKAKVE

SEQ ID NO: 349 - protein, 2090 aa, synthetic construct; identical to SEQ ID NO: 136

SEQ ID NO: 350 - protein, 2090 aa, synthetic construct; identical to SEQ ID NO: 115

SEQ ID NO: 351 - protein, 2099 aa, synthetic construct; identical to SEQ ID NO: 137

SEQ ID NO: 352 - protein, 2090 aa, synthetic construct
MPAAKRVKLDGGDKKYSIGLDIGTNSVGWAVITDEYKVPSKKFKVLGNTDRHSIKKNLIGALLFDSGETAEATRLKRTARRRYTRRKNRICYLQEIFSNEMAKVDDSFFHRLEESFLVEEDKKHERHPIFGNIVDEVAYHEKYPTIYHLRKKLVDSTDKADLRLIYLALAHMIKFRGHFLIEGDLNPDNSDVDKLFIQLVQTYNQLFEENPINASGVDAKAILSARLSKSRRLENLIAQLPGEKKNGLFGNLIALSLGLTPNFKSNFDLAEDAKLQLSKDTYDDDLDNLLAQIGDQYADLFLAAKNLSDAILLSDILRVNTEITKAPLSASMIKRYDEHHQDLTLLKALVRQQLPEKYKEIFFDQSKNGYAGYIDGGASQEEFYKFIKPILEKMDGTEELLVKLNREDLLRKQRTFDNGSIPHQIHLGELHAILRRQEDFYPFLKDNREKIEKILTFRIPYYVGPLARGNSRFAWMTRKSEETITPWNFEEVVDKGASAQSFIERMTNFDKNLPNEKVLPKHSLLYEYFTVYNELTKVKYVTEGMRKPAFLSGEQKKAIVDLLFKTNRKVTVKQLKEDYFKKIECFDSVEISGVEDRFNASLGTYHDLLKIIKDKDFLDNEENEDILEDIVLTLTLFEDREMIEERLKTYAHLFDDKVMKQLKRRRYTGWGRLSRKLINGIRDKQSGKTILDFLKSDGFANRNFMQLIHDDSLTFKEDIQKAQVSGQGDSLHEHIANLAGSPAIKKGILQTVKVVDELVKVMGRHKPENIVIEMARENQTTQKGQKNSRERMKRIEEGIKELGSQILKEHPVENTQLQNEKLYLYYLQNGRDMYVDQELDINRLSDYDVDHIVPQSFLKDDSIDNKVLTRSDKARGKSDNVPSEEVVKKMKNYWRQLLNAKLITQRKFDNLTKAERGGLSELDKAGFIKRQLVETRQITKHVAQILDSRMNTKYDENDKLIREVKVITLKSKLVSDFRKDFQFYKVREINNYHHAHDAYLNAVVGTALIKKYPKLESEFVYGDYKVYDVRKMIAKSEQEIGKATAKYFFYSNIMNFFKTEITLANGEIRKRPLIETNGETGEIVWDKGRDFATVRKVLSMPQVNIVKKTEVQTGGFSKESILPKRNSDKLIARKKDWDPKKYGGFDSPTVAYSVLVVAKVEKGKSKKLKSVKELLGITIMERSSFEKNPIDFLEAKGYKEVKKDLIIKLPKYSLFELENGRKRMLASAGELQKGNELALPSKYVNFLYLASHYEKLKGSPEDNEQKQLFVEQHKHYLDEIIEQISEFSKRVILADANLDKVLSAYNKHRDKPIREQAENIIHLFTLTNLGAPAAFKYFDTTIDRKRYTSTKEVLDATLIHQSITGLYETRIDLSQLGGDGGGGSEAAAKGGGGGTLQLDDEYRLYSPLVKPDQNIQFWLEQFPQAWAETAGMGLAKQVPPQVIQLKASATPVSVRQYPLSKEAQEGIRPHVQRLIQQGILVPVQSPWNTPLLPVRKPGTNDYRPVQDLREVNKRVQDIHPTVPNPYNLLCALPPQRSWYTVLDLKDAFFCLRLHPTSQPLFAFEWRDPGTGRTGQLTWTRLPQGFKNSPTIFNEALHRDLANFRIQHPQVTLLQYVDDLLLAGATKQDCLEGTKALLLELSDLGYRASAKKAQICRREVTYLGYSLRDGQRWLTEARKKTVVQIPAPTTAKQVREFLGTAGFCRLWIPGFATLAAPLYPLTKPKGEFSWAPEHQKAFDAIKKALLSAPALALPDVTKPFTLYVDERKGVARGVLTQTLGPWRRPVAYLSKKLDPVASGWPVCLKAIAAVAILVKDADKLTLGQNITVIAPHALENIVRQPPDRWMTNARMTHYQSLLLTERVTFAPPAALNPATLLPEETDEPVTHDCHQLLIEETGVRKDLTDIPLTGEVLTWFTDGSSYVVEGKRMAGAAVVDGTRTIWASSLPEGTSAQKAELMALTQALRLAEGKSINIYTDSRYAFATAHVHGAIYKQRGWLTSAGREIKNKEEILSLLEALHLPKRLAIIHCPGHQKAKDPISRGNQMADRVAKQAAQGVNLLAGKRTADGSEFEKRTADGSEFESPKKKAKVE

SEQ ID NO: 353 - protein, 2085 aa, synthetic construct; identical to SEQ ID NO: 183

SEQ ID NO: 354 - protein, 2090 aa, synthetic construct
MPAAKRVKLDGGDKKYSIGLDIGTNSVGWAVITDEYKVPSKKFKVLGNTDRHSIKKNLIGALLFDSGETAEATRLKRTARRRYTRRKNRICYLQEIFSNEMAKVDDSFFHRLEESFLVEEDKKHERHPIFGNIVDEVAYHEKYPTIYHLRKKLVDSTDKADLRLIYLALAHMIKFRGHFLIEGDLNPDNSDVDKLFIQLVQTYNQLFEENPINASGVDAKAILSARLSKSRRLENLIAQLPGEKKNGLFGNLIALSLGLTPNFKSNFDLAEDAKLQLSKDTYDDDLDNLLAQIGDQYADLFLAAKNLSDAILLSDILRVNTEITKAPLSASMIKRYDEHHQDLTLLKALVRQQLPEKYKEIFFDQSKNGYAGYIDGGASQEEFYKFIKPILEKMDGTEELLVKLNREDLLRKQRTFDNGSIPHQIHLGELHAILRRQEDFYPFLKDNREKIEKILTFRIPYYVGPLARGNSRFAWMTRKSEETITPWNFEEVVDKGASAQSFIERMTNFDKNLPNEKVLPKHSLLYEYFTVYNELTKVKYVTEGMRKPAFLSGEQKKAIVDLLFKTNRKVTVKQLKEDYFKKIECFDSVEISGVEDRFNASLGTYHDLLKIIKDKDFLDNEENEDILEDIVLTLTLFEDREMIEERLKTYAHLFDDKVMKQLKRRRYTGWGRLSRKLINGIRDKQSGKTILDFLKSDGFANRNFMQLIHDDSLTFKEDIQKAQVSGQGDSLHEHIANLAGSPAIKKGILQTVKVVDELVKVMGRHKPENIVIEMARENQTTQKGQKNSRERMKRIEEGIKELGSQILKEHPVENTQLQNEKLYLYYLQNGRDMYVDQELDINRLSDYDVDHIVPQSFLKDDSIDNKVLTRSDKARGKSDNVPSEEVVKKMKNYWRQLLNAKLITQRKFDNLTKAERGGLSELDKAGFIKRQLVETRQITKHVAQILDSRMNTKYDENDKLIREVKVITLKSKLVSDFRKDFQFYKVREINNYHHAHDAYLNAVVGTALIKKYPKLESEFVYGDYKVYDVRKMIAKSEQEIGKATAKYFFYSNIMNFFKTEITLANGEIRKRPLIETNGETGEIVWDKGRDFATVRKVLSMPQVNIVKKTEVQTGGFSKESILPKRNSDKLIARKKDWDPKKYGGFDSPTVAYSVLVVAKVEKGKSKKLKSVKELLGITIMERSSFEKNPIDFLEAKGYKEVKKDLIIKLPKYSLFELENGRKRMLASAGELQKGNELALPSKYVNFLYLASHYEKLKGSPEDNEQKQLFVEQHKHYLDEIIEQISEFSKRVILADANLDKVLSAYNKHRDKPIREQAENIIHLFTLTNLGAPAAFKYFDTTIDRKRYTSTKEVLDATLIHQSITGLYETRIDLSQLGGDGGEAAAKGGGGGSGGTLQLDDEYRLYSPLVKPDQNIQFWLEQFPQAWAETAGMGLAKQVPPQVIQLKASATPVSVRQYPLSKEAQEGIRPHVQRLIQQGILVPVQSPWNTPLLPVRKPGTNDYRPVQDLREVNKRVQDIHPTVPNPYNLLCALPPQRSWYTVLDLKDAFFCLRLHPTSQPLFAFEWRDPGTGRTGQLTWTRLPQGFKNSPTIFNEALHRDLANFRIQHPQVTLLQYVDDLLLAGATKQDCLEGTKALLLELSDLGYRASAKKAQICRREVTYLGYSLRDGQRWLTEARKKTVVQIPAPTTAKQVREFLGTAGFCRLWIPGFATLAAPLYPLTKPKGEFSWAPEHQKAFDAIKKALLSAPALALPDVTKPFTLYVDERKGVARGVLTQTLGPWRRPVAYLSKKLDPVASGWPVCLKAIAAVAILVKDADKLTLGQNITVIAPHALENIVRQPPDRWMTNARMTHYQSLLLTERVTFAPPAALNPATLLPEETDEPVTHDCHQLLIEETGVRKDLTDIPLTGEVLTWFTDGSSYVVEGKRMAGAAVVDGTRTIWASSLPEGTSAQKAELMALTQALRLAEGKSINIYTDSRYAFATAHVHGAIYKQRGWLTSAGREIKNKEEILSLLEALHLPKRLAIIHCPGHQKAKDPISRGNQMADRVAKQAAQGVNLLAGKRTADGSEFEKRTADGSEFESPKKKAKVE

SEQ ID NO: 355 - protein, 2099 aa, synthetic construct
MPAAKRVKLDGGDKKYSIGLDIGTNSVGWAVITDEYKVPSKKFKVLGNTDRHSIKKNLIGALLFDSGETAEATRLKRTARRRYTRRKNRICYLQEIFSNEMAKVDDSFFHRLEESFLVEEDKKHERHPIFGNIVDEVAYHEKYPTIYHLRKKLVDSTDKADLRLIYLALAHMIKFRGHFLIEGDLNPDNSDVDKLFIQLVQTYNQLFEENPINASGVDAKAILSARLSKSRRLENLIAQLPGEKKNGLFGNLIALSLGLTPNFKSNFDLAEDAKLQLSKDTYDDDLDNLLAQIGDQYADLFLAAKNLSDAILLSDILRVNTEITKAPLSASMIKRYDEHHQDLTLLKALVRQQLPEKYKEIFFDQSKNGYAGYIDGGASQEEFYKFIKPILEKMDGTEELLVKLNREDLLRKQRTFDNGSIPHQIHLGELHAILRRQEDFYPFLKDNREKIEKILTFRIPYYVGPLARGNSRFAWMTRKSEETITPWNFEEVVDKGASAQSFIERMTNFDKNLPNEKVLPKHSLLYEYFTVYNELTKVKYVTEGMRKPAFLSGEQKKAIVDLLFKTNRKVTVKQLKEDYFKKIECFDSVEISGVEDRFNASLGTYHDLLKIIKDKDFLDNEENEDILEDIVLTLTLFEDREMIEERLKTYAHLFDDKVMKQLKRRRYTGWGRLSRKLINGIRDKQSGKTILDFLKSDGFANRNFMQLIHDDSLTFKEDIQKAQVSGQGDSLHEHIANLAGSPAIKKGILQTVKVVDELVKVMGRHKPENIVIEMARENQTTQKGQKNSRERMKRIEEGIKELGSQILKEHPVENTQLQNEKLYLYYLQNGRDMYVDQELDINRLSDYDVDHIVPQSFLKDDSIDNKVLTRSDKARGKSDNVPSEEVVKKMKNYWRQLLNAKLITQRKFDNLTKAERGGLSELDKAGFIKRQLVETRQITKHVAQILDSRMNTKYDENDKLIREVKVITLKSKLVSDFRKDFQFYKVREINNYHHAHDAYLNAVVGTALIKKYPKLESEFVYGDYKVYDVRKMIAKSEQEIGKATAKYFFYSNIMNFFKTEITLANGEIRKRPLIETNGETGEIVWDKGRDFATVRKVLSMPQVNIVKKTEVQTGGFSKESILPKRNSDKLIARKKDWDPKKYGGFDSPTVAYSVLVVAKVEKGKSKKLKSVKELLGITIMERSSFEKNPIDFLEAKGYKEVKKDLIIKLPKYSLFELENGRKRMLASAGELQKGNELALPSKYVNFLYLASHYEKLKGSPEDNEQKQLFVEQHKHYLDEIIEQISEFSKRVILADANLDKVLSAYNKHRDKPIREQAENIIHLFTLTNLGAPAAFKYFDTTIDRKRYTSTKEVLDATLIHQSITGLYETRIDLSQLGGDGGGGGGSGGGGSGGGGSGGGGSGGTLQLDDEYRLYSPLVKPDQNIQFWLEQFPQAWAETAGMGLAKQVPPQVIQLKASATPVSVRQYPLSKEAQEGIRPHVQRLIQQGILVPVQSPWNTPLLPVRKPGTNDYRPVQDLREVNKRVQDIHPTVPNPYNLLCALPPQRSWYTVLDLKDAFFCLRLHPTSQPLFAFEWRDPGTGRTGQLTWTRLPQGFKNSPTIFNEALHRDLANFRIQHPQVTLLQYVDDLLLAGATKQDCLEGTKALLLELSDLGYRASAKKAQICRREVTYLGYSLRDGQRWLTEARKKTVVQIPAPTTAKQVREFLGTAGFCRLWIPGFATLAAPLYPLTKPKGEFSWAPEHQKAFDAIKKALLSAPALALPDVTKPFTLYVDERKGVARGVLTQTLGPWRRPVAYLSKKLDPVASGWPVCLKAIAAVAILVKDADKLTLGQNITVIAPHALENIVRQPPDRWMTNARMTHYQSLLLTERVTFAPPAALNPATLLPEETDEPVTHDCHQLLIEETGVRKDLTDIPLTGEVLTWFTDGSSYVVEGKRMAGAAVVDGTRTIWASSLPEGTSAQKAELMALTQALRLAEGKSINIYTDSRYAFATAHVHGAIYKQRGWLTSAGREIKNKEEILSLLEALHLPKRLAIIHCPGHQKAKDPISRGNQMADRVAKQAAQGVNLLAGKRTADGSEFEKRTADGSEFESPKKKAKVE

SEQ ID NO: 356 - protein, 2085 aa, synthetic construct; identical to SEQ ID NO: 125

SEQ ID NO: 357 - protein, 2091 aa, synthetic construct
MPAAKRVKLDGGDKKYSIGLDIGTNSVGWAVITDEYKVPSKKFKVLGNTDRHSIKKNLIGALLFDSGETAEATRLKRTARRRYTRRKNRICYLQEIFSNEMAKVDDSFFHRLEESFLVEEDKKHERHPIFGNIVDEVAYHEKYPTIYHLRKKLVDSTDKADLRLIYLALAHMIKFRGHFLIEGDLNPDNSDVDKLFIQLVQTYNQLFEENPINASGVDAKAILSARLSKSRRLENLIAQLPGEKKNGLFGNLIALSLGLTPNFKSNFDLAEDAKLQLSKDTYDDDLDNLLAQIGDQYADLFLAAKNLSDAILLSDILRVNTEITKAPLSASMIKRYDEHHQDLTLLKALVRQQLPEKYKEIFFDQSKNGYAGYIDGGASQEEFYKFIKPILEKMDGTEELLVKLNREDLLRKQRTFDNGSIPHQIHLGELHAILRRQEDFYPFLKDNREKIEKILTFRIPYYVGPLARGNSRFAWMTRKSEETITPWNFEEVVDKGASAQSFIERMTNFDKNLPNEKVLPKHSLLYEYFTVYNELTKVKYVTEGMRKPAFLSGEQKKAIVDLLFKTNRKVTVKQLKEDYFKKIECFDSVEISGVEDRFNASLGTYHDLLKIIKDKDFLDNEENEDILEDIVLTLTLFEDREMIEERLKTYAHLFDDKVMKQLKRRRYTGWGRLSRKLINGIRDKQSGKTILDFLKSDGFANRNFMQLIHDDSLTFKEDIQKAQVSGQGDSLHEHIANLAGSPAIKKGILQTVKVVDELVKVMGRHKPENIVIEMARENQTTQKGQKNSRERMKRIEEGIKELGSQILKEHPVENTQLQNEKLYLYYLQNGRDMYVDQELDINRLSDYDVDHIVPQSFLKDDSIDNKVLTRSDKARGKSDNVPSEEVVKKMKNYWRQLLNAKLITQRKFDNLTKAERGGLSELDKAGFIKRQLVETRQITKHVAQILDSRMNTKYDENDKLIREVKVITLKSKLVSDFRKDFQFYKVREINNYHHAHDAYLNAVVGTALIKKYPKLESEFVYGDYKVYDVRKMIAKSEQEIGKATAKYFFYSNIMNFFKTEITLANGEIRKRPLIETNGETGEIVWDKGRDFATVRKVLSMPQVNIVKKTEVQTGGFSKESILPKRNSDKLIARKKDWDPKKYGGFDSPTVAYSVLVVAKVEKGKSKKLKSVKELLGITIMERSSFEKNPIDFLEAKGYKEVKKDLIIKLPKYSLFELENGRKRMLASAGELQKGNELALPSKYVNFLYLASHYEKLKGSPEDNEQKQLFVEQHKHYLDEIIEQISEFSKRVILADANLDKVLSAYNKHRDKPIREQAENIIHLFTLTNLGAPAAFKYFDTTIDRKRYTSTKEVLDATLIHQSITGLYETRIDLSQLGGDGGGSSGSSGSSGSSGGTLQLDDEYRLYSPLVKPDQNIQFWLEQFPQAWAETAGMGLAKQVPPQVIQLKASATPVSVRQYPLSKEAQEGIRPHVQRLIQQGILVPVQSPWNTPLLPVRKPGTNDYRPVQDLREVNKRVQDIHPTVPNPYNLLCALPPQRSWYTVLDLKDAFFCLRLHPTSQPLFAFEWRDPGTGRTGQLTWTRLPQGFKNSPTIFNEALHRDLANFRIQHPQVTLLQYVDDLLLAGATKQDCLEGTKALLLELSDLGYRASAKKAQICRREVTYLGYSLRDGQRWLTEARKKTVVQIPAPTTAKQVREFLGTAGFCRLWIPGFATLAAPLYPLTKPKGEFSWAPEHQKAFDAIKKALLSAPALALPDVTKPFTLYVDERKGVARGVLTQTLGPWRRPVAYLSKKLDPVASGWPVCLKAIAAVAILVKDADKLTLGQNITVIAPHALENIVRQPPDRWMTNARMTHYQSLLLTERVTFAPPAALNPATLLPEETDEPVTHDCHQLLIEETGVRKDLTDIPLTGEVLTWFTDGSSYVVEGKRMAGAAVVDGTRTIWASSLPEGTSAQKAELMALTQALRLAEGKSINIYTDSRYAFATAHVHGAIYKQRGWLTSAGREIKNKEEILSLLEALHLPKRLAIIHCPGHQKAKDPISRGNQMADRVAKQAAQGVNLLAGKRTADGSEFEKRTADGSEFESPKKKAKVE

SEQ ID NO: 358 - protein, 2090 aa, synthetic construct
MPAAKRVKLDGGDKKYSIGLDIGTNSVGWAVITDEYKVPSKKFKVLGNTDRHSIKKNLIGALLFDSGETAEATRLKRTARRRYTRRKNRICYLQEIFSNEMAKVDDSFFHRLEESFLVEEDKKHERHPIFGNIVDEVAYHEKYPTIYHLRKKLVDSTDKADLRLIYLALAHMIKFRGHFLIEGDLNPDNSDVDKLFIQLVQTYNQLFEENPINASGVDAKAILSARLSKSRRLENLIAQLPGEKKNGLFGNLIALSLGLTPNFKSNFDLAEDAKLQLSKDTYDDDLDNLLAQIGDQYADLFLAAKNLSDAILLSDILRVNTEITKAPLSASMIKRYDEHHQDLTLLKALVRQQLPEKYKEIFFDQSKNGYAGYIDGGASQEEFYKFIKPILEKMDGTEELLVKLNREDLLRKQRTFDNGSIPHQIHLGELHAILRRQEDFYPFLKDNREKIEKILTFRIPYYVGPLARGNSRFAWMTRKSEETITPWNFEEVVDKGASAQSFIERMTNFDKNLPNEKVLPKHSLLYEYFTVYNELTKVKYVTEGMRKPAFLSGEQKKAIVDLLFKTNRKVTVKQLKEDYFKKIECFDSVEISGVEDRFNASLGTYHDLLKIIKDKDFLDNEENEDILEDIVLTLTLFEDREMIEERLKTYAHLFDDKVMKQLKRRRYTGWGRLSRKLINGIRDKQSGKTILDFLKSDGFANRNFMQLIHDDSLTFKEDIQKAQVSGQGDSLHEHIANLAGSPAIKKGILQTVKVVDELVKVMGRHKPENIVIEMARENQTTQKGQKNSRERMKRIEEGIKELGSQILKEHPVENTQLQNEKLYLYYLQNGRDMYVDQELDINRLSDYDVDHIVPQSFLKDDSIDNKVLTRSDKARGKSDNVPSEEVVKKMKNYWRQLLNAKLITQRKFDNLTKAERGGLSELDKAGFIKRQLVETRQITKHVAQILDSRMNTKYDENDKLIREVKVITLKSKLVSDFRKDFQFYKVREINNYHHAHDAYLNAVVGTALIKKYPKLESEFVYGDYKVYDVRKMIAKSEQEIGKATAKYFFYSNIMNFFKTEITLANGEIRKRPLIETNGETGEIVWDKGRDFATVRKVLSMPQVNIVKKTEVQTGGFSKESILPKRNSDKLIARKKDWDPKKYGGFDSPTVAYSVLVVAKVEKGKSKKLKSVKELLGITIMERSSFEKNPIDFLEAKGYKEVKKDLIIKLPKYSLFELENGRKRMLASAGELQKGNELALPSKYVNFLYLASHYEKLKGSPEDNEQKQLFVEQHKHYLDEIIEQISEFSKRVILADANLDKVLSAYNKHRDKPIREQAENIIHLFTLTNLGAPAAFKYFDTTIDRKRYTSTKEVLDATLIHQSITGLYETRIDLSQLGGDGGEAAAKPAPGGGGGTLQLDDEYRLYSPLVKPDQNIQFWLEQFPQAWAETAGMGLAKQVPPQVIQLKASATPVSVRQYPLSKEAQEGIRPHVQRLIQQGILVPVQSPWNTPLLPVRKPGTNDYRPVQDLREVNKRVQDIHPTVPNPYNLLCALPPQRSWYTVLDLKDAFFCLRLHPTSQPLFAFEWRDPGTGRTGQLTWTRLPQGFKNSPTIFNEALHRDLANFRIQHPQVTLLQYVDDLLLAGATKQDCLEGTKALLLELSDLGYRASAKKAQICRREVTYLGYSLRDGQRWLTEARKKTVVQIPAPTTAKQVREFLGTAGFCRLWIPGFATLAAPLYPLTKPKGEFSWAPEHQKAFDAIKKALLSAPALALPDVTKPFTLYVDERKGVARGVLTQTLGPWRRPVAYLSKKLDPVASGWPVCLKAIAAVAILVKDADKLTLGQNITVIAPHALENIVRQPPDRWMTNARMTHYQSLLLTERVTFAPPAALNPATLLPEETDEPVTHDCHQLLIEETGVRKDLTDIPLTGEVLTWFTDGSSYVVEGKRMAGAAVVDGTRTIWASSLPEGTSAQKAELMALTQALRLAEGKSINIYTDSRYAFATAHVHGAIYKQRGWLTSAGREIKNKEEILSLLEALHLPKRLAIIHCPGHQKAKDPISRGNQMADRVAKQAAQGVNLLAGKRTADGSEFEKRTADGSEFESPKKKAKVE

SEQ ID NO: 359 - protein, 2088 aa, synthetic construct; identical to SEQ ID NO: 175

SEQ ID NO: 360 - protein, 2087 aa, synthetic construct
MPAAKRVKLDGGDKKYSIGLDIGTNSVGWAVITDEYKVPSKKFKVLGNTDRHSIKKNLIGALLFDSGETAEATRLKRTARRRYTRRKNRICYLQEIFSNEMAKVDDSFFHRLEESFLVEEDKKHERHPIFGNIVDEVAYHEKYPTIYHLRKKLVDSTDKADLRLIYLALAHMIKFRGHFLIEGDLNPDNSDVDKLFIQLVQTYNQLFEENPINASGVDAKAILSARLSKSRRLENLIAQLPGEKKNGLFGNLIALSLGLTPNFKSNFDLAEDAKLQLSKDTYDDDLDNLLAQIGDQYADLFLAAKNLSDAILLSDILRVNTEITKAPLSASMIKRYDEHHQDLTLLKALVRQQLPEKYKEIFFDQSKNGYAGYIDGGASQEEFYKFIKPILEKMDGTEELLVKLNREDLLRKQRTFDNGSIPHQIHLGELHAILRRQEDFYPFLKDNREKIEKILTFRIPYYVGPLARGNSRFAWMTRKSEETITPWNFEEVVDKGASAQSFIERMTNFDKNLPNEKVLPKHSLLYEYFTVYNELTKVKYVTEGMRKPAFLSGEQKKAIVDLLFKTNRKVTVKQLKEDYFKKIECFDSVEISGVEDRFNASLGTYHDLLKIIKDKDFLDNEENEDILEDIVLTLTLFEDREMIEERLKTYAHLFDDKVMKQLKRRRYTGWGRLSRKLINGIRDKQSGKTILDFLKSDGFANRNFMQLIHDDSLTFKEDIQKAQVSGQGDSLHEHIANLAGSPAIKKGILQTVKVVDELVKVMGRHKPENIVIEMARENQTTQKGQKNSRERMKRIEEGIKELGSQILKEHPVENTQLQNEKLYLYYLQNGRDMYVDQELDINRLSDYDVDHIVPQSFLKDDSIDNKVLTRSDKARGKSDNVPSEEVVKKMKNYWRQLLNAKLITQRKFDNLTKAERGGLSELDKAGFIKRQLVETRQITKHVAQILDSRMNTKYDENDKLIREVKVITLKSKLVSDFRKDFQFYKVREINNYHHAHDAYLNAVVGTALIKKYPKLESEFVYGDYKVYDVRKMIAKSEQEIGKATAKYFFYSNIMNFFKTEITLANGEIRKRPLIETNGETGEIVWDKGRDFATVRKVLSMPQVNIVKKTEVQTGGFSKESILPKRNSDKLIARKKDWDPKKYGGFDSPTVAYSVLVVAKVEKGKSKKLKSVKELLGITIMERSSFEKNPIDFLEAKGYKEVKKDLIIKLPKYSLFELENGRKRMLASAGELQKGNELALPSKYVNFLYLASHYEKLKGSPEDNEQKQLFVEQHKHYLDEIIEQISEFSKRVILADANLDKVLSAYNKHRDKPIREQAENIIHLFTLTNLGAPAAFKYFDTTIDRKRYTSTKEVLDATLIHQSITGLYETRIDLSQLGGDGGEAAAKGSSGGTLQLDDEYRLYSPLVKPDQNIQFWLEQFPQAWAETAGMGLAKQVPPQVIQLKASATPVSVRQYPLSKEAQEGIRPHVQRLIQQGILVPVQSPWNTPLLPVRKPGTNDYRPVQDLREVNKRVQDIHPTVPNPYNLLCALPPQRSWYTVLDLKDAFFCLRLHPTSQPLFAFEWRDPGTGRTGQLTWTRLPQGFKNSPTIFNEALHRDLANFRIQHPQVTLLQYVDDLLLAGATKQDCLEGTKALLLELSDLGYRASAKKAQICRREVTYLGYSLRDGQRWLTEARKKTVVQIPAPTTAKQVREFLGTAGFCRLWIPGFATLAAPLYPLTKPKGEFSWAPEHQKAFDAIKKALLSAPALALPDVTKPFTLYVDERKGVARGVLTQTLGPWRRPVAYLSKKLDPVASGWPVCLKAIAAVAILVKDADKLTLGQNITVIAPHALENIVRQPPDRWMTNARMTHYQSLLLTERVTFAPPAALNPATLLPEETDEPVTHDCHQLLIEETGVRKDLTDIPLTGEVLTWFTDGSSYVVEGKRMAGAAVVDGTRTIWASSLPEGTSAQKAELMALTQALRLAEGKSINIYTDSRYAFATAHVHGAIYKQRGWLTSAGREIKNKEEILSLLEALHLPKRLAIIHCPGHQKAKDPISRGNQMADRVAKQAAQGVNLLAGKRTADGSEFEKRTADGSEFESPKKKAKVE

SEQ ID NO: 361 - protein, 2090 aa, synthetic construct
MPAAKRVKLDGGDKKYSIGLDIGTNSVGWAVITDEYKVPSKKFKVLGNTDRHSIKKNLIGALLFDSGETAEATRLKRTARRRYTRRKNRICYLQEIFSNEMAKVDDSFFHRLEESFLVEEDKKHERHPIFGNIVDEVAYHEKYPTIYHLRKKLVDSTDKADLRLIYLALAHMIKFRGHFLIEGDLNPDNSDVDKLFIQLVQTYNQLFEENPINASGVDAKAILSARLSKSRRLENLIAQLPGEKKNGLFGNLIALSLGLTPNFKSNFDLAEDAKLQLSKDTYDDDLDNLLAQIGDQYADLFLAAKNLSDAILLSDILRVNTEITKAPLSASMIKRYDEHHQDLTLLKALVRQQLPEKYKEIFFDQSKNGYAGYIDGGASQEEFYKFIKPILEKMDGTEELLVKLNREDLLRKQRTFDNGSIPHQIHLGELHAILRRQEDFYPFLKDNREKIEKILTFRIPYYVGPLARGNSRFAWMTRKSEETITPWNFEEVVDKGASAQSFIERMTNFDKNLPNEKVLPKHSLLYEYFTVYNELTKVKYVTEGMRKPAFLSGEQKKAIVDLLFKTNRKVTVKQLKEDYFKKIECFDSVEISGVEDRFNASLGTYHDLLKIIKDKDFLDNEENEDILEDIVLTLTLFEDREMIEERLKTYAHLFDDKVMKQLKRRRYTGWGRLSRKLINGIRDKQSGKTILDFLKSDGFANRNFMQLIHDDSLTFKEDIQKAQVSGQGDSLHEHIANLAGSPAIKKGILQTVKVVDELVKVMGRHKPENIVIEMARENQTTQKGQKNSRERMKRIEEGIKELGSQILKEHPVENTQLQNEKLYLYYLQNGRDMYVDQELDINRLSDYDVDHIVPQSFLKDDSIDNKVLTRSDKARGKSDNVPSEEVVKKMKNYWRQLLNAKLITQRKFDNLTKAERGGLSELDKAGFIKRQLVETRQITKHVAQILDSRMNTKYDENDKLIREVKVITLKSKLVSDFRKDFQFYKVREINNYHHAHDAYLNAVVGTALIKKYPKLESEFVYGDYKVYDVRKMIAKSEQEIGKATAKYFFYSNIMNFFKTEITLANGEIRKRPLIETNGETGEIVWDKGRDFATVRKVLSMPQVNIVKKTEVQTGGFSKESILPKRNSDKLIARKKDWDPKKYGGFDSPTVAYSVLVVAKVEKGKSKKLKSVKELLGITIMERSSFEKNPIDFLEAKGYKEVKKDLIIKLPKYSLFELENGRKRMLASAGELQKGNELALPSKYVNFLYLASHYEKLKGSPEDNEQKQLFVEQHKHYLDEIIEQISEFSKRVILADANLDKVLSAYNKHRDKPIREQAENIIHLFTLTNLGAPAAFKYFDTTIDRKRYTSTKEVLDATLIHQSITGLYETRIDLSQLGGDGGGSSEAAAKGGSGGTLQLDDEYRLYSPLVKPDQNIQFWLEQFPQAWAETAGMGLAKQVPPQVIQLKASATPVSVRQYPLSKEAQEGIRPHVQRLIQQGILVPVQSPWNTPLLPVRKPGTNDYRPVQDLREVNKRVQDIHPTVPNPYNLLCALPPQRSWYTVLDLKDAFFCLRLHPTSQPLFAFEWRDPGTGRTGQLTWTRLPQGFKNSPTIFNEALHRDLANFRIQHPQVTLLQYVDDLLLAGATKQDCLEGTKALLLELSDLGYRASAKKAQICRREVTYLGYSLRDGQRWLTEARKKTVVQIPAPTTAKQVREFLGTAGFCRLWIPGFATLAAPLYPLTKPKGEFSWAPEHQKAFDAIKKALLSAPALALPDVTKPFTLYVDERKGVARGVLTQTLGPWRRPVAYLSKKLDPVASGWPVCLKAIAAVAILVKDADKLTLGQNITVIAPHALENIVRQPPDRWMTNARMTHYQSLLLTERVTFAPPAALNPATLLPEETDEPVTHDCHQLLIEETGVRKDLTDIPLTGEVLTWFTDGSSYVVEGKRMAGAAVVDGTRTIWASSLPEGTSAQKAELMALTQALRLAEGKSINIYTDSRYAFATAHVHGAIYKQRGWLTSAGREIKNKEEILSLLEALHLPKRLAIIHCPGHQKAKDPISRGNQMADRVAKQAAQGVNLLAGKRTADGSEFEKRTADGSEFESPKKKAKVE

SEQ ID NO: 362 - protein, 2087 aa, synthetic construct; identical to SEQ ID NO: 114

SEQ ID NO: 363 - protein, 2090 aa, synthetic construct; identical to SEQ ID NO: 139

SEQ ID NO: 364 - protein, 2088 aa, synthetic construct; identical to SEQ ID NO: 181

SEQ ID NO: 365 - protein, 2090 aa, synthetic construct; identical to SEQ ID NO: 133

SEQ ID NO: 366 - protein, 2084 aa, synthetic construct; identical to SEQ ID NO: 163

SEQ ID NO: 367 - protein, 2084 aa, synthetic construct; identical to SEQ ID NO: 166

SEQ ID NO: 368 - protein, 2090 aa, synthetic construct; identical to SEQ ID NO: 170

SEQ ID NO: 369 - protein, 2085 aa, synthetic construct; identical to SEQ ID NO: 165

SEQ ID NO: 370 - protein, 2091 aa, synthetic construct; identical to SEQ ID NO: 153

SEQ ID NO: 371 - protein, 2088 aa, synthetic construct
MPAAKRVKLDGGDKKYSIGLDIGTNSVGWAVITDEYKVPSKKFKVLGNTDRHSIKKNLIGALLFDSGETAEATRLKRTARRRYTRRKNRICYLQEIFSNEMAKVDDSFFHRLEESFLVEEDKKHERHPIFGNIVDEVAYHEKYPTIYHLRKKLVDSTDKADLRLIYLALAHMIKFRGHFLIEGDLNPDNSDVDKLFIQLVQTYNQLFEENPINASGVDAKAILSARLSKSRRLENLIAQLPGEKKNGLFGNLIALSLGLTPNFKSNFDLAEDAKLQLSKDTYDDDLDNLLAQIGDQYADLFLAAKNLSDAILLSDILRVNTEITKAPLSASMIKRYDEHHQDLTLLKALVRQQLPEKYKEIFFDQSKNGYAGYIDGGASQEEFYKFIKPILEKMDGTEELLVKLNREDLLRKQRTFDNGSIPHQIHLGELHAILRRQEDFYPFLKDNREKIEKILTFRIPYYVGPLARGNSRFAWMTRKSEETITPWNFEEVVDKGASAQSFIERMTNFDKNLPNEKVLPKHSLLYEYFTVYNELTKVKYVTEGMRKPAFLSGEQKKAIVDLLFKTNRKVTVKQLKEDYFKKIECFDSVEISGVEDRFNASLGTYHDLLKIIKDKDFLDNEENEDILEDIVLTLTLFEDREMIEERLKTYAHLFDDKVMKQLKRRRYTGWGRLSRKLINGIRDKQSGKTILDFLKSDGFANRNFMQLIHDDSLTFKEDIQKAQVSGQGDSLHEHIANLAGSPAIKKGILQTVKVVDELVKVMGRHKPENIVIEMARENQTTQKGQKNSRERMKRIEEGIKELGSQILKEHPVENTQLQNEKLYLYYLQNGRDMYVDQELDINRLSDYDVDHIVPQSFLKDDSIDNKVLTRSDKARGKSDNVPSEEVVKKMKNYWRQLLNAKLITQRKFDNLTKAERGGLSELDKAGFIKRQLVETRQITKHVAQILDSRMNTKYDENDKLIREVKVITLKSKLVSDFRKDFQFYKVREINNYHHAHDAYLNAVVGTALIKKYPKLESEFVYGDYKVYDVRKMIAKSEQEIGKATAKYFFYSNIMNFFKTEITLANGEIRKRPLIETNGETGEIVWDKGRDFATVRKVLSMPQVNIVKKTEVQTGGFSKESILPKRNSDKLIARKKDWDPKKYGGFDSPTVAYSVLVVAKVEKGKSKKLKSVKELLGITIMERSSFEKNPIDFLEAKGYKEVKKDLIIKLPKYSLFELENGRKRMLASAGELQKGNELALPSKYVNFLYLASHYEKLKGSPEDNEQKQLFVEQHKHYLDEIIEQISEFSKRVILADANLDKVLSAYNKHRDKPIREQAENIIHLFTLTNLGAPAAFKYFDTTIDRKRYTSTKEVLDATLIHQSITGLYETRIDLSQLGGDGGPAPGGGGSSGGTLQLDDEYRLYSPLVKPDQNIQFWLEQFPQAWAETAGMGLAKQVPPQVIQLKASATPVSVRQYPLSKEAQEGIRPHVQRLIQQGILVPVQSPWNTPLLPVRKPGTNDYRPVQDLREVNKRVQDIHPTVPNPYNLLCALPPQRSWYTVLDLKDAFFCLRLHPTSQPLFAFEWRDPGTGRTGQLTWTRLPQGFKNSPTIFNEALHRDLANFRIQHPQVTLLQYVDDLLLAGATKQDCLEGTKALLLELSDLGYRASAKKAQICRREVTYLGYSLRDGQRWLTEARKKTVVQIPAPTTAKQVREFLGTAGFCRLWIPGFATLAAPLYPLTKPKGEFSWAPEHQKAFDAIKKALLSAPALALPDVTKPFTLYVDERKGVARGVLTQTLGPWRRPVAYLSKKLDPVASGWPVCLKAIAAVAILVKDADKLTLGQNITVIAPHALENIVRQPPDRWMTNARMTHYQSLLLTERVTFAPPAALNPATLLPEETDEPVTHDCHQLLIEETGVRKDLTDIPLTGEVLTWFTDGSSYVVEGKRMAGAAVVDGTRTIWASSLPEGTSAQKAELMALTQALRLAEGKSINIYTDSRYAFATAHVHGAIYKQRGWLTSAGREIKNKEEILSLLEALHLPKRLAIIHCPGHQKAKDPISRGNQMADRVAKQAAQGVNLLAGKRTADGSEFEKRTADGSEFESPKKKAKVE

SEQ ID NO: 372 - protein, 2090 aa, synthetic construct; identical to SEQ ID NO: 172

SEQ ID NO: 373 - protein, 2088 aa, synthetic construct
MPAAKRVKLDGGDKKYSIGLDIGTNSVGWAVITDEYKVPSKKFKVLGNTDRHSIKKNLIGALLFDSGETAEATRLKRTARRRYTRRKNRICYLQEIFSNEMAKVDDSFFHRLEESFLVEEDKKHERHPIFGNIVDEVAYHEKYPTIYHLRKKLVDSTDKADLRLIYLALAHMIKFRGHFLIEGDLNPDNSDVDKLFIQLVQTYNQLFEENPINASGVDAKAILSARLSKSRRLENLIAQLPGEKKNGLFGNLIALSLGLTPNFKSNFDLAEDAKLQLSKDTYDDDLDNLLAQIGDQYADLFLAAKNLSDAILLSDILRVNTEITKAPLSASMIKRYDEHHQDLTLLKALVRQQLPEKYKEIFFDQSKNGYAGYIDGGASQEEFYKFIKPILEKMDGTEELLVKLNREDLLRKQRTFDNGSIPHQIHLGELHAILRRQEDFYPFLKDNREKIEKILTFRIPYYVGPLARGNSRFAWMTRKSEETITPWNFEEVVDKGASAQSFIERMTNFDKNLPNEKVLPKHSLLYEYFTVYNELTKVKYVTEGMRKPAFLSGEQKKAIVDLLFKTNRKVTVKQLKEDYFKKIECFDSVEISGVEDRFNASLGTYHDLLKIIKDKDFLDNEENEDILEDIVLTLTLFEDREMIEERLKTYAHLFDDKVMKQLKRRRYTGWGRLSRKLINGIRDKQSGKTILDFLKSDGFANRNFMQLIHDDSLTFKEDIQKAQVSGQGDSLHEHIANLAGSPAIKKGILQTVKVVDELVKVMGRHKPENIVIEMARENQTTQKGQKNSRERMKRIEEGIKELGSQILKEHPVENTQLQNEKLYLYYLQNGRDMYVDQELDINRLSDYDVDHIVPQSFLKDDSIDNKVLTRSDKARGKSDNVPSEEVVKKMKNYWRQLLNAKLITQRKFDNLTKAERGGLSELDKAGFIKRQLVETRQITKHVAQILDSRMNTKYDENDKLIREVKVITLKSKLVSDFRKDFQFYKVREINNYHHAHDAYLNAVVGTALIKKYPKLESEFVYGDYKVYDVRKMIAKSEQEIGKATAKYFFYSNIMNFFKTEITLANGEIRKRPLIETNGETGEIVWDKGRDFATVRKVLSMPQVNIVKKTEVQTGGFSKESILPKRNSDKLIARKKDWDPKKYGGFDSPTVAYSVLVVAKVEKGKSKKLKSVKELLGITIMERSSFEKNPIDFLEAKGYKEVKKDLIIKLPKYSLFELENGRKRMLASAGELQKGNELALPSKYVNFLYLASHYEKLKGSPEDNEQKQLFVEQHKHYLDEIIEQISEFSKRVILADANLDKVLSAYNKHRDKPIREQAENIIHLFTLTNLGAPAAFKYFDTTIDRKRYTSTKEVLDATLIHQSITGLYETRIDLSQLGGDGGGGSGGGPAPGGTLQLDDEYRLYSPLVKPDQNIQFWLEQFPQAWAETAGMGLAKQVPPQVIQLKASATPVSVRQYPLSKEAQEGIRPHVQRLIQQGILVPVQSPWNTPLLPVRKPGTNDYRPVQDLREVNKRVQDIHPTVPNPYNLLCALPPQRSWYTVLDLKDAFFCLRLHPTSQPLFAFEWRDPGTGRTGQLTWTRLPQGFKNSPTIFNEALHRDLANFRIQHPQVTLLQYVDDLLLAGATKQDCLEGTKALLLELSDLGYRASAKKAQICRREVTYLGYSLRDGQRWLTEARKKTVVQIPAPTTAKQVREFLGTAGFCRLWIPGFATLAAPLYPLTKPKGEFSWAPEHQKAFDAIKKALLSAPALALPDVTKPFTLYVDERKGVARGVLTQTLGPWRRPVAYLSKKLDPVASGWPVCLKAIAAVAILVKDADKLTLGQNITVIAPHALENIVRQPPDRWMTNARMTHYQSLLLTERVTFAPPAALNPATLLPEETDEPVTHDCHQLLIEETGVRKDLTDIPLTGEVLTWFTDGSSYVVEGKRMAGAAVVDGTRTIWASSLPEGTSAQKAELMALTQALRLAEGKSINIYTDSRYAFATAHVHGAIYKQRGWLTSAGREIKNKEEILSLLEALHLPKRLAIIHCPGHQKAKDPISRGNQMADRVAKQAAQGVNLLAGKRTADGSEFEKRTADGSEFESPKKKAKVE

SEQ ID NO: 374 - protein, 2094 aa, synthetic construct; identical to SEQ ID NO: 118

SEQ ID NO: 375 - protein, 2087 aa, synthetic construct
MPAAKRVKLDGGDKKYSIGLDIGTNSVGWAVITDEYKVPSKKFKVLGNTDRHSIKKNLIGALLFDSGETAEATRLKRTARRRYTRRKNRICYLQEIFSNEMAKVDDSFFHRLEESFLVEEDKKHERHPIFGNIVDEVAYHEKYPTIYHLRKKLVDSTDKADLRLIYLALAHMIKFRGHFLIEGDLNPDNSDVDKLFIQLVQTYNQLFEENPINASGVDAKAILSARLSKSRRLENLIAQLPGEKKNGLFGNLIALSLGLTPNFKSNFDLAEDAKLQLSKDTYDDDLDNLLAQIGDQYADLFLAAKNLSDAILLSDILRVNTEITKAPLSASMIKRYDEHHQDLTLLKALVRQQLPEKYKEIFFDQSKNGYAGYIDGGASQEEFYKFIKPILEKMDGTEELLVKLNREDLLRKQRTFDNGSIPHQIHLGELHAILRRQEDFYPFLKDNREKIEKILTFRIPYYVGPLARGNSRFAWMTRKSEETITPWNFEEVVDKGASAQSFIERMTNFDKNLPNEKVLPKHSLLYEYFTVYNELTKVKYVTEGMRKPAFLSGEQKKAIVDLLFKTNRKVTVKQLKEDYFKKIECFDSVEISGVEDRFNASLGTYHDLLKIIKDKDFLDNEENEDILEDIVLTLTLFEDREMIEERLKTYAHLFDDKVMKQLKRRRYTGWGRLSRKLINGIRDKQSGKTILDFLKSDGFANRNFMQLIHDDSLTFKEDIQKAQVSGQGDSLHEHIANLAGSPAIKKGILQTVKVVDELVKVMGRHKPENIVIEMARENQTTQKGQKNSRERMKRIEEGIKELGSQILKEHPVENTQLQNEKLYLYYLQNGRDMYVDQELDINRLSDYDVDHIVPQSFLKDDSIDNKVLTRSDKARGKSDNVPSEEVVKKMKNYWRQLLNAKLITQRKFDNLTKAERGGLSELDKAGFIKRQLVETRQITKHVAQILDSRMNTKYDENDKLIREVKVITLKSKLVSDFRKDFQFYKVREINNYHHAHDAYLNAVVGTALIKKYPKLESEFVYGDYKVYDVRKMIAKSEQEIGKATAKYFFYSNIMNFFKTEITLANGEIRKRPLIETNGETGEIVWDKGRDFATVRKVLSMPQVNIVKKTEVQTGGFSKESILPKRNSDKLIARKKDWDPKKYGGFDSPTVAYSVLVVAKVEKGKSKKLKSVKELLGITIMERSSFEKNPIDFLEAKGYKEVKKDLIIKLPKYSLFELENGRKRMLASAGELQKGNELALPSKYVNFLYLASHYEKLKGSPEDNEQKQLFVEQHKHYLDEIIEQISEFSKRVILADANLDKVLSAYNKHRDKPIREQAENIIHLFTLTNLGAPAAFKYFDTTIDRKRYTSTKEVLDATLIHQSITGLYETRIDLSQLGGDGGPAPEAAAKGGTLQLDDEYRLYSPLVKPDQNIQFWLEQFPQAWAETAGMGLAKQVPPQVIQLKASATPVSVRQYPLSKEAQEGIRPHVQRLIQQGILVPVQSPWNTPLLPVRKPGTNDYRPVQDLREVNKRVQDIHPTVPNPYNLLCALPPQRSWYTVLDLKDAFFCLRLHPTSQPLFAFEWRDPGTGRTGQLTWTRLPQGFKNSPTIFNEALHRDLANFRIQHPQVTLLQYVDDLLLAGATKQDCLEGTKALLLELSDLGYRASAKKAQICRREVTYLGYSLRDGQRWLTEARKKTVVQIPAPTTAKQVREFLGTAGFCRLWIPGFATLAAPLYPLTKPKGEFSWAPEHQKAFDAIKKALLSAPALALPDVTKPFTLYVDERKGVARGVLTQTLGPWRRPVAYLSKKLDPVASGWPVCLKAIAAVAILVKDADKLTLGQNITVIAPHALENIVRQPPDRWMTNARMTHYQSLLLTERVTFAPPAALNPATLLPEETDEPVTHDCHQLLIEETGVRKDLTDIPLTGEVLTWFTDGSSYVVEGKRMAGAAVVDGTRTIWASSLPEGTSAQKAELMALTQALRLAEGKSINIYTDSRYAFATAHVHGAIYKQRGWLTSAGREIKNKEEILSLLEALHLPKRLAIIHCPGHQKAKDPISRGNQMADRVAKQAAQGVNLLAGKRTADGSEFEKRTADGSEFESPKKKAKVE

SEQ ID NO: 376 - protein, 2090 aa, synthetic construct; identical to SEQ ID NO: 154

SEQ ID NO: 377 - protein, 2091 aa, synthetic construct; identical to SEQ ID NO: 145

SEQ ID NO: 378 - protein, 2089 aa, synthetic construct
MPAAKRVKLDGGDKKYSIGLDIGTNSVGWAVITDEYKVPSKKFKVLGNTDRHSIKKNLIGALLFDSGETAEATRLKRTARRRYTRRKNRICYLQEIFSNEMAKVDDSFFHRLEESFLVEEDKKHERHPIFGNIVDEVAYHEKYPTIYHLRKKLVDSTDKADLRLIYLALAHMIKFRGHFLIEGDLNPDNSDVDKLFIQLVQTYNQLFEENPINASGVDAKAILSARLSKSRRLENLIAQLPGEKKNGLFGNLIALSLGLTPNFKSNFDLAEDAKLQLSKDTYDDDLDNLLAQIGDQYADLFLAAKNLSDAILLSDILRVNTEITKAPLSASMIKRYDEHHQDLTLLKALVRQQLPEKYKEIFFDQSKNGYAGYIDGGASQEEFYKFIKPILEKMDGTEELLVKLNREDLLRKQRTFDNGSIPHQIHLGELHAILRRQEDFYPFLKDNREKIEKILTFRIPYYVGPLARGNSRFAWMTRKSEETITPWNFEEVVDKGASAQSFIERMTNFDKNLPNEKVLPKHSLLYEYFTVYNELTKVKYVTEGMRKPAFLSGEQKKAIVDLLFKTNRKVTVKQLKEDYFKKIECFDSVEISGVEDRFNASLGTYHDLLKIIKDKDFLDNEENEDILEDIVLTLTLFEDREMIEERLKTYAHLFDDKVMKQLKRRRYTGWGRLSRKLINGIRDKQSGKTILDFLKSDGFANRNFMQLIHDDSLTFKEDIQKAQVSGQGDSLHEHIANLAGSPAIKKGILQTVKVVDELVKVMGRHKPENIVIEMARENQTTQKGQKNSRERMKRIEEGIKELGSQILKEHPVENTQLQNEKLYLYYLQNGRDMYVDQELDINRLSDYDVDHIVPQSFLKDDSIDNKVLTRSDKARGKSDNVPSEEVVKKMKNYWRQLLNAKLITQRKFDNLTKAERGGLSELDKAGFIKRQLVETRQITKHVAQILDSRMNTKYDENDKLIREVKVITLKSKLVSDFRKDFQFYKVREINNYHHAHDAYLNAVVGTALIKKYPKLESEFVYGDYKVYDVRKMIAKSEQEIGKATAKYFFYSNIMNFFKTEITLANGEIRKRPLIETNGETGEIVWDKGRDFATVRKVLSMPQVNIVKKTEVQTGGFSKESILPKRNSDKLIARKKDWDPKKYGGFDSPTVAYSVLVVAKVEKGKSKKLKSVKELLGITIMERSSFEKNPIDFLEAKGYKEVKKDLIIKLPKYSLFELENGRKRMLASAGELQKGNELALPSKYVNFLYLASHYEKLKGSPEDNEQKQLFVEQHKHYLDEIIEQISEFSKRVILADANLDKVLSAYNKHRDKPIREQAENIIHLFTLTNLGAPAAFKYFDTTIDRKRYTSTKEVLDATLIHQSITGLYETRIDLSQLGGDGGGGGGSGGGGSGGTLQLDDEYRLYSPLVKPDQNIQFWLEQFPQAWAETAGMGLAKQVPPQVIQLKASATPVSVRQYPLSKEAQEGIRPHVQRLIQQGILVPVQSPWNTPLLPVRKPGTNDYRPVQDLREVNKRVQDIHPTVPNPYNLLCALPPQRSWYTVLDLKDAFFCLRLHPTSQPLFAFEWRDPGTGRTGQLTWTRLPQGFKNSPTIFNEALHRDLANFRIQHPQVTLLQYVDDLLLAGATKQDCLEGTKALLLELSDLGYRASAKKAQICRREVTYLGYSLRDGQRWLTEARKKTVVQIPAPTTAKQVREFLGTAGFCRLWIPGFATLAAPLYPLTKPKGEFSWAPEHQKAFDAIKKALLSAPALALPDVTKPFTLYVDERKGVARGVLTQTLGPWRRPVAYLSKKLDPVASGWPVCLKAIAAVAILVKDADKLTLGQNITVIAPHALENIVRQPPDRWMTNARMTHYQSLLLTERVTFAPPAALNPATLLPEETDEPVTHDCHQLLIEETGVRKDLTDIPLTGEVLTWFTDGSSYVVEGKRMAGAAVVDGTRTIWASSLPEGTSAQKAELMALTQALRLAEGKSINIYTDSRYAFATAHVHGAIYKQRGWLTSAGREIKNKEEILSLLEALHLPKRLAIIHCPGHQKAKDPISRGNQMADRVAKQAAQGVNLLAGKRTADGSEFEKRTADGSEFESPKKKAKVE

SEQ ID NO: 379 - protein, 2088 aa, synthetic construct
MPAAKRVKLDGGDKKYSIGLDIGTNSVGWAVITDEYKVPSKKFKVLGNTDRHSIKKNLIGALLFDSGETAEATRLKRTARRRYTRRKNRICYLQEIFSNEMAKVDDSFFHRLEESFLVEEDKKHERHPIFGNIVDEVAYHEKYPTIYHLRKKLVDSTDKADLRLIYLALAHMIKFRGHFLIEGDLNPDNSDVDKLFIQLVQTYNQLFEENPINASGVDAKAILSARLSKSRRLENLIAQLPGEKKNGLFGNLIALSLGLTPNFKSNFDLAEDAKLQLSKDTYDDDLDNLLAQIGDQYADLFLAAKNLSDAILLSDILRVNTEITKAPLSASMIKRYDEHHQDLTLLKALVRQQLPEKYKEIFFDQSKNGYAGYIDGGASQEEFYKFIKPILEKMDGTEELLVKLNREDLLRKQRTFDNGSIPHQIHLGELHAILRRQEDFYPFLKDNREKIEKILTFRIPYYVGPLARGNSRFAWMTRKSEETITPWNFEEVVDKGASAQSFIERMTNFDKNLPNEKVLPKHSLLYEYFTVYNELTKVKYVTEGMRKPAFLSGEQKKAIVDLLFKTNRKVTVKQLKEDYFKKIECFDSVEISGVEDRFNASLGTYHDLLKIIKDKDFLDNEENEDILEDIVLTLTLFEDREMIEERLKTYAHLFDDKVMKQLKRRRYTGWGRLSRKLINGIRDKQSGKTILDFLKSDGFANRNFMQLIHDDSLTFKEDIQKAQVSGQGDSLHEHIANLAGSPAIKKGILQTVKVVDELVKVMGRHKPENIVIEMARENQTTQKGQKNSRERMKRIEEGIKELGSQILKEHPVENTQLQNEKLYLYYLQNGRDMYVDQELDINRLSDYDVDHIVPQSFLKDDSIDNKVLTRSDKARGKSDNVPSEEVVKKMKNYWRQLLNAKLITQRKFDNLTKAERGGLSELDKAGFIKRQLVETRQITKHVAQILDSRMNTKYDENDKLIREVKVITLKSKLVSDFRKDFQFYKVREINNYHHAHDAYLNAVVGTALIKKYPKLESEFVYGDYKVYDVRKMIAKSEQEIGKATAKYFFYSNIMNFFKTEITLANGEIRKRPLIETNGETGEIVWDKGRDFATVRKVLSMPQVNIVKKTEVQTGGFSKESILPKRNSDKLIARKKDWDPKKYGGFDSPTVAYSVLVVAKVEKGKSKKLKSVKELLGITIMERSSFEKNPIDFLEAKGYKEVKKDLIIKLPKYSLFELENGRKRMLASAGELQKGNELALPSKYVNFLYLASHYEKLKGSPEDNEQKQLFVEQHKHYLDEIIEQISEFSKRVILADANLDKVLSAYNKHRDKPIREQAENIIHLFTLTNLGAPAAFKYFDTTIDRKRYTSTKEVLDATLIHQSITGLYETRIDLSQLGGDGGGSSPAPGGGGGTLQLDDEYRLYSPLVKPDQNIQFWLEQFPQAWAETAGMGLAKQVPPQVIQLKASATPVSVRQYPLSKEAQEGIRPHVQRLIQQGILVPVQSPWNTPLLPVRKPGTNDYRPVQDLREVNKRVQDIHPTVPNPYNLLCALPPQRSWYTVLDLKDAFFCLRLHPTSQPLFAFEWRDPGTGRTGQLTWTRLPQGFKNSPTIFNEALHRDLANFRIQHPQVTLLQYVDDLLLAGATKQDCLEGTKALLLELSDLGYRASAKKAQICRREVTYLGYSLRDGQRWLTEARKKTVVQIPAPTTAKQVREFLGTAGFCRLWIPGFATLAAPLYPLTKPKGEFSWAPEHQKAFDAIKKALLSAPALALPDVTKPFTLYVDERKGVARGVLTQTLGPWRRPVAYLSKKLDPVASGWPVCLKAIAAVAILVKDADKLTLGQNITVIAPHALENIVRQPPDRWMTNARMTHYQSLLLTERVTFAPPAALNPATLLPEETDEPVTHDCHQLLIEETGVRKDLTDIPLTGEVLTWFTDGSSYVVEGKRMAGAAVVDGTRTIWASSLPEGTSAQKAELMALTQALRLAEGKSINIYTDSRYAFATAHVHGAIYKQRGWLTSAGREIKNKEEILSLLEALHLPKRLAIIHCPGHQKAKDPISRGNQMADRVAKQAAQGVNLLAGKRTADGSEFEKRTADGSEFESPKKKAKVE

SEQ ID NO: 380 - protein, 2087 aa, synthetic construct; identical to SEQ ID NO: 185

SEQ ID NO: 381 - protein, 2086 aa, synthetic construct; identical to SEQ ID NO: 152

SEQ ID NO: 382 - protein, 2088 aa, synthetic construct
MPAAKRVKLDGGDKKYSIGLDIGTNSVGWAVITDEYKVPSKKFKVLGNTDRHSIKKNLIGALLFDSGETAEATRLKRTARRRYTRRKNRICYLQEIFSNEMAKVDDSFFHRLEESFLVEEDKKHERHPIFGNIVDEVAYHEKYPTIYHLRKKLVDSTDKADLRLIYLALAHMIKFRGHFLIEGDLNPDNSDVDKLFIQLVQTYNQLFEENPINASGVDAKAILSARLSKSRRLENLIAQLPGEKKNGLFGNLIALSLGLTPNFKSNFDLAEDAKLQLSKDTYDDDLDNLLAQIGDQYADLFLAAKNLSDAILLSDILRVNTEITKAPLSASMIKRYDEHHQDLTLLKALVRQQLPEKYKEIFFDQSKNGYAGYIDGGASQEEFYKFIKPILEKMDGTEELLVKLNREDLLRKQRTFDNGSIPHQIHLGELHAILRRQEDFYPFLKDNREKIEKILTFRIPYYVGPLARGNSRFAWMTRKSEETITPWNFEEVVDKGASAQSFIERMTNFDKNLPNEKVLPKHSLLYEYFTVYNELTKVKYVTEGMRKPAFLSGEQKKAIVDLLFKTNRKVTVKQLKEDYFKKIECFDSVEISGVEDRFNASLGTYHDLLKIIKDKDFLDNEENEDILEDIVLTLTLFEDREMIEERLKTYAHLFDDKVMKQLKRRRYTGWGRLSRKLINGIRDKQSGKTILDFLKSDGFANRNFMQLIHDDSLTFKEDIQKAQVSGQGDSLHEHIANLAGSPAIKKGILQTVKVVDELVKVMGRHKPENIVIEMARENQTTQKGQKNSRERMKRIEEGIKELGSQILKEHPVENTQLQNEKLYLYYLQNGRDMYVDQELDINRLSDYDVDHIVPQSFLKDDSIDNKVLTRSDKARGKSDNVPSEEVVKKMKNYWRQLLNAKLITQRKFDNLTKAERGGLSELDKAGFIKRQLVETRQITKHVAQILDSRMNTKYDENDKLIREVKVITLKSKLVSDFRKDFQFYKVREINNYHHAHDAYLNAVVGTALIKKYPKLESEFVYGDYKVYDVRKMIAKSEQEIGKATAKYFFYSNIMNFFKTEITLANGEIRKRPLIETNGETGEIVWDKGRDFATVRKVLSMPQVNIVKKTEVQTGGFSKESILPKRNSDKLIARKKDWDPKKYGGFDSPTVAYSVLVVAKVEKGKSKKLKSVKELLGITIMERSSFEKNPIDFLEAKGYKEVKKDLIIKLPKYSLFELENGRKRMLASAGELQKGNELALPSKYVNFLYLASHYEKLKGSPEDNEQKQLFVEQHKHYLDEIIEQISEFSKRVILADANLDKVLSAYNKHRDKPIREQAENIIHLFTLTNLGAPAAFKYFDTTIDRKRYTSTKEVLDATLIHQSITGLYETRIDLSQLGGDGGPAPAPAPAPGGTLQLDDEYRLYSPLVKPDQNIQFWLEQFPQAWAETAGMGLAKQVPPQVIQLKASATPVSVRQYPLSKEAQEGIRPHVQRLIQQGILVPVQSPWNTPLLPVRKPGTNDYRPVQDLREVNKRVQDIHPTVPNPYNLLCALPPQRSWYTVLDLKDAFFCLRLHPTSQPLFAFEWRDPGTGRTGQLTWTRLPQGFKNSPTIFNEALHRDLANFRIQHPQVTLLQYVDDLLLAGATKQDCLEGTKALLLELSDLGYRASAKKAQICRREVTYLGYSLRDGQRWLTEARKKTVVQIPAPTTAKQVREFLGTAGFCRLWIPGFATLAAPLYPLTKPKGEFSWAPEHQKAFDAIKKALLSAPALALPDVTKPFTLYVDERKGVARGVLTQTLGPWRRPVAYLSKKLDPVASGWPVCLKAIAAVAILVKDADKLTLGQNITVIAPHALENIVRQPPDRWMTNARMTHYQSLLLTERVTFAPPAALNPATLLPEETDEPVTHDCHQLLIEETGVRKDLTDIPLTGEVLTWFTDGSSYVVEGKRMAGAAVVDGTRTIWASSLPEGTSAQKAELMALTQALRLAEGKSINIYTDSRYAFATAHVHGAIYKQRGWLTSAGREIKNKEEILSLLEALHLPKRLAIIHCPGHQKAKDPISRGNQMADRVAKQAAQGVNLLAGKRTADGSEFEKRTADGSEFESPKKKAKVE

SEQ ID NO: 383 - protein, 2085 aa, synthetic construct; identical to SEQ ID NO: 178

SEQ ID NO: 384 - protein, 2088 aa, synthetic construct; identical to SEQ ID NO: 144

SEQ ID NO: 385 - protein, 2090 aa, synthetic construct
MPAAKRVKLDGGDKKYSIGLDIGTNSVGWAVITDEYKVPSKKFKVLGNTDRHSIKKNLIGALLFDSGETAEATRLKRTARRRYTRRKNRICYLQEIFSNEMAKVDDSFFHRLEESFLVEEDKKHERHPIFGNIVDEVAYHEKYPTIYHLRKKLVDSTDKADLRLIYLALAHMIKFRGHFLIEGDLNPDNSDVDKLFIQLVQTYNQLFEENPINASGVDAKAILSARLSKSRRLENLIAQLPGEKKNGLFGNLIALSLGLTPNFKSNFDLAEDAKLQLSKDTYDDDLDNLLAQIGDQYADLFLAAKNLSDAILLSDILRVNTEITKAPLSASMIKRYDEHHQDLTLLKALVRQQLPEKYKEIFFDQSKNGYAGYIDGGASQEEFYKFIKPILEKMDGTEELLVKLNREDLLRKQRTFDNGSIPHQIHLGELHAILRRQEDFYPFLKDNREKIEKILTFRIPYYVGPLARGNSRFAWMTRKSEETITPWNFEEVVDKGASAQSFIERMTNFDKNLPNEKVLPKHSLLYEYFTVYNELTKVKYVTEGMRKPAFLSGEQKKAIVDLLFKTNRKVTVKQLKEDYFKKIECFDSVEISGVEDRFNASLGTYHDLLKIIKDKDFLDNEENEDILEDIVLTLTLFEDREMIEERLKTYAHLFDDKVMKQLKRRRYTGWGRLSRKLINGIRDKQSGKTILDFLKSDGFANRNFMQLIHDDSLTFKEDIQKAQVSGQGDSLHEHIANLAGSPAIKKGILQTVKVVDELVKVMGRHKPENIVIEMARENQTTQKGQKNSRERMKRIEEGIKELGSQILKEHPVENTQLQNEKLYLYYLQNGRDMYVDQELDINRLSDYDVDHIVPQSFLKDDSIDNKVLTRSDKARGKSDNVPSEEVVKKMKNYWRQLLNAKLITQRKFDNLTKAERGGLSELDKAGFIKRQLVETRQITKHVAQILDSRMNTKYDENDKLIREVKVITLKSKLVSDFRKDFQFYKVREINNYHHAHDAYLNAVVGTALIKKYPKLESEFVYGDYKVYDVRKMIAKSEQEIGKATAKYFFYSNIMNFFKTEITLANGEIRKRPLIETNGETGEIVWDKGRDFATVRKVLSMPQVNIVKKTEVQTGGFSKESILPKRNSDKLIARKKDWDPKKYGGFDSPTVAYSVLVVAKVEKGKSKKLKSVKELLGITIMERSSFEKNPIDFLEAKGYKEVKKDLIIKLPKYSLFELENGRKRMLASAGELQKGNELALPSKYVNFLYLASHYEKLKGSPEDNEQKQLFVEQHKHYLDEIIEQISEFSKRVILADANLDKVLSAYNKHRDKPIREQAENIIHLFTLTNLGAPAAFKYFDTTIDRKRYTSTKEVLDATLIHQSITGLYETRIDLSQLGGDGGPAPGSSEAAAKGGTLQLDDEYRLYSPLVKPDQNIQFWLEQFPQAWAETAGMGLAKQVPPQVIQLKASATPVSVRQYPLSKEAQEGIRPHVQRLIQQGILVPVQSPWNTPLLPVRKPGTNDYRPVQDLREVNKRVQDIHPTVPNPYNLLCALPPQRSWYTVLDLKDAFFCLRLHPTSQPLFAFEWRDPGTGRTGQLTWTRLPQGFKNSPTIFNEALHRDLANFRIQHPQVTLLQYVDDLLLAGATKQDCLEGTKALLLELSDLGYRASAKKAQICRREVTYLGYSLRDGQRWLTEARKKTVVQIPAPTTAKQVREFLGTAGFCRLWIPGFATLAAPLYPLTKPKGEFSWAPEHQKAFDAIKKALLSAPALALPDVTKPFTLYVDERKGVARGVLTQTLGPWRRPVAYLSKKLDPVASGWPVCLKAIAAVAILVKDADKLTLGQNITVIAPHALENIVRQPPDRWMTNARMTHYQSLLLTERVTFAPPAALNPATLLPEETDEPVTHDCHQLLIEETGVRKDLTDIPLTGEVLTWFTDGSSYVVEGKRMAGAAVVDGTRTIWASSLPEGTSAQKAELMALTQALRLAEGKSINIYTDSRYAFATAHVHGAIYKQRGWLTSAGREIKNKEEILSLLEALHLPKRLAIIHCPGHQKAKDPISRGNQMADRVAKQAAQGVNLLAGKRTADGSEFEKRTADGSEFESPKKKAKVE

SEQ ID NO: 386 - protein, 2085 aa, synthetic construct; identical to SEQ ID NO: 123

SEQ ID NO: 387 - protein, 2088 aa, synthetic construct; identical to SEQ ID NO: 155

SEQ ID NO: 388 - protein, 2088 aa, synthetic construct; identical to SEQ ID NO: 134

SEQ ID NO: 389 - protein, 2088 aa, synthetic construct; identical to SEQ ID NO: 171

SEQ ID NO: 390 - protein, 2090 aa, synthetic construct
MPAAKRVKLDGGDKKYSIGLDIGTNSVGWAVITDEYKVPSKKFKVLGNTDRHSIKKNLIGALLFDSGETAEATRLKRTARRRYTRRKNRICYLQEIFSNEMAKVDDSFFHRLEESFLVEEDKKHERHPIFGNIVDEVAYHEKYPTIYHLRKKLVDSTDKADLRLIYLALAHMIKFRGHFLIEGDLNPDNSDVDKLFIQLVQTYNQLFEENPINASGVDAKAILSARLSKSRRLENLIAQLPGEKKNGLFGNLIALSLGLTPNFKSNFDLAEDAKLQLSKDTYDDDLDNLLAQIGDQYADLFLAAKNLSDAILLSDILRVNTEITKAPLSASMIKRYDEHHQDLTLLKALVRQQLPEKYKEIFFDQSKNGYAGYIDGGASQEEFYKFIKPILEKMDGTEELLVKLNREDLLRKQRTFDNGSIPHQIHLGELHAILRRQEDFYPFLKDNREKIEKILTFRIPYYVGPLARGNSRFAWMTRKSEETITPWNFEEVVDKGASAQSFIERMTNFDKNLPNEKVLPKHSLLYEYFTVYNELTKVKYVTEGMRKPAFLSGEQKKAIVDLLFKTNRKVTVKQLKEDYFKKIECFDSVEISGVEDRFNASLGTYHDLLKIIKDKDFLDNEENEDILEDIVLTLTLFEDREMIEERLKTYAHLFDDKVMKQLKRRRYTGWGRLSRKLINGIRDKQSGKTILDFLKSDGFANRNFMQLIHDDSLTFKEDIQKAQVSGQGDSLHEHIANLAGSPAIKKGILQTVKVVDELVKVMGRHKPENIVIEMARENQTTQKGQKNSRERMKRIEEGIKELGSQILKEHPVENTQLQNEKLYLYYLQNGRDMYVDQELDINRLSDYDVDHIVPQSFLKDDSIDNKVLTRSDKARGKSDNVPSEEVVKKMKNYWRQLLNAKLITQRKFDNLTKAERGGLSELDKAGFIKRQLVETRQITKHVAQILDSRMNTKYDENDKLIREVKVITLKSKLVSDFRKDFQFYKVREINNYHHAHDAYLNAVVGTALIKKYPKLESEFVYGDYKVYDVRKMIAKSEQEIGKATAKYFFYSNIMNFFKTEITLANGEIRKRPLIETNGETGEIVWDKGRDFATVRKVLSMPQVNIVKKTEVQTGGFSKESILPKRNSDKLIARKKDWDPKKYGGFDSPTVAYSVLVVAKVEKGKSKKLKSVKELLGITIMERSSFEKNPIDFLEAKGYKEVKKDLIIKLPKYSLFELENGRKRMLASAGELQKGNELALPSKYVNFLYLASHYEKLKGSPEDNEQKQLFVEQHKHYLDEIIEQISEFSKRVILADANLDKVLSAYNKHRDKPIREQAENIIHLFTLTNLGAPAAFKYFDTTIDRKRYTSTKEVLDATLIHQSITGLYETRIDLSQLGGDGGEAAAKGSSPAPGGTLQLDDEYRLYSPLVKPDQNIQFWLEQFPQAWAETAGMGLAKQVPPQVIQLKASATPVSVRQYPLSKEAQEGIRPHVQRLIQQGILVPVQSPWNTPLLPVRKPGTNDYRPVQDLREVNKRVQDIHPTVPNPYNLLCALPPQRSWYTVLDLKDAFFCLRLHPTSQPLFAFEWRDPGTGRTGQLTWTRLPQGFKNSPTIFNEALHRDLANFRIQHPQVTLLQYVDDLLLAGATKQDCLEGTKALLLELSDLGYRASAKKAQICRREVTYLGYSLRDGQRWLTEARKKTVVQIPAPTTAKQVREFLGTAGFCRLWIPGFATLAAPLYPLTKPKGEFSWAPEHQKAFDAIKKALLSAPALALPDVTKPFTLYVDERKGVARGVLTQTLGPWRRPVAYLSKKLDPVASGWPVCLKAIAAVAILVKDADKLTLGQNITVIAPHALENIVRQPPDRWMTNARMTHYQSLLLTERVTFAPPAALNPATLLPEETDEPVTHDCHQLLIEETGVRKDLTDIPLTGEVLTWFTDGSSYVVEGKRMAGAAVVDGTRTIWASSLPEGTSAQKAELMALTQALRLAEGKSINIYTDSRYAFATAHVHGAIYKQRGWLTSAGREIKNKEEILSLLEALHLPKRLAIIHCPGHQKAKDPISRGNQMADRVAKQAAQGVNLLAGKRTADGSEFEKRTADGSEFESPKKKAKVE

SEQ ID NO: 391 - protein, 2094 aa, synthetic construct; identical to SEQ ID NO: 159

SEQ ID NO: 392 - protein, 2084 aa, synthetic construct; identical to SEQ ID NO: 147

SEQ ID NO: 393 - protein, 2085 aa, synthetic construct; identical to SEQ ID NO: 174

SEQ ID NO: 394 - protein, 2087 aa, synthetic construct
MPAAKRVKLDGGDKKYSIGLDIGTNSVGWAVITDEYKVPSKKFKVLGNTDRHSIKKNLIGALLFDSGETAEATRLKRTARRRYTRRKNRICYLQEIFSNEMAKVDDSFFHRLEESFLVEEDKKHERHPIFGNIVDEVAYHEKYPTIYHLRKKLVDSTDKADLRLIYLALAHMIKFRGHFLIEGDLNPDNSDVDKLFIQLVQTYNQLFEENPINASGVDAKAILSARLSKSRRLENLIAQLPGEKKNGLFGNLIALSLGLTPNFKSNFDLAEDAKLQLSKDTYDDDLDNLLAQIGDQYADLFLAAKNLSDAILLSDILRVNTEITKAPLSASMIKRYDEHHQDLTLLKALVRQQLPEKYKEIFFDQSKNGYAGYIDGGASQEEFYKFIKPILEKMDGTEELLVKLNREDLLRKQRTFDNGSIPHQIHLGELHAILRRQEDFYPFLKDNREKIEKILTFRIPYYVGPLARGNSRFAWMTRKSEETITPWNFEEVVDKGASAQSFIERMTNFDKNLPNEKVLPKHSLLYEYFTVYNELTKVKYVTEGMRKPAFLSGEQKKAIVDLLFKTNRKVTVKQLKEDYFKKIECFDSVEISGVEDRFNASLGTYHDLLKIIKDKDFLDNEENEDILEDIVLTLTLFEDREMIEERLKTYAHLFDDKVMKQLKRRRYTGWGRLSRKLINGIRDKQSGKTILDFLKSDGFANRNFMQLIHDDSLTFKEDIQKAQVSGQGDSLHEHIANLAGSPAIKKGILQTVKVVDELVKVMGRHKPENIVIEMARENQTTQKGQKNSRERMKRIEEGIKELGSQILKEHPVENTQLQNEKLYLYYLQNGRDMYVDQELDINRLSDYDVDHIVPQSFLKDDSIDNKVLTRSDKARGKSDNVPSEEVVKKMKNYWRQLLNAKLITQRKFDNLTKAERGGLSELDKAGFIKRQLVETRQITKHVAQILDSRMNTKYDENDKLIREVKVITLKSKLVSDFRKDFQFYKVREINNYHHAHDAYLNAVVGTALIKKYPKLESEFVYGDYKVYDVRKMIAKSEQEIGKATAKYFFYSNIMNFFKTEITLANGEIRKRPLIETNGETGEIVWDKGRDFATVRKVLSMPQVNIVKKTEVQTGGFSKESILPKRNSDKLIARKKDWDPKKYGGFDSPTVAYSVLVVAKVEKGKSKKLKSVKELLGITIMERSSFEKNPIDFLEAKGYKEVKKDLIIKLPKYSLFELENGRKRMLASAGELQKGNELALPSKYVNFLYLASHYEKLKGSPEDNEQKQLFVEQHKHYLDEIIEQISEFSKRVILADANLDKVLSAYNKHRDKPIREQAENIIHLFTLTNLGAPAAFKYFDTTIDRKRYTSTKEVLDATLIHQSITGLYETRIDLSQLGGDGGGGSEAAAKGGTLQLDDEYRLYSPLVKPDQNIQFWLEQFPQAWAETAGMGLAKQVPPQVIQLKASATPVSVRQYPLSKEAQEGIRPHVQRLIQQGILVPVQSPWNTPLLPVRKPGTNDYRPVQDLREVNKRVQDIHPTVPNPYNLLCALPPQRSWYTVLDLKDAFFCLRLHPTSQPLFAFEWRDPGTGRTGQLTWTRLPQGFKNSPTIFNEALHRDLANFRIQHPQVTLLQYVDDLLLAGATKQDCLEGTKALLLELSDLGYRASAKKAQICRREVTYLGYSLRDGQRWLTEARKKTVVQIPAPTTAKQVREFLGTAGFCRLWIPGFATLAAPLYPLTKPKGEFSWAPEHQKAFDAIKKALLSAPALALPDVTKPFTLYVDERKGVARGVLTQTLGPWRRPVAYLSKKLDPVASGWPVCLKAIAAVAILVKDADKLTLGQNITVIAPHALENIVRQPPDRWMTNARMTHYQSLLLTERVTFAPPAALNPATLLPEETDEPVTHDCHQLLIEETGVRKDLTDIPLTGEVLTWFTDGSSYVVEGKRMAGAAVVDGTRTIWASSLPEGTSAQKAELMALTQALRLAEGKSINIYTDSRYAFATAHVHGAIYKQRGWLTSAGREIKNKEEILSLLEALHLPKRLAIIHCPGHQKAKDPISRGNQMADRVAKQAAQGVNLLAGKRTADGSEFEKRTADGSEFESPKKKAKVE

SEQ ID NO: 395 - protein, 2088 aa, synthetic construct; identical to SEQ ID NO: 180

SEQ ID NO: 396 - protein, 2097 aa, synthetic construct; identical to SEQ ID NO: 113

SEQ ID NO: 397 - protein, 2085 aa, synthetic construct; identical to SEQ ID NO: 184

SEQ ID NO: 398 - protein, 2090 aa, synthetic construct; identical to SEQ ID NO: 119

SEQ ID NO: 399 - protein, 2089 aa, synthetic construct
MPAAKRVKLDGGDKKYSIGLDIGTNSVGWAVITDEYKVPSKKFKVLGNTDRHSIKKNLIGALLFDSGETAEATRLKRTARRRYTRRKNRICYLQEIFSNEMAKVDDSFFHRLEESFLVEEDKKHERHPIFGNIVDEVAYHEKYPTIYHLRKKLVDSTDKADLRLIYLALAHMIKFRGHFLIEGDLNPDNSDVDKLFIQLVQTYNQLFEENPINASGVDAKAILSARLSKSRRLENLIAQLPGEKKNGLFGNLIALSLGLTPNFKSNFDLAEDAKLQLSKDTYDDDLDNLLAQIGDQYADLFLAAKNLSDAILLSDILRVNTEITKAPLSASMIKRYDEHHQDLTLLKALVRQQLPEKYKEIFFDQSKNGYAGYIDGGASQEEFYKFIKPILEKMDGTEELLVKLNREDLLRKQRTFDNGSIPHQIHLGELHAILRRQEDFYPFLKDNREKIEKILTFRIPYYVGPLARGNSRFAWMTRKSEETITPWNFEEVVDKGASAQSFIERMTNFDKNLPNEKVLPKHSLLYEYFTVYNELTKVKYVTEGMRKPAFLSGEQKKAIVDLLFKTNRKVTVKQLKEDYFKKIECFDSVEISGVEDRFNASLGTYHDLLKIIKDKDFLDNEENEDILEDIVLTLTLFEDREMIEERLKTYAHLFDDKVMKQLKRRRYTGWGRLSRKLINGIRDKQSGKTILDFLKSDGFANRNFMQLIHDDSLTFKEDIQKAQVSGQGDSLHEHIANLAGSPAIKKGILQTVKVVDELVKVMGRHKPENIVIEMARENQTTQKGQKNSRERMKRIEEGIKELGSQILKEHPVENTQLQNEKLYLYYLQNGRDMYVDQELDINRLSDYDVDHIVPQSFLKDDSIDNKVLTRSDKARGKSDNVPSEEVVKKMKNYWRQLLNAKLITQRKFDNLTKAERGGLSELDKAGFIKRQLVETRQITKHVAQILDSRMNTKYDENDKLIREVKVITLKSKLVSDFRKDFQFYKVREINNYHHAHDAYLNAVVGTALIKKYPKLESEFVYGDYKVYDVRKMIAKSEQEIGKATAKYFFYSNIMNFFKTEITLANGEIRKRPLIETNGETGEIVWDKGRDFATVRKVLSMPQVNIVKKTEVQTGGFSKESILPKRNSDKLIARKKDWDPKKYGGFDSPTVAYSVLVVAKVEKGKSKKLKSVKELLGITIMERSSFEKNPIDFLEAKGYKEVKKDLIIKLPKYSLFELENGRKRMLASAGELQKGNELALPSKYVNFLYLASHYEKLKGSPEDNEQKQLFVEQHKHYLDEIIEQISEFSKRVILADANLDKVLSAYNKHRDKPIREQAENIIHLFTLTNLGAPAAFKYFDTTIDRKRYTSTKEVLDATLIHQSITGLYETRIDLSQLGGDGGEAAAKEAAAKGGTLQLDDEYRLYSPLVKPDQNIQFWLEQFPQAWAETAGMGLAKQVPPQVIQLKASATPVSVRQYPLSKEAQEGIRPHVQRLIQQGILVPVQSPWNTPLLPVRKPGTNDYRPVQDLREVNKRVQDIHPTVPNPYNLLCALPPQRSWYTVLDLKDAFFCLRLHPTSQPLFAFEWRDPGTGRTGQLTWTRLPQGFKNSPTIFNEALHRDLANFRIQHPQVTLLQYVDDLLLAGATKQDCLEGTKALLLELSDLGYRASAKKAQICRREVTYLGYSLRDGQRWLTEARKKTVVQIPAPTTAKQVREFLGTAGFCRLWIPGFATLAAPLYPLTKPKGEFSWAPEHQKAFDAIKKALLSAPALALPDVTKPFTLYVDERKGVARGVLTQTLGPWRRPVAYLSKKLDPVASGWPVCLKAIAAVAILVKDADKLTLGQNITVIAPHALENIVRQPPDRWMTNARMTHYQSLLLTERVTFAPPAALNPATLLPEETDEPVTHDCHQLLIEETGVRKDLTDIPLTGEVLTWFTDGSSYVVEGKRMAGAAVVDGTRTIWASSLPEGTSAQKAELMALTQALRLAEGKSINIYTDSRYAFATAHVHGAIYKQRGWLTSAGREIKNKEEILSLLEALHLPKRLAIIHCPGHQKAKDPISRGNQMADRVAKQAAQGVNLLAGKRTADGSEFEKRTADGSEFESPKKKAKVE

SEQ ID NO: 400 - protein, 2088 aa, synthetic construct; identical to SEQ ID NO: 129

SEQ ID NO: 401 - protein, 2088 aa, synthetic construct
MPAAKRVKLDGGDKKYSIGLDIGTNSVGWAVITDEYKVPSKKFKVLGNTDRHSIKKNLIGALLFDSGETAEATRLKRTARRRYTRRKNRICYLQEIFSNEMAKVDDSFFHRLEESFLVEEDKKHERHPIFGNIVDEVAYHEKYPTIYHLRKKLVDSTDKADLRLIYLALAHMIKFRGHFLIEGDLNPDNSDVDKLFIQLVQTYNQLFEENPINASGVDAKAILSARLSKSRRLENLIAQLPGEKKNGLFGNLIALSLGLTPNFKSNFDLAEDAKLQLSKDTYDDDLDNLLAQIGDQYADLFLAAKNLSDAILLSDILRVNTEITKAPLSASMIKRYDEHHQDLTLLKALVRQQLPEKYKEIFFDQSKNGYAGYIDGGASQEEFYKFIKPILEKMDGTEELLVKLNREDLLRKQRTFDNGSIPHQIHLGELHAILRRQEDFYPFLKDNREKIEKILTFRIPYYVGPLARGNSRFAWMTRKSEETITPWNFEEVVDKGASAQSFIERMTNFDKNLPNEKVLPKHSLLYEYFTVYNELTKVKYVTEGMRKPAFLSGEQKKAIVDLLFKTNRKVTVKQLKEDYFKKIECFDSVEISGVEDRFNASLGTYHDLLKIIKDKDFLDNEENEDILEDIVLTLTLFEDREMIEERLKTYAHLFDDKVMKQLKRRRYTGWGRLSRKLINGIRDKQSGKTILDFLKSDGFANRNFMQLIHDDSLTFKEDIQKAQVSGQGDSLHEHIANLAGSPAIKKGILQTVKVVDELVKVMGRHKPENIVIEMARENQTTQKGQKNSRERMKRIEEGIKELGSQILKEHPVENTQLQNEKLYLYYLQNGRDMYVDQELDINRLSDYDVDHIVPQSFLKDDSIDNKVLTRSDKARGKSDNVPSEEVVKKMKNYWRQLLNAKLITQRKFDNLTKAERGGLSELDKAGFIKRQLVETRQITKHVAQILDSRMNTKYDENDKLIREVKVITLKSKLVSDFRKDFQFYKVREINNYHHAHDAYLNAVVGTALIKKYPKLESEFVYGDYKVYDVRKMIAKSEQEIGKATAKYFFYSNIMNFFKTEITLANGEIRKRPLIETNGETGEIVWDKGRDFATVRKVLSMPQVNIVKKTEVQTGGFSKESILPKRNSDKLIARKKDWDPKKYGGFDSPTVAYSVLVVAKVEKGKSKKLKSVKELLGITIMERSSFEKNPIDFLEAKGYKEVKKDLIIKLPKYSLFELENGRKRMLASAGELQKGNELALPSKYVNFLYLASHYEKLKGSPEDNEQKQLFVEQHKHYLDEIIEQISEFSKRVILADANLDKVLSAYNKHRDKPIREQAENIIHLFTLTNLGAPAAFKYFDTTIDRKRYTSTKEVLDATLIHQSITGLYETRIDLSQLGGDGGGSSGGSPAPGGTLQLDDEYRLYSPLVKPDQNIQFWLEQFPQAWAETAGMGLAKQVPPQVIQLKASATPVSVRQYPLSKEAQEGIRPHVQRLIQQGILVPVQSPWNTPLLPVRKPGTNDYRPVQDLREVNKRVQDIHPTVPNPYNLLCALPPQRSWYTVLDLKDAFFCLRLHPTSQPLFAFEWRDPGTGRTGQLTWTRLPQGFKNSPTIFNEALHRDLANFRIQHPQVTLLQYVDDLLLAGATKQDCLEGTKALLLELSDLGYRASAKKAQICRREVTYLGYSLRDGQRWLTEARKKTVVQIPAPTTAKQVREFLGTAGFCRLWIPGFATLAAPLYPLTKPKGEFSWAPEHQKAFDAIKKALLSAPALALPDVTKPFTLYVDERKGVARGVLTQTLGPWRRPVAYLSKKLDPVASGWPVCLKAIAAVAILVKDADKLTLGQNITVIAPHALENIVRQPPDRWMTNARMTHYQSLLLTERVTFAPPAALNPATLLPEETDEPVTHDCHQLLIEETGVRKDLTDIPLTGEVLTWFTDGSSYVVEGKRMAGAAVVDGTRTIWASSLPEGTSAQKAELMALTQALRLAEGKSINIYTDSRYAFATAHVHGAIYKQRGWLTSAGREIKNKEEILSLLEALHLPKRLAIIHCPGHQKAKDPISRGNQMADRVAKQAAQGVNLLAGKRTADGSEFEKRTADGSEFESPKKKAKVE

SEQ ID NO: 402 - protein, 2088 aa, synthetic construct
MPAAKRVKLDGGDKKYSIGLDIGTNSVGWAVITDEYKVPSKKFKVLGNTDRHSIKKNLIGALLFDSGETAEATRLKRTARRRYTRRKNRICYLQEIFSNEMAKVDDSFFHRLEESFLVEEDKKHERHPIFGNIVDEVAYHEKYPTIYHLRKKLVDSTDKADLRLIYLALAHMIKFRGHFLIEGDLNPDNSDVDKLFIQLVQTYNQLFEENPINASGVDAKAILSARLSKSRRLENLIAQLPGEKKNGLFGNLIALSLGLTPNFKSNFDLAEDAKLQLSKDTYDDDLDNLLAQIGDQYADLFLAAKNLSDAILLSDILRVNTEITKAPLSASMIKRYDEHHQDLTLLKALVRQQLPEKYKEIFFDQSKNGYAGYIDGGASQEEFYKFIKPILEKMDGTEELLVKLNREDLLRKQRTFDNGSIPHQIHLGELHAILRRQEDFYPFLKDNREKIEKILTFRIPYYVGPLARGNSRFAWMTRKSEETITPWNFEEVVDKGASAQSFIERMTNFDKNLPNEKVLPKHSLLYEYFTVYNELTKVKYVTEGMRKPAFLSGEQKKAIVDLLFKTNRKVTVKQLKEDYFKKIECFDSVEISGVEDRFNASLGTYHDLLKIIKDKDFLDNEENEDILEDIVLTLTLFEDREMIEERLKTYAHLFDDKVMKQLKRRRYTGWGRLSRKLINGIRDKQSGKTILDFLKSDGFANRNFMQLIHDDSLTFKEDIQKAQVSGQGDSLHEHIANLAGSPAIKKGILQTVKVVDELVKVMGRHKPENIVIEMARENQTTQKGQKNSRERMKRIEEGIKELGSQILKEHPVENTQLQNEKLYLYYLQNGRDMYVDQELDINRLSDYDVDHIVPQSFLKDDSIDNKVLTRSDKARGKSDNVPSEEVVKKMKNYWRQLLNAKLITQRKFDNLTKAERGGLSELDKAGFIKRQLVETRQITKHVAQILDSRMNTKYDENDKLIREVKVITLKSKLVSDFRKDFQFYKVREINNYHHAHDAYLNAVVGTALIKKYPKLESEFVYGDYKVYDVRKMIAKSEQEIGKATAKYFFYSNIMNFFKTEITLANGEIRKRPLIETNGETGEIVWDKGRDFATVRKVLSMPQVNIVKKTEVQTGGFSKESILPKRNSDKLIARKKDWDPKKYGGFDSPTVAYSVLVVAKVEKGKSKKLKSVKELLGITIMERSSFEKNPIDFLEAKGYKEVKKDLIIKLPKYSLFELENGRKRMLASAGELQKGNELALPSKYVNFLYLASHYEKLKGSPEDNEQKQLFVEQHKHYLDEIIEQISEFSKRVILADANLDKVLSAYNKHRDKPIREQAENIIHLFTLTNLGAPAAFKYFDTTIDRKRYTSTKEVLDATLIHQSITGLYETRIDLSQLGGDGGGGGGGSPAPGGTLQLDDEYRLYSPLVKPDQNIQFWLEQFPQAWAETAGMGLAKQVPPQVIQLKASATPVSVRQYPLSKEAQEGIRPHVQRLIQQGILVPVQSPWNTPLLPVRKPGTNDYRPVQDLREVNKRVQDIHPTVPNPYNLLCALPPQRSWYTVLDLKDAFFCLRLHPTSQPLFAFEWRDPGTGRTGQLTWTRLPQGFKNSPTIFNEALHRDLANFRIQHPQVTLLQYVDDLLLAGATKQDCLEGTKALLLELSDLGYRASAKKAQICRREVTYLGYSLRDGQRWLTEARKKTVVQIPAPTTAKQVREFLGTAGFCRLWIPGFATLAAPLYPLTKPKGEFSWAPEHQKAFDAIKKALLSAPALALPDVTKPFTLYVDERKGVARGVLTQTLGPWRRPVAYLSKKLDPVASGWPVCLKAIAAVAILVKDADKLTLGQNITVIAPHALENIVRQPPDRWMTNARMTHYQSLLLTERVTFAPPAALNPATLLPEETDEPVTHDCHQLLIEETGVRKDLTDIPLTGEVLTWFTDGSSYVVEGKRMAGAAVVDGTRTIWASSLPEGTSAQKAELMALTQALRLAEGKSINIYTDSRYAFATAHVHGAIYKQRGWLTSAGREIKNKEEILSLLEALHLPKRLAIIHCPGHQKAKDPISRGNQMADRVAKQAAQGVNLLAGKRTADGSEFEKRTADGSEFESPKKKAKVE

SEQ ID NO: 403 - protein, 2088 aa, synthetic construct; identical to SEQ ID NO: 130

SEQ ID NO: 404 - protein, 2094 aa, synthetic construct; identical to SEQ ID NO: 161

SEQ ID NO: 405 - protein, 2085 aa, synthetic construct
MPAAKRVKLDGGDKKYSIGLDIGTNSVGWAVITDEYKVPSKKFKVLGNTDRHSIKKNLIGALLFDSGETAEATRLKRTARRRYTRRKNRICYLQEIFSNEMAKVDDSFFHRLEESFLVEEDKKHERHPIFGNIVDEVAYHEKYPTIYHLRKKLVDSTDKADLRLIYLALAHMIKFRGHFLIEGDLNPDNSDVDKLFIQLVQTYNQLFEENPINASGVDAKAILSARLSKSRRLENLIAQLPGEKKNGLFGNLIALSLGLTPNFKSNFDLAEDAKLQLSKDTYDDDLDNLLAQIGDQYADLFLAAKNLSDAILLSDILRVNTEITKAPLSASMIKRYDEHHQDLTLLKALVRQQLPEKYKEIFFDQSKNGYAGYIDGGASQEEFYKFIKPILEKMDGTEELLVKLNREDLLRKQRTFDNGSIPHQIHLGELHAILRRQEDFYPFLKDNREKIEKILTFRIPYYVGPLARGNSRFAWMTRKSEETITPWNFEEVVDKGASAQSFIERMTNFDKNLPNEKVLPKHSLLYEYFTVYNELTKVKYVTEGMRKPAFLSGEQKKAIVDLLFKTNRKVTVKQLKEDYFKKIECFDSVEISGVEDRFNASLGTYHDLLKIIKDKDFLDNEENEDILEDIVLTLTLFEDREMIEERLKTYAHLFDDKVMKQLKRRRYTGWGRLSRKLINGIRDKQSGKTILDFLKSDGFANRNFMQLIHDDSLTFKEDIQKAQVSGQGDSLHEHIANLAGSPAIKKGILQTVKVVDELVKVMGRHKPENIVIEMARENQTTQKGQKNSRERMKRIEEGIKELGSQILKEHPVENTQLQNEKLYLYYLQNGRDMYVDQELDINRLSDYDVDHIVPQSFLKDDSIDNKVLTRSDKARGKSDNVPSEEVVKKMKNYWRQLLNAKLITQRKFDNLTKAERGGLSELDKAGFIKRQLVETRQITKHVAQILDSRMNTKYDENDKLIREVKVITLKSKLVSDFRKDFQFYKVREINNYHHAHDAYLNAVVGTALIKKYPKLESEFVYGDYKVYDVRKMIAKSEQEIGKATAKYFFYSNIMNFFKTEITLANGEIRKRPLIETNGETGEIVWDKGRDFATVRKVLSMPQVNIVKKTEVQTGGFSKESILPKRNSDKLIARKKDWDPKKYGGFDSPTVAYSVLVVAKVEKGKSKKLKSVKELLGITIMERSSFEKNPIDFLEAKGYKEVKKDLIIKLPKYSLFELENGRKRMLASAGELQKGNELALPSKYVNFLYLASHYEKLKGSPEDNEQKQLFVEQHKHYLDEIIEQISEFSKRVILADANLDKVLSAYNKHRDKPIREQAENIIHLFTLTNLGAPAAFKYFDTTIDRKRYTSTKEVLDATLIHQSITGLYETRIDLSQLGGDGGGGGGSSGGTLQLDDEYRLYSPLVKPDQNIQFWLEQFPQAWAETAGMGLAKQVPPQVIQLKASATPVSVRQYPLSKEAQEGIRPHVQRLIQQGILVPVQSPWNTPLLPVRKPGTNDYRPVQDLREVNKRVQDIHPTVPNPYNLLCALPPQRSWYTVLDLKDAFFCLRLHPTSQPLFAFEWRDPGTGRTGQLTWTRLPQGFKNSPTIFNEALHRDLANFRIQHPQVTLLQYVDDLLLAGATKQDCLEGTKALLLELSDLGYRASAKKAQICRREVTYLGYSLRDGQRWLTEARKKTVVQIPAPTTAKQVREFLGTAGFCRLWIPGFATLAAPLYPLTKPKGEFSWAPEHQKAFDAIKKALLSAPALALPDVTKPFTLYVDERKGVARGVLTQTLGPWRRPVAYLSKKLDPVASGWPVCLKAIAAVAILVKDADKLTLGQNITVIAPHALENIVRQPPDRWMTNARMTHYQSLLLTERVTFAPPAALNPATLLPEETDEPVTHDCHQLLIEETGVRKDLTDIPLTGEVLTWFTDGSSYVVEGKRMAGAAVVDGTRTIWASSLPEGTSAQKAELMALTQALRLAEGKSINIYTDSRYAFATAHVHGAIYKQRGWLTSAGREIKNKEEILSLLEALHLPKRLAIIHCPGHQKAKDPISRGNQMADRVAKQAAQGVNLLAGKRTADGSEFEKRTADGSEFESPKKKAKVE

SEQ ID NO: 406 - protein, 2088 aa, synthetic construct; identical to SEQ ID NO: 182

SEQ ID NO: 407 - protein, 2211 aa, synthetic construct
MPAAKRVKLDGGDKKYSIGLDIGTNSVGWAVITDEYKVPSKKFKVLGNTDRHSIKKNLIGALLFDSGETAEATRLKRTARRRYTRRKNRICYLQEIFSNEMAKVDDSFFHRLEESFLVEEDKKHERHPIFGNIVDEVAYHEKYPTIYHLRKKLVDSTDKADLRLIYLALAHMIKFRGHFLIEGDLNPDNSDVDKLFIQLVQTYNQLFEENPINASGVDAKAILSARLSKSRRLENLIAQLPGEKKNGLFGNLIALSLGLTPNFKSNFDLAEDAKLQLSKDTYDDDLDNLLAQIGDQYADLFLAAKNLSDAILLSDILRVNTEITKAPLSASMIKRYDEHHQDLTLLKALVRQQLPEKYKEIFFDQSKNGYAGYIDGGASQEEFYKFIKPILEKMDGTEELLVKLNREDLLRKQRTFDNGSIPHQIHLGELHAILRRQEDFYPFLKDNREKIEKILTFRIPYYVGPLARGNSRFAWMTRKSEETITPWNFEEVVDKGASAQSFIERMTNFDKNLPNEKVLPKHSLLYEYFTVYNELTKVKYVTEGMRKPAFLSGEQKKAIVDLLFKTNRKVTVKQLKEDYFKKIECFDSVEISGVEDRFNASLGTYHDLLKIIKDKDFLDNEENEDILEDIVLTLTLFEDREMIEERLKTYAHLFDDKVMKQLKRRRYTGWGRLSRKLINGIRDKQSGKTILDFLKSDGFANRNFMQLIHDDSLTFKEDIQKAQVSGQGDSLHEHIANLAGSPAIKKGILQTVKVVDELVKVMGRHKPENIVIEMARENQTTQKGQKNSRERMKRIEEGIKELGSQILKEHPVENTQLQNEKLYLYYLQNGRDMYVDQELDINRLSDYDVDHIVPQSFLKDDSIDNKVLTRSDKARGKSDNVPSEEVVKKMKNYWRQLLNAKLITQRKFDNLTKAERGGLSELDKAGFIKRQLVETRQITKHVAQILDSRMNTKYDENDKLIREVKVITLKSKLVSDFRKDFQFYKVREINNYHHAHDAYLNAVVGTALIKKYPKLESEFVYGDYKVYDVRKMIAKSEQEIGKATAKYFFYSNIMNFFKTEITLANGEIRKRPLIETNGETGEIVWDKGRDFATVRKVLSMPQVNIVKKTEVQTGGFSKESILPKRNSDKLIARKKDWDPKKYGGFDSPTVAYSVLVVAKVEKGKSKKLKSVKELLGITIMERSSFEKNPIDFLEAKGYKEVKKDLIIKLPKYSLFELENGRKRMLASAGELQKGNELALPSKYVNFLYLASHYEKLKGSPEDNEQKQLFVEQHKHYLDEIIEQISEFSKRVILADANLDKVLSAYNKHRDKPIREQAENIIHLFTLTNLGAPAAFKYFDTTIDRKRYTSTKEVLDATLIHQSITGLYETRIDLSQLGGDGGAEAAAKEAAAKEAAAKEAAAKALEAEAAAKEAAAKEAAAKEAAAKAGGMDPLQLLQPLEAEIKGTKLKAHWNSGATITCVPEAFLEDERPIQTMLIKTIHGEKQQDVYYLTFKVQGRKVEAEVLASPYDYILLNPSDVPWLMKKPLQLTVLVPLHEYQERLLQQTALPKEQKELLQKLFLKYDALWQHWENQVGHRRIKPHNIATGTLAPRPQKQYPINPKAKPSIQIVIDDLLKQGVLIQQNSTMNTPVYPVPKPDGKWRMVLDYREVNKTIPLIAAQNQHSAGILSSIYRGKYKTTLDLTNGFWAHPITPESYWLTAFTWQGKQYCWTRLPQGFLNSPALFTADVVDLLKEIPNVQAYVDDIYISHDDPQEHLEQLEKIFSILLNAGYVVSLKKSEIAQREVEFLGFNITKEGRGLTDTFKQKLLNITPPKDLKQLQSILGLLNFARNFIPNYSELVKPLYTIVANANGKFISWTEDNSNQLQHIISVLNQADNLEERNPETRLIIKVNSSPSAGYIRYYNEGSKRPIMYVNYIFSKAEAKFTQTEKLLTTMHKGLIKAMDLAMGQEILVYSPIVSMTKIQRTPLPERKALPVRWITWMTYLEDPRIQFHYDKSLPELQQIPNVTEDVIAKTKHPSEFAMVFYTDGSAIKHPDVNKSHSAGMGIAQVQFIPEYKIVHQWSIPLGDHTAQLAEIAAVEFACKKALKISGPVLIVTDSFYVAESANKELPYWKSNGFLNNKKKPLRHVSKWKSIAECLQLKPDIIIMHEKGHQQPMTTLHTEGNNLADKLATQGSYVVHAGKRTADGSEFEKRTADGSEFESPKKKAKVE

SEQ ID NO: 408 - protein, 2198 aa, synthetic construct
MPAAKRVKLDGGDKKYSIGLDIGTNSVGWAVITDEYKVPSKKFKVLGNTDRHSIKKNLIGALLFDSGETAEATRLKRTARRRYTRRKNRICYLQEIFSNEMAKVDDSFFHRLEESFLVEEDKKHERHPIFGNIVDEVAYHEKYPTIYHLRKKLVDSTDKADLRLIYLALAHMIKFRGHFLIEGDLNPDNSDVDKLFIQLVQTYNQLFEENPINASGVDAKAILSARLSKSRRLENLIAQLPGEKKNGLFGNLIALSLGLTPNFKSNFDLAEDAKLQLSKDTYDDDLDNLLAQIGDQYADLFLAAKNLSDAILLSDILRVNTEITKAPLSASMIKRYDEHHQDLTLLKALVRQQLPEKYKEIFFDQSKNGYAGYIDGGASQEEFYKFIKPILEKMDGTEELLVKLNREDLLRKQRTFDNGSIPHQIHLGELHAILRRQEDFYPFLKDNREKIEKILTFRIPYYVGPLARGNSRFAWMTRKSEETITPWNFEEVVDKGASAQSFIERMTNFDKNLPNEKVLPKHSLLYEYFTVYNELTKVKYVTEGMRKPAFLSGEQKKAIVDLLFKTNRKVTVKQLKEDYFKKIECFDSVEISGVEDRFNASLGTYHDLLKIIKDKDFLDNEENEDILEDIVLTLTLFEDREMIEERLKTYAHLFDDKVMKQLKRRRYTGWGRLSRKLINGIRDKQSGKTILDFLKSDGFANRNFMQLIHDDSLTFKEDIQKAQVSGQGDSLHEHIANLAGSPAIKKGILQTVKVVDELVKVMGRHKPENIVIEMARENQTTQKGQKNSRERMKRIEEGIKELGSQILKEHPVENTQLQNEKLYLYYLQNGRDMYVDQELDINRLSDYDVDHIVPQSFLKDDSIDNKVLTRSDKARGKSDNVPSEEVVKKMKNYWRQLLNAKLITQRKFDNLTKAERGGLSELDKAGFIKRQLVETRQITKHVAQILDSRMNTKYDENDKLIREVKVITLKSKLVSDFRKDFQFYKVREINNYHHAHDAYLNAVVGTALIKKYPKLESEFVYGDYKVYDVRKMIAKSEQEIGKATAKYFFYSNIMNFFKTEITLANGEIRKRPLIETNGETGEIVWDKGRDFATVRKVLSMPQVNIVKKTEVQTGGFSKESILPKRNSDKLIARKKDWDPKKYGGFDSPTVAYSVLVVAKVEKGKSKKLKSVKELLGITIMERSSFEKNPIDFLEAKGYKEVKKDLIIKLPKYSLFELENGRKRMLASAGELQKGNELALPSKYVNFLYLASHYEKLKGSPEDNEQKQLFVEQHKHYLDEIIEQISEFSKRVILADANLDKVLSAYNKHRDKPIREQAENIIHLFTLTNLGAPAAFKYFDTTIDRKRYTSTKEVLDATLIHQSITGLYETRIDLSQLGGDGGSGGSSGGSSGSETPGTSESATPESSGGSSGGSSGGMDPLQLLQPLEAEIKGTKLKAHWNSGATITCVPEAFLEDERPIQTMLIKTIHGEKQQDVYYLTFKVQGRKVEAEVLASPYDYILLNPSDVPWLMKKPLQLTVLVPLHEYQERLLQQTALPKEQKELLQKLFLKYDALWQHWENQVGHRRIKPHNIATGTLAPRPQKQYPINPKAKPSIQIVIDDLLKQGVLIQQNSTMNTPVYPVPKPDGKWRMVLDYREVNKTIPLIAAQNQHSAGILSSIYRGKYKTTLDLTNGFWAHPITPESYWLTAFTWQGKQYCWTRLPQGFLNSPALFTADVVDLLKEIPNVQAYVDDIYISHDDPQEHLEQLEKIFSILLNAGYVVSLKKSEIAQREVEFLGFNITKEGRGLTDTFKQKLLNITPPKDLKQLQSILGLLNFARNFIPNYSELVKPLYTIVANANGKFISWTEDNSNQLQHIISVLNQADNLEERNPETRLIIKVNSSPSAGYIRYYNEGSKRPIMYVNYIFSKAEAKFTQTEKLLTTMHKGLIKAMDLAMGQEILVYSPIVSMTKIQRTPLPERKALPVRWITWMTYLEDPRIQFHYDKSLPELQQIPNVTEDVIAKTKHPSEFAMVFYTDGSAIKHPDVNKSHSAGMGIAQVQFIPEYKIVHQWSIPLGDHTAQLAEIAAVEFACKKALKISGPVLIVTDSFYVAESANKELPYWKSNGFLNNKKKPLRHVSKWKSIAECLQLKPDIIIMHEKGHQQPMTTLHTEGNNLADKLATQGSYVVHAGKRTADGSEFEKRTADGSEFESPKKKAKVE

SEQ ID NO: 409 - protein, 2176 aa, synthetic construct
MPAAKRVKLDGGDKKYSIGLDIGTNSVGWAVITDEYKVPSKKFKVLGNTDRHSIKKNLIGALLFDSGETAEATRLKRTARRRYTRRKNRICYLQEIFSNEMAKVDDSFFHRLEESFLVEEDKKHERHPIFGNIVDEVAYHEKYPTIYHLRKKLVDSTDKADLRLIYLALAHMIKFRGHFLIEGDLNPDNSDVDKLFIQLVQTYNQLFEENPINASGVDAKAILSARLSKSRRLENLIAQLPGEKKNGLFGNLIALSLGLTPNFKSNFDLAEDAKLQLSKDTYDDDLDNLLAQIGDQYADLFLAAKNLSDAILLSDILRVNTEITKAPLSASMIKRYDEHHQDLTLLKALVRQQLPEKYKEIFFDQSKNGYAGYIDGGASQEEFYKFIKPILEKMDGTEELLVKLNREDLLRKQRTFDNGSIPHQIHLGELHAILRRQEDFYPFLKDNREKIEKILTFRIPYYVGPLARGNSRFAWMTRKSEETITPWNFEEVVDKGASAQSFIERMTNFDKNLPNEKVLPKHSLLYEYFTVYNELTKVKYVTEGMRKPAFLSGEQKKAIVDLLFKTNRKVTVKQLKEDYFKKIECFDSVEISGVEDRFNASLGTYHDLLKIIKDKDFLDNEENEDILEDIVLTLTLFEDREMIEERLKTYAHLFDDKVMKQLKRRRYTGWGRLSRKLINGIRDKQSGKTILDFLKSDGFANRNFMQLIHDDSLTFKEDIQKAQVSGQGDSLHEHIANLAGSPAIKKGILQTVKVVDELVKVMGRHKPENIVIEMARENQTTQKGQKNSRERMKRIEEGIKELGSQILKEHPVENTQLQNEKLYLYYLQNGRDMYVDQELDINRLSDYDVDHIVPQSFLKDDSIDNKVLTRSDKARGKSDNVPSEEVVKKMKNYWRQLLNAKLITQRKFDNLTKAERGGLSELDKAGFIKRQLVETRQITKHVAQILDSRMNTKYDENDKLIREVKVITLKSKLVSDFRKDFQFYKVREINNYHHAHDAYLNAVVGTALIKKYPKLESEFVYGDYKVYDVRKMIAKSEQEIGKATAKYFFYSNIMNFFKTEITLANGEIRKRPLIETNGETGEIVWDKGRDFATVRKVLSMPQVNIVKKTEVQTGGFSKESILPKRNSDKLIARKKDWDPKKYGGFDSPTVAYSVLVVAKVEKGKSKKLKSVKELLGITIMERSSFEKNPIDFLEAKGYKEVKKDLIIKLPKYSLFELENGRKRMLASAGELQKGNELALPSKYVNFLYLASHYEKLKGSPEDNEQKQLFVEQHKHYLDEIIEQISEFSKRVILADANLDKVLSAYNKHRDKPIREQAENIIHLFTLTNLGAPAAFKYFDTTIDRKRYTSTKEVLDATLIHQSITGLYETRIDLSQLGGDGGGSSEAAAKPAPGGMDPLQLLQPLEAEIKGTKLKAHWNSGATITCVPEAFLEDERPIQTMLIKTIHGEKQQDVYYLTFKVQGRKVEAEVLASPYDYILLNPSDVPWLMKKPLQLTVLVPLHEYQERLLQQTALPKEQKELLQKLFLKYDALWQHWENQVGHRRIKPHNIATGTLAPRPQKQYPINPKAKPSIQIVIDDLLKQGVLIQQNSTMNTPVYPVPKPDGKWRMVLDYREVNKTIPLIAAQNQHSAGILSSIYRGKYKTTLDLTNGFWAHPITPESYWLTAFTWQGKQYCWTRLPQGFLNSPALFTADVVDLLKEIPNVQAYVDDIYISHDDPQEHLEQLEKIFSILLNAGYVVSLKKSEIAQREVEFLGFNITKEGRGLTDTFKQKLLNITPPKDLKQLQSILGLLNFARNFIPNYSELVKPLYTIVANANGKFISWTEDNSNQLQHIISVLNQADNLEERNPETRLIIKVNSSPSAGYIRYYNEGSKRPIMYVNYIFSKAEAKFTQTEKLLTTMHKGLIKAMDLAMGQEILVYSPIVSMTKIQRTPLPERKALPVRWITWMTYLEDPRIQFHYDKSLPELQQIPNVTEDVIAKTKHPSEFAMVFYTDGSAIKHPDVNKSHSAGMGIAQVQFIPEYKIVHQWSIPLGDHTAQLAEIAAVEFACKKALKISGPVLIVTDSFYVAESANKELPYWKSNGFLNNKKKPLRHVSKWKSIAECLQLKPDIIIMHEKGHQQPMTTLHTEGNNLADKLATQGSYVVHAGKRTADGSEFEKRTADGSEFESPKKKAKVE

SEQ ID NO: 410 - protein, 2181 aa, synthetic construct
MPAAKRVKLDGGDKKYSIGLDIGTNSVGWAVITDEYKVPSKKFKVLGNTDRHSIKKNLIGALLFDSGETAEATRLKRTARRRYTRRKNRICYLQEIFSNEMAKVDDSFFHRLEESFLVEEDKKHERHPIFGNIVDEVAYHEKYPTIYHLRKKLVDSTDKADLRLIYLALAHMIKFRGHFLIEGDLNPDNSDVDKLFIQLVQTYNQLFEENPINASGVDAKAILSARLSKSRRLENLIAQLPGEKKNGLFGNLIALSLGLTPNFKSNFDLAEDAKLQLSKDTYDDDLDNLLAQIGDQYADLFLAAKNLSDAILLSDILRVNTEITKAPLSASMIKRYDEHHQDLTLLKALVRQQLPEKYKEIFFDQSKNGYAGYIDGGASQEEFYKFIKPILEKMDGTEELLVKLNREDLLRKQRTFDNGSIPHQIHLGELHAILRRQEDFYPFLKDNREKIEKILTFRIPYYVGPLARGNSRFAWMTRKSEETITPWNFEEVVDKGASAQSFIERMTNFDKNLPNEKVLPKHSLLYEYFTVYNELTKVKYVTEGMRKPAFLSGEQKKAIVDLLFKTNRKVTVKQLKEDYFKKIECFDSVEISGVEDRFNASLGTYHDLLKIIKDKDFLDNEENEDILEDIVLTLTLFEDREMIEERLKTYAHLFDDKVMKQLKRRRYTGWGRLSRKLINGIRDKQSGKTILDFLKSDGFANRNFMQLIHDDSLTFKEDIQKAQVSGQGDSLHEHIANLAGSPAIKKGILQTVKVVDELVKVMGRHKPENIVIEMARENQTTQKGQKNSRERMKRIEEGIKELGSQILKEHPVENTQLQNEKLYLYYLQNGRDMYVDQELDINRLSDYDVDHIVPQSFLKDDSIDNKVLTRSDKARGKSDNVPSEEVVKKMKNYWRQLLNAKLITQRKFDNLTKAERGGLSELDKAGFIKRQLVETRQITKHVAQILDSRMNTKYDENDKLIREVKVITLKSKLVSDFRKDFQFYKVREINNYHHAHDAYLNAVVGTALIKKYPKLESEFVYGDYKVYDVRKMIAKSEQEIGKATAKYFFYSNIMNFFKTEITLANGEIRKRPLIETNGETGEIVWDKGRDFATVRKVLSMPQVNIVKKTEVQTGGFSKESILPKRNSDKLIARKKDWDPKKYGGFDSPTVAYSVLVVAKVEKGKSKKLKSVKELLGITIMERSSFEKNPIDFLEAKGYKEVKKDLIIKLPKYSLFELENGRKRMLASAGELQKGNELALPSKYVNFLYLASHYEKLKGSPEDNEQKQLFVEQHKHYLDEIIEQISEFSKRVILADANLDKVLSAYNKHRDKPIREQAENIIHLFTLTNLGAPAAFKYFDTTIDRKRYTSTKEVLDATLIHQSITGLYETRIDLSQLGGDGGSGSETPGTSESATPESGGMDPLQLLQPLEAEIKGTKLKAHWNSGATITCVPEAFLEDERPIQTMLIKTIHGEKQQDVYYLTFKVQGRKVEAEVLASPYDYILLNPSDVPWLMKKPLQLTVLVPLHEYQERLLQQTALPKEQKELLQKLFLKYDALWQHWENQVGHRRIKPHNIATGTLAPRPQKQYPINPKAKPSIQIVIDDLLKQGVLIQQNSTMNTPVYPVPKPDGKWRMVLDYREVNKTIPLIAAQNQHSAGILSSIYRGKYKTTLDLTNGFWAHPITPESYWLTAFTWQGKQYCWTRLPQGFLNSPALFTADVVDLLKEIPNVQAYVDDIYISHDDPQEHLEQLEKIFSILLNAGYVVSLKKSEIAQREVEFLGFNITKEGRGLTDTFKQKLLNITPPKDLKQLQSILGLLNFARNFIPNYSELVKPLYTIVANANGKFISWTEDNSNQLQHIISVLNQADNLEERNPETRLIIKVNSSPSAGYIRYYNEGSKRPIMYVNYIFSKAEAKFTQTEKLLTTMHKGLIKAMDLAMGQEILVYSPIVSMTKIQRTPLPERKALPVRWITWMTYLEDPRIQFHYDKSLPELQQIPNVTEDVIAKTKHPSEFAMVFYTDGSAIKHPDVNKSHSAGMGIAQVQFIPEYKIVHQWSIPLGDHTAQLAEIAAVEFACKKALKISGPVLIVTDSFYVAESANKELPYWKSNGFLNNKKKPLRHVSKWKSIAECLQLKPDIIIMHEKGHQQPMTTLHTEGNNLADKLATQGSYVVHAGKRTADGSEFEKRTADGSEFESPKKKAKVE

SEQ ID NO: 411 - protein, 2178 aa, synthetic construct
MPAAKRVKLDGGDKKYSIGLDIGTNSVGWAVITDEYKVPSKKFKVLGNTDRHSIKKNLIGALLFDSGETAEATRLKRTARRRYTRRKNRICYLQEIFSNEMAKVDDSFFHRLEESFLVEEDKKHERHPIFGNIVDEVAYHEKYPTIYHLRKKLVDSTDKADLRLIYLALAHMIKFRGHFLIEGDLNPDNSDVDKLFIQLVQTYNQLFEENPINASGVDAKAILSARLSKSRRLENLIAQLPGEKKNGLFGNLIALSLGLTPNFKSNFDLAEDAKLQLSKDTYDDDLDNLLAQIGDQYADLFLAAKNLSDAILLSDILRVNTEITKAPLSASMIKRYDEHHQDLTLLKALVRQQLPEKYKEIFFDQSKNGYAGYIDGGASQEEFYKFIKPILEKMDGTEELLVKLNREDLLRKQRTFDNGSIPHQIHLGELHAILRRQEDFYPFLKDNREKIEKILTFRIPYYVGPLARGNSRFAWMTRKSEETITPWNFEEVVDKGASAQSFIERMTNFDKNLPNEKVLPKHSLLYEYFTVYNELTKVKYVTEGMRKPAFLSGEQKKAIVDLLFKTNRKVTVKQLKEDYFKKIECFDSVEISGVEDRFNASLGTYHDLLKIIKDKDFLDNEENEDILEDIVLTLTLFEDREMIEERLKTYAHLFDDKVMKQLKRRRYTGWGRLSRKLINGIRDKQSGKTILDFLKSDGFANRNFMQLIHDDSLTFKEDIQKAQVSGQGDSLHEHIANLAGSPAIKKGILQTVKVVDELVKVMGRHKPENIVIEMARENQTTQKGQKNSRERMKRIEEGIKELGSQILKEHPVENTQLQNEKLYLYYLQNGRDMYVDQELDINRLSDYDVDHIVPQSFLKDDSIDNKVLTRSDKARGKSDNVPSEEVVKKMKNYWRQLLNAKLITQRKFDNLTKAERGGLSELDKAGFIKRQLVETRQITKHVAQILDSRMNTKYDENDKLIREVKVITLKSKLVSDFRKDFQFYKVREINNYHHAHDAYLNAVVGTALIKKYPKLESEFVYGDYKVYDVRKMIAKSEQEIGKATAKYFFYSNIMNFFKTEITLANGEIRKRPLIETNGETGEIVWDKGRDFATVRKVLSMPQVNIVKKTEVQTGGFSKESILPKRNSDKLIARKKDWDPKKYGGFDSPTVAYSVLVVAKVEKGKSKKLKSVKELLGITIMERSSFEKNPIDFLEAKGYKEVKKDLIIKLPKYSLFELENGRKRMLASAGELQKGNELALPSKYVNFLYLASHYEKLKGSPEDNEQKQLFVEQHKHYLDEIIEQISEFSKRVILADANLDKVLSAYNKHRDKPIREQAENIIHLFTLTNLGAPAAFKYFDTTIDRKRYTSTKEVLDATLIHQSITGLYETRIDLSQLGGDGGPAPAPAPAPAPAPGGMDPLQLLQPLEAEIKGTKLKAHWNSGATITCVPEAFLEDERPIQTMLIKTIHGEKQQDVYYLTFKVQGRKVEAEVLASPYDYILLNPSDVPWLMKKPLQLTVLVPLHEYQERLLQQTALPKEQKELLQKLFLKYDALWQHWENQVGHRRIKPHNIATGTLAPRPQKQYPINPKAKPSIQIVIDDLLKQGVLIQQNSTMNTPVYPVPKPDGKWRMVLDYREVNKTIPLIAAQNQHSAGILSSIYRGKYKTTLDLTNGFWAHPITPESYWLTAFTWQGKQYCWTRLPQGFLNSPALFTADVVDLLKEIPNVQAYVDDIYISHDDPQEHLEQLEKIFSILLNAGYVVSLKKSEIAQREVEFLGFNITKEGRGLTDTFKQKLLNITPPKDLKQLQSILGLLNFARNFIPNYSELVKPLYTIVANANGKFISWTEDNSNQLQHIISVLNQADNLEERNPETRLIIKVNSSPSAGYIRYYNEGSKRPIMYVNYIFSKAEAKFTQTEKLLTTMHKGLIKAMDLAMGQEILVYSPIVSMTKIQRTPLPERKALPVRWITWMTYLEDPRIQFHYDKSLPELQQIPNVTEDVIAKTKHPSEFAMVFYTDGSAIKHPDVNKSHSAGMGIAQVQFIPEYKIVHQWSIPLGDHTAQLAEIAAVEFACKKALKISGPVLIVTDSFYVAESANKELPYWKSNGFLNNKKKPLRHVSKWKSIAECLQLKPDIIIMHEKGHQQPMTTLHTEGNNLADKLATQGSYVVHAGKRTADGSEFEKRTADGSEFESPKKKAKVE

SEQ ID NO: 412 - protein, 2176 aa, synthetic construct
MPAAKRVKLDGGDKKYSIGLDIGTNSVGWAVITDEYKVPSKKFKVLGNTDRHSIKKNLIGALLFDSGETAEATRLKRTARRRYTRRKNRICYLQEIFSNEMAKVDDSFFHRLEESFLVEEDKKHERHPIFGNIVDEVAYHEKYPTIYHLRKKLVDSTDKADLRLIYLALAHMIKFRGHFLIEGDLNPDNSDVDKLFIQLVQTYNQLFEENPINASGVDAKAILSARLSKSRRLENLIAQLPGEKKNGLFGNLIALSLGLTPNFKSNFDLAEDAKLQLSKDTYDDDLDNLLAQIGDQYADLFLAAKNLSDAILLSDILRVNTEITKAPLSASMIKRYDEHHQDLTLLKALVRQQLPEKYKEIFFDQSKNGYAGYIDGGASQEEFYKFIKPILEKMDGTEELLVKLNREDLLRKQRTFDNGSIPHQIHLGELHAILRRQEDFYPFLKDNREKIEKILTFRIPYYVGPLARGNSRFAWMTRKSEETITPWNFEEVVDKGASAQSFIERMTNFDKNLPNEKVLPKHSLLYEYFTVYNELTKVKYVTEGMRKPAFLSGEQKKAIVDLLFKTNRKVTVKQLKEDYFKKIECFDSVEISGVEDRFNASLGTYHDLLKIIKDKDFLDNEENEDILEDIVLTLTLFEDREMIEERLKTYAHLFDDKVMKQLKRRRYTGWGRLSRKLINGIRDKQSGKTILDFLKSDGFANRNFMQLIHDDSLTFKEDIQKAQVSGQGDSLHEHIANLAGSPAIKKGILQTVKVVDELVKVMGRHKPENIVIEMARENQTTQKGQKNSRERMKRIEEGIKELGSQILKEHPVENTQLQNEKLYLYYLQNGRDMYVDQELDINRLSDYDVDHIVPQSFLKDDSIDNKVLTRSDKARGKSDNVPSEEVVKKMKNYWRQLLNAKLITQRKFDNLTKAERGGLSELDKAGFIKRQLVETRQITKHVAQILDSRMNTKYDENDKLIREVKVITLKSKLVSDFRKDFQFYKVREINNYHHAHDAYLNAVVGTALIKKYPKLESEFVYGDYKVYDVRKMIAKSEQEIGKATAKYFFYSNIMNFFKTEITLANGEIRKRPLIETNGETGEIVWDKGRDFATVRKVLSMPQVNIVKKTEVQTGGFSKESILPKRNSDKLIARKKDWDPKKYGGFDSPTVAYSVLVVAKVEKGKSKKLKSVKELLGITIMERSSFEKNPIDFLEAKGYKEVKKDLIIKLPKYSLFELENGRKRMLASAGELQKGNELALPSKYVNFLYLASHYEKLKGSPEDNEQKQLFVEQHKHYLDEIIEQISEFSKRVILADANLDKVLSAYNKHRDKPIREQAENIIHLFTLTNLGAPAAFKYFDTTIDRKRYTSTKEVLDATLIHQSITGLYETRIDLSQLGGDGGPAPEAAAKGSSGGMDPLQLLQPLEAEIKGTKLKAHWNSGATITCVPEAFLEDERPIQTMLIKTIHGEKQQDVYYLTFKVQGRKVEAEVLASPYDYILLNPSDVPWLMKKPLQLTVLVPLHEYQERLLQQTALPKEQKELLQKLFLKYDALWQHWENQVGHRRIKPHNIATGTLAPRPQKQYPINPKAKPSIQIVIDDLLKQGVLIQQNSTMNTPVYPVPKPDGKWRMVLDYREVNKTIPLIAAQNQHSAGILSSIYRGKYKTTLDLTNGFWAHPITPESYWLTAFTWQGKQYCWTRLPQGFLNSPALFTADVVDLLKEIPNVQAYVDDIYISHDDPQEHLEQLEKIFSILLNAGYVVSLKKSEIAQREVEFLGFNITKEGRGLTDTFKQKLLNITPPKDLKQLQSILGLLNFARNFIPNYSELVKPLYTIVANANGKFISWTEDNSNQLQHIISVLNQADNLEERNPETRLIIKVNSSPSAGYIRYYNEGSKRPIMYVNYIFSKAEAKFTQTEKLLTTMHKGLIKAMDLAMGQEILVYSPIVSMTKIQRTPLPERKALPVRWITWMTYLEDPRIQFHYDKSLPELQQIPNVTEDVIAKTKHPSEFAMVFYTDGSAIKHPDVNKSHSAGMGIAQVQFIPEYKIVHQWSIPLGDHTAQLAEIAAVEFACKKALKISGPVLIVTDSFYVAESANKELPYWKSNGFLNNKKKPLRHVSKWKSIAECLQLKPDIIIMHEKGHQQPMTTLHTEGNNLADKLATQGSYVVHAGKRTADGSEFEKRTADGSEFESPKKKAKVE

SEQ ID NO: 413 - protein, 2180 aa, synthetic construct
MPAAKRVKLDGGDKKYSIGLDIGTNSVGWAVITDEYKVPSKKFKVLGNTDRHSIKKNLIGALLFDSGETAEATRLKRTARRRYTRRKNRICYLQEIFSNEMAKVDDSFFHRLEESFLVEEDKKHERHPIFGNIVDEVAYHEKYPTIYHLRKKLVDSTDKADLRLIYLALAHMIKFRGHFLIEGDLNPDNSDVDKLFIQLVQTYNQLFEENPINASGVDAKAILSARLSKSRRLENLIAQLPGEKKNGLFGNLIALSLGLTPNFKSNFDLAEDAKLQLSKDTYDDDLDNLLAQIGDQYADLFLAAKNLSDAILLSDILRVNTEITKAPLSASMIKRYDEHHQDLTLLKALVRQQLPEKYKEIFFDQSKNGYAGYIDGGASQEEFYKFIKPILEKMDGTEELLVKLNREDLLRKQRTFDNGSIPHQIHLGELHAILRRQEDFYPFLKDNREKIEKILTFRIPYYVGPLARGNSRFAWMTRKSEETITPWNFEEVVDKGASAQSFIERMTNFDKNLPNEKVLPKHSLLYEYFTVYNELTKVKYVTEGMRKPAFLSGEQKKAIVDLLFKTNRKVTVKQLKEDYFKKIECFDSVEISGVEDRFNASLGTYHDLLKIIKDKDFLDNEENEDILEDIVLTLTLFEDREMIEERLKTYAHLFDDKVMKQLKRRRYTGWGRLSRKLINGIRDKQSGKTILDFLKSDGFANRNFMQLIHDDSLTFKEDIQKAQVSGQGDSLHEHIANLAGSPAIKKGILQTVKVVDELVKVMGRHKPENIVIEMARENQTTQKGQKNSRERMKRIEEGIKELGSQILKEHPVENTQLQNEKLYLYYLQNGRDMYVDQELDINRLSDYDVDHIVPQSFLKDDSIDNKVLTRSDKARGKSDNVPSEEVVKKMKNYWRQLLNAKLITQRKFDNLTKAERGGLSELDKAGFIKRQLVETRQITKHVAQILDSRMNTKYDENDKLIREVKVITLKSKLVSDFRKDFQFYKVREINNYHHAHDAYLNAVVGTALIKKYPKLESEFVYGDYKVYDVRKMIAKSEQEIGKATAKYFFYSNIMNFFKTEITLANGEIRKRPLIETNGETGEIVWDKGRDFATVRKVLSMPQVNIVKKTEVQTGGFSKESILPKRNSDKLIARKKDWDPKKYGGFDSPTVAYSVLVVAKVEKGKSKKLKSVKELLGITIMERSSFEKNPIDFLEAKGYKEVKKDLIIKLPKYSLFELENGRKRMLASAGELQKGNELALPSKYVNFLYLASHYEKLKGSPEDNEQKQLFVEQHKHYLDEIIEQISEFSKRVILADANLDKVLSAYNKHRDKPIREQAENIIHLFTLTNLGAPAAFKYFDTTIDRKRYTSTKEVLDATLIHQSITGLYETRIDLSQLGGDGGEAAAKEAAAKEAAAKGGMDPLQLLQPLEAEIKGTKLKAHWNSGATITCVPEAFLEDERPIQTMLIKTIHGEKQQDVYYLTFKVQGRKVEAEVLASPYDYILLNPSDVPWLMKKPLQLTVLVPLHEYQERLLQQTALPKEQKELLQKLFLKYDALWQHWENQVGHRRIKPHNIATGTLAPRPQKQYPINPKAKPSIQIVIDDLLKQGVLIQQNSTMNTPVYPVPKPDGKWRMVLDYREVNKTIPLIAAQNQHSAGILSSIYRGKYKTTLDLTNGFWAHPITPESYWLTAFTWQGKQYCWTRLPQGFLNSPALFTADVVDLLKEIPNVQAYVDDIYISHDDPQEHLEQLEKIFSILLNAGYVVSLKKSEIAQREVEFLGFNITKEGRGLTDTFKQKLLNITPPKDLKQLQSILGLLNFARNFIPNYSELVKPLYTIVANANGKFISWTEDNSNQLQHIISVLNQADNLEERNPETRLIIKVNSSPSAGYIRYYNEGSKRPIMYVNYIFSKAEAKFTQTEKLLTTMHKGLIKAMDLAMGQEILVYSPIVSMTKIQRTPLPERKALPVRWITWMTYLEDPRIQFHYDKSLPELQQIPNVTEDVIAKTKHPSEFAMVFYTDGSAIKHPDVNKSHSAGMGIAQVQFIPEYKIVHQWSIPLGDHTAQLAEIAAVEFACKKALKISGPVLIVTDSFYVAESANKELPYWKSNGFLNNKKKPLRHVSKWKSIAECLQLKPDIIIMHEKGHQQPMTTLHTEGNNLADKLATQGSYVVHAGKRTADGSEFEKRTADGSEFESPKKKAKVE

SEQ ID NO: 414 - protein, 2176 aa, synthetic construct
MPAAKRVKLDGGDKKYSIGLDIGTNSVGWAVITDEYKVPSKKFKVLGNTDRHSIKKNLIGALLFDSGETAEATRLKRTARRRYTRRKNRICYLQEIFSNEMAKVDDSFFHRLEESFLVEEDKKHERHPIFGNIVDEVAYHEKYPTIYHLRKKLVDSTDKADLRLIYLALAHMIKFRGHFLIEGDLNPDNSDVDKLFIQLVQTYNQLFEENPINASGVDAKAILSARLSKSRRLENLIAQLPGEKKNGLFGNLIALSLGLTPNFKSNFDLAEDAKLQLSKDTYDDDLDNLLAQIGDQYADLFLAAKNLSDAILLSDILRVNTEITKAPLSASMIKRYDEHHQDLTLLKALVRQQLPEKYKEIFFDQSKNGYAGYIDGGASQEEFYKFIKPILEKMDGTEELLVKLNREDLLRKQRTFDNGSIPHQIHLGELHAILRRQEDFYPFLKDNREKIEKILTFRIPYYVGPLARGNSRFAWMTRKSEETITPWNFEEVVDKGASAQSFIERMTNFDKNLPNEKVLPKHSLLYEYFTVYNELTKVKYVTEGMRKPAFLSGEQKKAIVDLLFKTNRKVTVKQLKEDYFKKIECFDSVEISGVEDRFNASLGTYHDLLKIIKDKDFLDNEENEDILEDIVLTLTLFEDREMIEERLKTYAHLFDDKVMKQLKRRRYTGWGRLSRKLINGIRDKQSGKTILDFLKSDGFANRNFMQLIHDDSLTFKEDIQKAQVSGQGDSLHEHIANLAGSPAIKKGILQTVKVVDELVKVMGRHKPENIVIEMARENQTTQKGQKNSRERMKRIEEGIKELGSQILKEHPVENTQLQNEKLYLYYLQNGRDMYVDQELDINRLSDYDVDHIVPQSFLKDDSIDNKVLTRSDKARGKSDNVPSEEVVKKMKNYWRQLLNAKLITQRKFDNLTKAERGGLSELDKAGFIKRQLVETRQITKHVAQILDSRMNTKYDENDKLIREVKVITLKSKLVSDFRKDFQFYKVREINNYHHAHDAYLNAVVGTALIKKYPKLESEFVYGDYKVYDVRKMIAKSEQEIGKATAKYFFYSNIMNFFKTEITLANGEIRKRPLIETNGETGEIVWDKGRDFATVRKVLSMPQVNIVKKTEVQTGGFSKESILPKRNSDKLIARKKDWDPKKYGGFDSPTVAYSVLVVAKVEKGKSKKLKSVKELLGITIMERSSFEKNPIDFLEAKGYKEVKKDLIIKLPKYSLFELENGRKRMLASAGELQKGNELALPSKYVNFLYLASHYEKLKGSPEDNEQKQLFVEQHKHYLDEIIEQISEFSKRVILADANLDKVLSAYNKHRDKPIREQAENIIHLFTLTNLGAPAAFKYFDTTIDRKRYTSTKEVLDATLIHQSITGLYETRIDLSQLGGDGGEAAAKGSSPAPGGMDPLQLLQPLEAEIKGTKLKAHWNSGATITCVPEAFLEDERPIQTMLIKTIHGEKQQDVYYLTFKVQGRKVEAEVLASPYDYILLNPSDVPWLMKKPLQLTVLVPLHEYQERLLQQTALPKEQKELLQKLFLKYDALWQHWENQVGHRRIKPHNIATGTLAPRPQKQYPINPKAKPSIQIVIDDLLKQGVLIQQNSTMNTPVYPVPKPDGKWRMVLDYREVNKTIPLIAAQNQHSAGILSSIYRGKYKTTLDLTNGFWAHPITPESYWLTAFTWQGKQYCWTRLPQGFLNSPALFTADVVDLLKEIPNVQAYVDDIYISHDDPQEHLEQLEKIFSILLNAGYVVSLKKSEIAQREVEFLGFNITKEGRGLTDTFKQKLLNITPPKDLKQLQSILGLLNFARNFIPNYSELVKPLYTIVANANGKFISWTEDNSNQLQHIISVLNQADNLEERNPETRLIIKVNSSPSAGYIRYYNEGSKRPIMYVNYIFSKAEAKFTQTEKLLTTMHKGLIKAMDLAMGQEILVYSPIVSMTKIQRTPLPERKALPVRWITWMTYLEDPRIQFHYDKSLPELQQIPNVTEDVIAKTKHPSEFAMVFYTDGSAIKHPDVNKSHSAGMGIAQVQFIPEYKIVHQWSIPLGDHTAQLAEIAAVEFACKKALKISGPVLIVTDSFYVAESANKELPYWKSNGFLNNKKKPLRHVSKWKSIAECLQLKPDIIIMHEKGHQQPMTTLHTEGNNLADKLATQGSYVVHAGKRTADGSEFEKRTADGSEFESPKKKAKVE

SEQ ID NO: 415 - protein, 2174 aa, synthetic construct
MPAAKRVKLDGGDKKYSIGLDIGTNSVGWAVITDEYKVPSKKFKVLGNTDRHSIKKNLIGALLFDSGETAEATRLKRTARRRYTRRKNRICYLQEIFSNEMAKVDDSFFHRLEESFLVEEDKKHERHPIFGNIVDEVAYHEKYPTIYHLRKKLVDSTDKADLRLIYLALAHMIKFRGHFLIEGDLNPDNSDVDKLFIQLVQTYNQLFEENPINASGVDAKAILSARLSKSRRLENLIAQLPGEKKNGLFGNLIALSLGLTPNFKSNFDLAEDAKLQLSKDTYDDDLDNLLAQIGDQYADLFLAAKNLSDAILLSDILRVNTEITKAPLSASMIKRYDEHHQDLTLLKALVRQQLPEKYKEIFFDQSKNGYAGYIDGGASQEEFYKFIKPILEKMDGTEELLVKLNREDLLRKQRTFDNGSIPHQIHLGELHAILRRQEDFYPFLKDNREKIEKILTFRIPYYVGPLARGNSRFAWMTRKSEETITPWNFEEVVDKGASAQSFIERMTNFDKNLPNEKVLPKHSLLYEYFTVYNELTKVKYVTEGMRKPAFLSGEQKKAIVDLLFKTNRKVTVKQLKEDYFKKIECFDSVEISGVEDRFNASLGTYHDLLKIIKDKDFLDNEENEDILEDIVLTLTLFEDREMIEERLKTYAHLFDDKVMKQLKRRRYTGWGRLSRKLINGIRDKQSGKTILDFLKSDGFANRNFMQLIHDDSLTFKEDIQKAQVSGQGDSLHEHIANLAGSPAIKKGILQTVKVVDELVKVMGRHKPENIVIEMARENQTTQKGQKNSRERMKRIEEGIKELGSQILKEHPVENTQLQNEKLYLYYLQNGRDMYVDQELDINRLSDYDVDHIVPQSFLKDDSIDNKVLTRSDKARGKSDNVPSEEVVKKMKNYWRQLLNAKLITQRKFDNLTKAERGGLSELDKAGFIKRQLVETRQITKHVAQILDSRMNTKYDENDKLIREVKVITLKSKLVSDFRKDFQFYKVREINNYHHAHDAYLNAVVGTALIKKYPKLESEFVYGDYKVYDVRKMIAKSEQEIGKATAKYFFYSNIMNFFKTEITLANGEIRKRPLIETNGETGEIVWDKGRDFATVRKVLSMPQVNIVKKTEVQTGGFSKESILPKRNSDKLIARKKDWDPKKYGGFDSPTVAYSVLVVAKVEKGKSKKLKSVKELLGITIMERSSFEKNPIDFLEAKGYKEVKKDLIIKLPKYSLFELENGRKRMLASAGELQKGNELALPSKYVNFLYLASHYEKLKGSPEDNEQKQLFVEQHKHYLDEIIEQISEFSKRVILADANLDKVLSAYNKHRDKPIREQAENIIHLFTLTNLGAPAAFKYFDTTIDRKRYTSTKEVLDATLIHQSITGLYETRIDLSQLGGDGGGGGPAPGSSGGMDPLQLLQPLEAEIKGTKLKAHWNSGATITCVPEAFLEDERPIQTMLIKTIHGEKQQDVYYLTFKVQGRKVEAEVLASPYDYILLNPSDVPWLMKKPLQLTVLVPLHEYQERLLQQTALPKEQKELLQKLFLKYDALWQHWENQVGHRRIKPHNIATGTLAPRPQKQYPINPKAKPSIQIVIDDLLKQGVLIQQNSTMNTPVYPVPKPDGKWRMVLDYREVNKTIPLIAAQNQHSAGILSSIYRGKYKTTLDLTNGFWAHPITPESYWLTAFTWQGKQYCWTRLPQGFLNSPALFTADVVDLLKEIPNVQAYVDDIYISHDDPQEHLEQLEKIFSILLNAGYVVSLKKSEIAQREVEFLGFNITKEGRGLTDTFKQKLLNITPPKDLKQLQSILGLLNFARNFIPNYSELVKPLYTIVANANGKFISWTEDNSNQLQHIISVLNQADNLEERNPETRLIIKVNSSPSAGYIRYYNEGSKRPIMYVNYIFSKAEAKFTQTEKLLTTMHKGLIKAMDLAMGQEILVYSPIVSMTKIQRTPLPERKALPVRWITWMTYLEDPRIQFHYDKSLPELQQIPNVTEDVIAKTKHPSEFAMVFYTDGSAIKHPDVNKSHSAGMGIAQVQFIPEYKIVHQWSIPLGDHTAQLAEIAAVEFACKKALKISGPVLIVTDSFYVAESANKELPYWKSNGFLNNKKKPLRHVSKWKSIAECLQLKPDIIIMHEKGHQQPMTTLHTEGNNLADKLATQGSYVVHAGKRTADGSEFEKRTADGSEFESPKKKAKVE

SEQ ID NO: 416 - protein, 2173 aa, synthetic construct
MPAAKRVKLDGGDKKYSIGLDIGTNSVGWAVITDEYKVPSKKFKVLGNTDRHSIKKNLIGALLFDSGETAEATRLKRTARRRYTRRKNRICYLQEIFSNEMAKVDDSFFHRLEESFLVEEDKKHERHPIFGNIVDEVAYHEKYPTIYHLRKKLVDSTDKADLRLIYLALAHMIKFRGHFLIEGDLNPDNSDVDKLFIQLVQTYNQLFEENPINASGVDAKAILSARLSKSRRLENLIAQLPGEKKNGLFGNLIALSLGLTPNFKSNFDLAEDAKLQLSKDTYDDDLDNLLAQIGDQYADLFLAAKNLSDAILLSDILRVNTEITKAPLSASMIKRYDEHHQDLTLLKALVRQQLPEKYKEIFFDQSKNGYAGYIDGGASQEEFYKFIKPILEKMDGTEELLVKLNREDLLRKQRTFDNGSIPHQIHLGELHAILRRQEDFYPFLKDNREKIEKILTFRIPYYVGPLARGNSRFAWMTRKSEETITPWNFEEVVDKGASAQSFIERMTNFDKNLPNEKVLPKHSLLYEYFTVYNELTKVKYVTEGMRKPAFLSGEQKKAIVDLLFKTNRKVTVKQLKEDYFKKIECFDSVEISGVEDRFNASLGTYHDLLKIIKDKDFLDNEENEDILEDIVLTLTLFEDREMIEERLKTYAHLFDDKVMKQLKRRRYTGWGRLSRKLINGIRDKQSGKTILDFLKSDGFANRNFMQLIHDDSLTFKEDIQKAQVSGQGDSLHEHIANLAGSPAIKKGILQTVKVVDELVKVMGRHKPENIVIEMARENQTTQKGQKNSRERMKRIEEGIKELGSQILKEHPVENTQLQNEKLYLYYLQNGRDMYVDQELDINRLSDYDVDHIVPQSFLKDDSIDNKVLTRSDKARGKSDNVPSEEVVKKMKNYWRQLLNAKLITQRKFDNLTKAERGGLSELDKAGFIKRQLVETRQITKHVAQILDSRMNTKYDENDKLIREVKVITLKSKLVSDFRKDFQFYKVREINNYHHAHDAYLNAVVGTALIKKYPKLESEFVYGDYKVYDVRKMIAKSEQEIGKATAKYFFYSNIMNFFKTEITLANGEIRKRPLIETNGETGEIVWDKGRDFATVRKVLSMPQVNIVKKTEVQTGGFSKESILPKRNSDKLIARKKDWDPKKYGGFDSPTVAYSVLVVAKVEKGKSKKLKSVKELLGITIMERSSFEKNPIDFLEAKGYKEVKKDLIIKLPKYSLFELENGRKRMLASAGELQKGNELALPSKYVNFLYLASHYEKLKGSPEDNEQKQLFVEQHKHYLDEIIEQISEFSKRVILADANLDKVLSAYNKHRDKPIREQAENIIHLFTLTNLGAPAAFKYFDTTIDRKRYTSTKEVLDATLIHQSITGLYETRIDLSQLGGDGGGGGEAAAKGGMDPLQLLQPLEAEIKGTKLKAHWNSGATITCVPEAFLEDERPIQTMLIKTIHGEKQQDVYYLTFKVQGRKVEAEVLASPYDYILLNPSDVPWLMKKPLQLTVLVPLHEYQERLLQQTALPKEQKELLQKLFLKYDALWQHWENQVGHRRIKPHNIATGTLAPRPQKQYPINPKAKPSIQIVIDDLLKQGVLIQQNSTMNTPVYPVPKPDGKWRMVLDYREVNKTIPLIAAQNQHSAGILSSIYRGKYKTTLDLTNGFWAHPITPESYWLTAFTWQGKQYCWTRLPQGFLNSPALFTADVVDLLKEIPNVQAYVDDIYISHDDPQEHLEQLEKIFSILLNAGYVVSLKKSEIAQREVEFLGFNITKEGRGLTDTFKQKLLNITPPKDLKQLQSILGLLNFARNFIPNYSELVKPLYTIVANANGKFISWTEDNSNQLQHIISVLNQADNLEERNPETRLIIKVNSSPSAGYIRYYNEGSKRPIMYVNYIFSKAEAKFTQTEKLLTTMHKGLIKAMDLAMGQEILVYSPIVSMTKIQRTPLPERKALPVRWITWMTYLEDPRIQFHYDKSLPELQQIPNVTEDVIAKTKHPSEFAMVFYTDGSAIKHPDVNKSHSAGMGIAQVQFIPEYKIVHQWSIPLGDHTAQLAEIAAVEFACKKALKISGPVLIVTDSFYVAESANKELPYWKSNGFLNNKKKPLRHVSKWKSIAECLQLKPDIIIMHEKGHQQPMTTLHTEGNNLADKLATQGSYVVHAGKRTADGSEFEKRTADGSEFESPKKKAKVE

SEQ ID NO: 417 - protein, 2176 aa, synthetic construct
MPAAKRVKLDGGDKKYSIGLDIGTNSVGWAVITDEYKVPSKKFKVLGNTDRHSIKKNLIGALLFDSGETAEATRLKRTARRRYTRRKNRICYLQEIFSNEMAKVDDSFFHRLEESFLVEEDKKHERHPIFGNIVDEVAYHEKYPTIYHLRKKLVDSTDKADLRLIYLALAHMIKFRGHFLIEGDLNPDNSDVDKLFIQLVQTYNQLFEENPINASGVDAKAILSARLSKSRRLENLIAQLPGEKKNGLFGNLIALSLGLTPNFKSNFDLAEDAKLQLSKDTYDDDLDNLLAQIGDQYADLFLAAKNLSDAILLSDILRVNTEITKAPLSASMIKRYDEHHQDLTLLKALVRQQLPEKYKEIFFDQSKNGYAGYIDGGASQEEFYKFIKPILEKMDGTEELLVKLNREDLLRKQRTFDNGSIPHQIHLGELHAILRRQEDFYPFLKDNREKIEKILTFRIPYYVGPLARGNSRFAWMTRKSEETITPWNFEEVVDKGASAQSFIERMTNFDKNLPNEKVLPKHSLLYEYFTVYNELTKVKYVTEGMRKPAFLSGEQKKAIVDLLFKTNRKVTVKQLKEDYFKKIECFDSVEISGVEDRFNASLGTYHDLLKIIKDKDFLDNEENEDILEDIVLTLTLFEDREMIEERLKTYAHLFDDKVMKQLKRRRYTGWGRLSRKLINGIRDKQSGKTILDFLKSDGFANRNFMQLIHDDSLTFKEDIQKAQVSGQGDSLHEHIANLAGSPAIKKGILQTVKVVDELVKVMGRHKPENIVIEMARENQTTQKGQKNSRERMKRIEEGIKELGSQILKEHPVENTQLQNEKLYLYYLQNGRDMYVDQELDINRLSDYDVDHIVPQSFLKDDSIDNKVLTRSDKARGKSDNVPSEEVVKKMKNYWRQLLNAKLITQRKFDNLTKAERGGLSELDKAGFIKRQLVETRQITKHVAQILDSRMNTKYDENDKLIREVKVITLKSKLVSDFRKDFQFYKVREINNYHHAHDAYLNAVVGTALIKKYPKLESEFVYGDYKVYDVRKMIAKSEQEIGKATAKYFFYSNIMNFFKTEITLANGEIRKRPLIETNGETGEIVWDKGRDFATVRKVLSMPQVNIVKKTEVQTGGFSKESILPKRNSDKLIARKKDWDPKKYGGFDSPTVAYSVLVVAKVEKGKSKKLKSVKELLGITIMERSSFEKNPIDFLEAKGYKEVKKDLIIKLPKYSLFELENGRKRMLASAGELQKGNELALPSKYVNFLYLASHYEKLKGSPEDNEQKQLFVEQHKHYLDEIIEQISEFSKRVILADANLDKVLSAYNKHRDKPIREQAENIIHLFTLTNLGAPAAFKYFDTTIDRKRYTSTKEVLDATLIHQSITGLYETRIDLSQLGGDGGGGSEAAAKPAPGGMDPLQLLQPLEAEIKGTKLKAHWNSGATITCVPEAFLEDERPIQTMLIKTIHGEKQQDVYYLTFKVQGRKVEAEVLASPYDYILLNPSDVPWLMKKPLQLTVLVPLHEYQERLLQQTALPKEQKELLQKLFLKYDALWQHWENQVGHRRIKPHNIATGTLAPRPQKQYPINPKAKPSIQIVIDDLLKQGVLIQQNSTMNTPVYPVPKPDGKWRMVLDYREVNKTIPLIAAQNQHSAGILSSIYRGKYKTTLDLTNGFWAHPITPESYWLTAFTWQGKQYCWTRLPQGFLNSPALFTADVVDLLKEIPNVQAYVDDIYISHDDPQEHLEQLEKIFSILLNAGYVVSLKKSEIAQREVEFLGFNITKEGRGLTDTFKQKLLNITPPKDLKQLQSILGLLNFARNFIPNYSELVKPLYTIVANANGKFISWTEDNSNQLQHIISVLNQADNLEERNPETRLIIKVNSSPSAGYIRYYNEGSKRPIMYVNYIFSKAEAKFTQTEKLLTTMHKGLIKAMDLAMGQEILVYSPIVSMTKIQRTPLPERKALPVRWITWMTYLEDPRIQFHYDKSLPELQQIPNVTEDVIAKTKHPSEFAMVFYTDGSAIKHPDVNKSHSAGMGIAQVQFIPEYKIVHQWSIPLGDHTAQLAEIAAVEFACKKALKISGPVLIVTDSFYVAESANKELPYWKSNGFLNNKKKPLRHVSKWKSIAECLQLKPDIIIMHEKGHQQPMTTLHTEGNNLADKLATQGSYVVHAGKRTADGSEFEKRTADGSEFESPKKKAKVE

SEQ ID NO: 418 - protein, 2177 aa, synthetic construct
MPAAKRVKLDGGDKKYSIGLDIGTNSVGWAVITDEYKVPSKKFKVLGNTDRHSIKKNLIGALLFDSGETAEATRLKRTARRRYTRRKNRICYLQEIFSNEMAKVDDSFFHRLEESFLVEEDKKHERHPIFGNIVDEVAYHEKYPTIYHLRKKLVDSTDKADLRLIYLALAHMIKFRGHFLIEGDLNPDNSDVDKLFIQLVQTYNQLFEENPINASGVDAKAILSARLSKSRRLENLIAQLPGEKKNGLFGNLIALSLGLTPNFKSNFDLAEDAKLQLSKDTYDDDLDNLLAQIGDQYADLFLAAKNLSDAILLSDILRVNTEITKAPLSASMIKRYDEHHQDLTLLKALVRQQLPEKYKEIFFDQSKNGYAGYIDGGASQEEFYKFIKPILEKMDGTEELLVKLNREDLLRKQRTFDNGSIPHQIHLGELHAILRRQEDFYPFLKDNREKIEKILTFRIPYYVGPLARGNSRFAWMTRKSEETITPWNFEEVVDKGASAQSFIERMTNFDKNLPNEKVLPKHSLLYEYFTVYNELTKVKYVTEGMRKPAFLSGEQKKAIVDLLFKTNRKVTVKQLKEDYFKKIECFDSVEISGVEDRFNASLGTYHDLLKIIKDKDFLDNEENEDILEDIVLTLTLFEDREMIEERLKTYAHLFDDKVMKQLKRRRYTGWGRLSRKLINGIRDKQSGKTILDFLKSDGFANRNFMQLIHDDSLTFKEDIQKAQVSGQGDSLHEHIANLAGSPAIKKGILQTVKVVDELVKVMGRHKPENIVIEMARENQTTQKGQKNSRERMKRIEEGIKELGSQILKEHPVENTQLQNEKLYLYYLQNGRDMYVDQELDINRLSDYDVDHIVPQSFLKDDSIDNKVLTRSDKARGKSDNVPSEEVVKKMKNYWRQLLNAKLITQRKFDNLTKAERGGLSELDKAGFIKRQLVETRQITKHVAQILDSRMNTKYDENDKLIREVKVITLKSKLVSDFRKDFQFYKVREINNYHHAHDAYLNAVVGTALIKKYPKLESEFVYGDYKVYDVRKMIAKSEQEIGKATAKYFFYSNIMNFFKTEITLANGEIRKRPLIETNGETGEIVWDKGRDFATVRKVLSMPQVNIVKKTEVQTGGFSKESILPKRNSDKLIARKKDWDPKKYGGFDSPTVAYSVLVVAKVEKGKSKKLKSVKELLGITIMERSSFEKNPIDFLEAKGYKEVKKDLIIKLPKYSLFELENGRKRMLASAGELQKGNELALPSKYVNFLYLASHYEKLKGSPEDNEQKQLFVEQHKHYLDEIIEQISEFSKRVILADANLDKVLSAYNKHRDKPIREQAENIIHLFTLTNLGAPAAFKYFDTTIDRKRYTSTKEVLDATLIHQSITGLYETRIDLSQLGGDGGGSSGSSGSSGSSGGMDPLQLLQPLEAEIKGTKLKAHWNSGATITCVPEAFLEDERPIQTMLIKTIHGEKQQDVYYLTFKVQGRKVEAEVLASPYDYILLNPSDVPWLMKKPLQLTVLVPLHEYQERLLQQTALPKEQKELLQKLFLKYDALWQHWENQVGHRRIKPHNIATGTLAPRPQKQYPINPKAKPSIQIVIDDLLKQGVLIQQNSTMNTPVYPVPKPDGKWRMVLDYREVNKTIPLIAAQNQHSAGILSSIYRGKYKTTLDLTNGFWAHPITPESYWLTAFTWQGKQYCWTRLPQGFLNSPALFTADVVDLLKEIPNVQAYVDDIYISHDDPQEHLEQLEKIFSILLNAGYVVSLKKSEIAQREVEFLGFNITKEGRGLTDTFKQKLLNITPPKDLKQLQSILGLLNFARNFIPNYSELVKPLYTIVANANGKFISWTEDNSNQLQHIISVLNQADNLEERNPETRLIIKVNSSPSAGYIRYYNEGSKRPIMYVNYIFSKAEAKFTQTEKLLTTMHKGLIKAMDLAMGQEILVYSPIVSMTKIQRTPLPERKALPVRWITWMTYLEDPRIQFHYDKSLPELQQIPNVTEDVIAKTKHPSEFAMVFYTDGSAIKHPDVNKSHSAGMGIAQVQFIPEYKIVHQWSIPLGDHTAQLAEIAAVEFACKKALKISGPVLIVTDSFYVAESANKELPYWKSNGFLNNKKKPLRHVSKWKSIAECLQLKPDIIIMHEKGHQQPMTTLHTEGNNLADKLATQGSYVVHAGKRTADGSEFEKRTADGSEFESPKKKAKVE

SEQ ID NO: 419 - protein, 2174 aa, synthetic construct
MPAAKRVKLDGGDKKYSIGLDIGTNSVGWAVITDEYKVPSKKFKVLGNTDRHSIKKNLIGALLFDSGETAEATRLKRTARRRYTRRKNRICYLQEIFSNEMAKVDDSFFHRLEESFLVEEDKKHERHPIFGNIVDEVAYHEKYPTIYHLRKKLVDSTDKADLRLIYLALAHMIKFRGHFLIEGDLNPDNSDVDKLFIQLVQTYNQLFEENPINASGVDAKAILSARLSKSRRLENLIAQLPGEKKNGLFGNLIALSLGLTPNFKSNFDLAEDAKLQLSKDTYDDDLDNLLAQIGDQYADLFLAAKNLSDAILLSDILRVNTEITKAPLSASMIKRYDEHHQDLTLLKALVRQQLPEKYKEIFFDQSKNGYAGYIDGGASQEEFYKFIKPILEKMDGTEELLVKLNREDLLRKQRTFDNGSIPHQIHLGELHAILRRQEDFYPFLKDNREKIEKILTFRIPYYVGPLARGNSRFAWMTRKSEETITPWNFEEVVDKGASAQSFIERMTNFDKNLPNEKVLPKHSLLYEYFTVYNELTKVKYVTEGMRKPAFLSGEQKKAIVDLLFKTNRKVTVKQLKEDYFKKIECFDSVEISGVEDRFNASLGTYHDLLKIIKDKDFLDNEENEDILEDIVLTLTLFEDREMIEERLKTYAHLFDDKVMKQLKRRRYTGWGRLSRKLINGIRDKQSGKTILDFLKSDGFANRNFMQLIHDDSLTFKEDIQKAQVSGQGDSLHEHIANLAGSPAIKKGILQTVKVVDELVKVMGRHKPENIVIEMARENQTTQKGQKNSRERMKRIEEGIKELGSQILKEHPVENTQLQNEKLYLYYLQNGRDMYVDQELDINRLSDYDVDHIVPQSFLKDDSIDNKVLTRSDKARGKSDNVPSEEVVKKMKNYWRQLLNAKLITQRKFDNLTKAERGGLSELDKAGFIKRQLVETRQITKHVAQILDSRMNTKYDENDKLIREVKVITLKSKLVSDFRKDFQFYKVREINNYHHAHDAYLNAVVGTALIKKYPKLESEFVYGDYKVYDVRKMIAKSEQEIGKATAKYFFYSNIMNFFKTEITLANGEIRKRPLIETNGETGEIVWDKGRDFATVRKVLSMPQVNIVKKTEVQTGGFSKESILPKRNSDKLIARKKDWDPKKYGGFDSPTVAYSVLVVAKVEKGKSKKLKSVKELLGITIMERSSFEKNPIDFLEAKGYKEVKKDLIIKLPKYSLFELENGRKRMLASAGELQKGNELALPSKYVNFLYLASHYEKLKGSPEDNEQKQLFVEQHKHYLDEIIEQISEFSKRVILADANLDKVLSAYNKHRDKPIREQAENIIHLFTLTNLGAPAAFKYFDTTIDRKRYTSTKEVLDATLIHQSITGLYETRIDLSQLGGDGGGGGGSSPAPGGMDPLQLLQPLEAEIKGTKLKAHWNSGATITCVPEAFLEDERPIQTMLIKTIHGEKQQDVYYLTFKVQGRKVEAEVLASPYDYILLNPSDVPWLMKKPLQLTVLVPLHEYQERLLQQTALPKEQKELLQKLFLKYDALWQHWENQVGHRRIKPHNIATGTLAPRPQKQYPINPKAKPSIQIVIDDLLKQGVLIQQNSTMNTPVYPVPKPDGKWRMVLDYREVNKTIPLIAAQNQHSAGILSSIYRGKYKTTLDLTNGFWAHPITPESYWLTAFTWQGKQYCWTRLPQGFLNSPALFTADVVDLLKEIPNVQAYVDDIYISHDDPQEHLEQLEKIFSILLNAGYVVSLKKSEIAQREVEFLGFNITKEGRGLTDTFKQKLLNITPPKDLKQLQSILGLLNFARNFIPNYSELVKPLYTIVANANGKFISWTEDNSNQLQHIISVLNQADNLEERNPETRLIIKVNSSPSAGYIRYYNEGSKRPIMYVNYIFSKAEAKFTQTEKLLTTMHKGLIKAMDLAMGQEILVYSPIVSMTKIQRTPLPERKALPVRWITWMTYLEDPRIQFHYDKSLPELQQIPNVTEDVIAKTKHPSEFAMVFYTDGSAIKHPDVNKSHSAGMGIAQVQFIPEYKIVHQWSIPLGDHTAQLAEIAAVEFACKKALKISGPVLIVTDSFYVAESANKELPYWKSNGFLNNKKKPLRHVSKWKSIAECLQLKPDIIIMHEKGHQQPMTTLHTEGNNLADKLATQGSYVVHAGKRTADGSEFEKRTADGSEFESPKKKAKVE

SEQ ID NO: 420 - protein, 2176 aa, synthetic construct
MPAAKRVKLDGGDKKYSIGLDIGTNSVGWAVITDEYKVPSKKFKVLGNTDRHSIKKNLIGALLFDSGETAEATRLKRTARRRYTRRKNRICYLQEIFSNEMAKVDDSFFHRLEESFLVEEDKKHERHPIFGNIVDEVAYHEKYPTIYHLRKKLVDSTDKADLRLIYLALAHMIKFRGHFLIEGDLNPDNSDVDKLFIQLVQTYNQLFEENPINASGVDAKAILSARLSKSRRLENLIAQLPGEKKNGLFGNLIALSLGLTPNFKSNFDLAEDAKLQLSKDTYDDDLDNLLAQIGDQYADLFLAAKNLSDAILLSDILRVNTEITKAPLSASMIKRYDEHHQDLTLLKALVRQQLPEKYKEIFFDQSKNGYAGYIDGGASQEEFYKFIKPILEKMDGTEELLVKLNREDLLRKQRTFDNGSIPHQIHLGELHAILRRQEDFYPFLKDNREKIEKILTFRIPYYVGPLARGNSRFAWMTRKSEETITPWNFEEVVDKGASAQSFIERMTNFDKNLPNEKVLPKHSLLYEYFTVYNELTKVKYVTEGMRKPAFLSGEQKKAIVDLLFKTNRKVTVKQLKEDYFKKIECFDSVEISGVEDRFNASLGTYHDLLKIIKDKDFLDNEENEDILEDIVLTLTLFEDREMIEERLKTYAHLFDDKVMKQLKRRRYTGWGRLSRKLINGIRDKQSGKTILDFLKSDGFANRNFMQLIHDDSLTFKEDIQKAQVSGQGDSLHEHIANLAGSPAIKKGILQTVKVVDELVKVMGRHKPENIVIEMARENQTTQKGQKNSRERMKRIEEGIKELGSQILKEHPVENTQLQNEKLYLYYLQNGRDMYVDQELDINRLSDYDVDHIVPQSFLKDDSIDNKVLTRSDKARGKSDNVPSEEVVKKMKNYWRQLLNAKLITQRKFDNLTKAERGGLSELDKAGFIKRQLVETRQITKHVAQILDSRMNTKYDENDKLIREVKVITLKSKLVSDFRKDFQFYKVREINNYHHAHDAYLNAVVGTALIKKYPKLESEFVYGDYKVYDVRKMIAKSEQEIGKATAKYFFYSNIMNFFKTEITLANGEIRKRPLIETNGETGEIVWDKGRDFATVRKVLSMPQVNIVKKTEVQTGGFSKESILPKRNSDKLIARKKDWDPKKYGGFDSPTVAYSVLVVAKVEKGKSKKLKSVKELLGITIMERSSFEKNPIDFLEAKGYKEVKKDLIIKLPKYSLFELENGRKRMLASAGELQKGNELALPSKYVNFLYLASHYEKLKGSPEDNEQKQLFVEQHKHYLDEIIEQISEFSKRVILADANLDKVLSAYNKHRDKPIREQAENIIHLFTLTNLGAPAAFKYFDTTIDRKRYTSTKEVLDATLIHQSITGLYETRIDLSQLGGDGGGGGGSSEAAAKGGMDPLQLLQPLEAEIKGTKLKAHWNSGATITCVPEAFLEDERPIQTMLIKTIHGEKQQDVYYLTFKVQGRKVEAEVLASPYDYILLNPSDVPWLMKKPLQLTVLVPLHEYQERLLQQTALPKEQKELLQKLFLKYDALWQHWENQVGHRRIKPHNIATGTLAPRPQKQYPINPKAKPSIQIVIDDLLKQGVLIQQNSTMNTPVYPVPKPDGKWRMVLDYREVNKTIPLIAAQNQHSAGILSSIYRGKYKTTLDLTNGFWAHPITPESYWLTAFTWQGKQYCWTRLPQGFLNSPALFTADVVDLLKEIPNVQAYVDDIYISHDDPQEHLEQLEKIFSILLNAGYVVSLKKSEIAQREVEFLGFNITKEGRGLTDTFKQKLLNITPPKDLKQLQSILGLLNFARNFIPNYSELVKPLYTIVANANGKFISWTEDNSNQLQHIISVLNQADNLEERNPETRLIIKVNSSPSAGYIRYYNEGSKRPIMYVNYIFSKAEAKFTQTEKLLTTMHKGLIKAMDLAMGQEILVYSPIVSMTKIQRTPLPERKALPVRWITWMTYLEDPRIQFHYDKSLPELQQIPNVTEDVIAKTKHPSEFAMVFYTDGSAIKHPDVNKSHSAGMGIAQVQFIPEYKIVHQWSIPLGDHTAQLAEIAAVEFACKKALKISGPVLIVTDSFYVAESANKELPYWKSNGFLNNKKKPLRHVSKWKSIAECLQLKPDIIIMHEKGHQQPMTTLHTEGNNLADKLATQGSYVVHAGKRTADGSEFEKRTADGSEFESPKKKAKVE

SEQ ID NO: 421 - protein, 2180 aa, synthetic construct
MPAAKRVKLDGGDKKYSIGLDIGTNSVGWAVITDEYKVPSKKFKVLGNTDRHSIKKNLIGALLFDSGETAEATRLKRTARRRYTRRKNRICYLQEIFSNEMAKVDDSFFHRLEESFLVEEDKKHERHPIFGNIVDEVAYHEKYPTIYHLRKKLVDSTDKADLRLIYLALAHMIKFRGHFLIEGDLNPDNSDVDKLFIQLVQTYNQLFEENPINASGVDAKAILSARLSKSRRLENLIAQLPGEKKNGLFGNLIALSLGLTPNFKSNFDLAEDAKLQLSKDTYDDDLDNLLAQIGDQYADLFLAAKNLSDAILLSDILRVNTEITKAPLSASMIKRYDEHHQDLTLLKALVRQQLPEKYKEIFFDQSKNGYAGYIDGGASQEEFYKFIKPILEKMDGTEELLVKLNREDLLRKQRTFDNGSIPHQIHLGELHAILRRQEDFYPFLKDNREKIEKILTFRIPYYVGPLARGNSRFAWMTRKSEETITPWNFEEVVDKGASAQSFIERMTNFDKNLPNEKVLPKHSLLYEYFTVYNELTKVKYVTEGMRKPAFLSGEQKKAIVDLLFKTNRKVTVKQLKEDYFKKIECFDSVEISGVEDRFNASLGTYHDLLKIIKDKDFLDNEENEDILEDIVLTLTLFEDREMIEERLKTYAHLFDDKVMKQLKRRRYTGWGRLSRKLINGIRDKQSGKTILDFLKSDGFANRNFMQLIHDDSLTFKEDIQKAQVSGQGDSLHEHIANLAGSPAIKKGILQTVKVVDELVKVMGRHKPENIVIEMARENQTTQKGQKNSRERMKRIEEGIKELGSQILKEHPVENTQLQNEKLYLYYLQNGRDMYVDQELDINRLSDYDVDHIVPQSFLKDDSIDNKVLTRSDKARGKSDNVPSEEVVKKMKNYWRQLLNAKLITQRKFDNLTKAERGGLSELDKAGFIKRQLVETRQITKHVAQILDSRMNTKYDENDKLIREVKVITLKSKLVSDFRKDFQFYKVREINNYHHAHDAYLNAVVGTALIKKYPKLESEFVYGDYKVYDVRKMIAKSEQEIGKATAKYFFYSNIMNFFKTEITLANGEIRKRPLIETNGETGEIVWDKGRDFATVRKVLSMPQVNIVKKTEVQTGGFSKESILPKRNSDKLIARKKDWDPKKYGGFDSPTVAYSVLVVAKVEKGKSKKLKSVKELLGITIMERSSFEKNPIDFLEAKGYKEVKKDLIIKLPKYSLFELENGRKRMLASAGELQKGNELALPSKYVNFLYLASHYEKLKGSPEDNEQKQLFVEQHKHYLDEIIEQISEFSKRVILADANLDKVLSAYNKHRDKPIREQAENIIHLFTLTNLGAPAAFKYFDTTIDRKRYTSTKEVLDATLIHQSITGLYETRIDLSQLGGDGGGGGGSEAAAKGGGGSGGMDPLQLLQPLEAEIKGTKLKAHWNSGATITCVPEAFLEDERPIQTMLIKTIHGEKQQDVYYLTFKVQGRKVEAEVLASPYDYILLNPSDVPWLMKKPLQLTVLVPLHEYQERLLQQTALPKEQKELLQKLFLKYDALWQHWENQVGHRRIKPHNIATGTLAPRPQKQYPINPKAKPSIQIVIDDLLKQGVLIQQNSTMNTPVYPVPKPDGKWRMVLDYREVNKTIPLIAAQNQHSAGILSSIYRGKYKTTLDLTNGFWAHPITPESYWLTAFTWQGKQYCWTRLPQGFLNSPALFTADVVDLLKEIPNVQAYVDDIYISHDDPQEHLEQLEKIFSILLNAGYVVSLKKSEIAQREVEFLGFNITKEGRGLTDTFKQKLLNITPPKDLKQLQSILGLLNFARNFIPNYSELVKPLYTIVANANGKFISWTEDNSNQLQHIISVLNQADNLEERNPETRLIIKVNSSPSAGYIRYYNEGSKRPIMYVNYIFSKAEAKFTQTEKLLTTMHKGLIKAMDLAMGQEILVYSPIVSMTKIQRTPLPERKALPVRWITWMTYLEDPRIQFHYDKSLPELQQIPNVTEDVIAKTKHPSEFAMVFYTDGSAIKHPDVNKSHSAGMGIAQVQFIPEYKIVHQWSIPLGDHTAQLAEIAAVEFACKKALKISGPVLIVTDSFYVAESANKELPYWKSNGFLNNKKKPLRHVSKWKSIAECLQLKPDIIIMHEKGHQQPMTTLHTEGNNLADKLATQGSYVVHAGKRTADGSEFEKRTADGSEFESPKKKAKVE

SEQ ID NO: 422 - protein, 2176 aa, synthetic construct
MPAAKRVKLDGGDKKYSIGLDIGTNSVGWAVITDEYKVPSKKFKVLGNTDRHSIKKNLIGALLFDSGETAEATRLKRTARRRYTRRKNRICYLQEIFSNEMAKVDDSFFHRLEESFLVEEDKKHERHPIFGNIVDEVAYHEKYPTIYHLRKKLVDSTDKADLRLIYLALAHMIKFRGHFLIEGDLNPDNSDVDKLFIQLVQTYNQLFEENPINASGVDAKAILSARLSKSRRLENLIAQLPGEKKNGLFGNLIALSLGLTPNFKSNFDLAEDAKLQLSKDTYDDDLDNLLAQIGDQYADLFLAAKNLSDAILLSDILRVNTEITKAPLSASMIKRYDEHHQDLTLLKALVRQQLPEKYKEIFFDQSKNGYAGYIDGGASQEEFYKFIKPILEKMDGTEELLVKLNREDLLRKQRTFDNGSIPHQIHLGELHAILRRQEDFYPFLKDNREKIEKILTFRIPYYVGPLARGNSRFAWMTRKSEETITPWNFEEVVDKGASAQSFIERMTNFDKNLPNEKVLPKHSLLYEYFTVYNELTKVKYVTEGMRKPAFLSGEQKKAIVDLLFKTNRKVTVKQLKEDYFKKIECFDSVEISGVEDRFNASLGTYHDLLKIIKDKDFLDNEENEDILEDIVLTLTLFEDREMIEERLKTYAHLFDDKVMKQLKRRRYTGWGRLSRKLINGIRDKQSGKTILDFLKSDGFANRNFMQLIHDDSLTFKEDIQKAQVSGQGDSLHEHIANLAGSPAIKKGILQTVKVVDELVKVMGRHKPENIVIEMARENQTTQKGQKNSRERMKRIEEGIKELGSQILKEHPVENTQLQNEKLYLYYLQNGRDMYVDQELDINRLSDYDVDHIVPQSFLKDDSIDNKVLTRSDKARGKSDNVPSEEVVKKMKNYWRQLLNAKLITQRKFDNLTKAERGGLSELDKAGFIKRQLVETRQITKHVAQILDSRMNTKYDENDKLIREVKVITLKSKLVSDFRKDFQFYKVREINNYHHAHDAYLNAVVGTALIKKYPKLESEFVYGDYKVYDVRKMIAKSEQEIGKATAKYFFYSNIMNFFKTEITLANGEIRKRPLIETNGETGEIVWDKGRDFATVRKVLSMPQVNIVKKTEVQTGGFSKESILPKRNSDKLIARKKDWDPKKYGGFDSPTVAYSVLVVAKVEKGKSKKLKSVKELLGITIMERSSFEKNPIDFLEAKGYKEVKKDLIIKLPKYSLFELENGRKRMLASAGELQKGNELALPSKYVNFLYLASHYEKLKGSPEDNEQKQLFVEQHKHYLDEIIEQISEFSKRVILADANLDKVLSAYNKHRDKPIREQAENIIHLFTLTNLGAPAAFKYFDTTIDRKRYTSTKEVLDATLIHQSITGLYETRIDLSQLGGDGGGGGEAAAKGGSGGMDPLQLLQPLEAEIKGTKLKAHWNSGATITCVPEAFLEDERPIQTMLIKTIHGEKQQDVYYLTFKVQGRKVEAEVLASPYDYILLNPSDVPWLMKKPLQLTVLVPLHEYQERLLQQTALPKEQKELLQKLFLKYDALWQHWENQVGHRRIKPHNIATGTLAPRPQKQYPINPKAKPSIQIVIDDLLKQGVLIQQNSTMNTPVYPVPKPDGKWRMVLDYREVNKTIPLIAAQNQHSAGILSSIYRGKYKTTLDLTNGFWAHPITPESYWLTAFTWQGKQYCWTRLPQGFLNSPALFTADVVDLLKEIPNVQAYVDDIYISHDDPQEHLEQLEKIFSILLNAGYVVSLKKSEIAQREVEFLGFNITKEGRGLTDTFKQKLLNITPPKDLKQLQSILGLLNFARNFIPNYSELVKPLYTIVANANGKFISWTEDNSNQLQHIISVLNQADNLEERNPETRLIIKVNSSPSAGYIRYYNEGSKRPIMYVNYIFSKAEAKFTQTEKLLTTMHKGLIKAMDLAMGQEILVYSPIVSMTKIQRTPLPERKALPVRWITWMTYLEDPRIQFHYDKSLPELQQIPNVTEDVIAKTKHPSEFAMVFYTDGSAIKHPDVNKSHSAGMGIAQVQFIPEYKIVHQWSIPLGDHTAQLAEIAAVEFACKKALKISGPVLIVTDSFYVAESANKELPYWKSNGFLNNKKKPLRHVSKWKSIAECLQLKPDIIIMHEKGHQQPMTTLHTEGNNLADKLATQGSYVVHAGKRTADGSEFEKRTADGSEFESPKKKAKVE

SEQ ID NO: 423 - protein, 2171 aa, synthetic construct
MPAAKRVKLDGGDKKYSIGLDIGTNSVGWAVITDEYKVPSKKFKVLGNTDRHSIKKNLIGALLFDSGETAEATRLKRTARRRYTRRKNRICYLQEIFSNEMAKVDDSFFHRLEESFLVEEDKKHERHPIFGNIVDEVAYHEKYPTIYHLRKKLVDSTDKADLRLIYLALAHMIKFRGHFLIEGDLNPDNSDVDKLFIQLVQTYNQLFEENPINASGVDAKAILSARLSKSRRLENLIAQLPGEKKNGLFGNLIALSLGLTPNFKSNFDLAEDAKLQLSKDTYDDDLDNLLAQIGDQYADLFLAAKNLSDAILLSDILRVNTEITKAPLSASMIKRYDEHHQDLTLLKALVRQQLPEKYKEIFFDQSKNGYAGYIDGGASQEEFYKFIKPILEKMDGTEELLVKLNREDLLRKQRTFDNGSIPHQIHLGELHAILRRQEDFYPFLKDNREKIEKILTFRIPYYVGPLARGNSRFAWMTRKSEETITPWNFEEVVDKGASAQSFIERMTNFDKNLPNEKVLPKHSLLYEYFTVYNELTKVKYVTEGMRKPAFLSGEQKKAIVDLLFKTNRKVTVKQLKEDYFKKIECFDSVEISGVEDRFNASLGTYHDLLKIIKDKDFLDNEENEDILEDIVLTLTLFEDREMIEERLKTYAHLFDDKVMKQLKRRRYTGWGRLSRKLINGIRDKQSGKTILDFLKSDGFANRNFMQLIHDDSLTFKEDIQKAQVSGQGDSLHEHIANLAGSPAIKKGILQTVKVVDELVKVMGRHKPENIVIEMARENQTTQKGQKNSRERMKRIEEGIKELGSQILKEHPVENTQLQNEKLYLYYLQNGRDMYVDQELDINRLSDYDVDHIVPQSFLKDDSIDNKVLTRSDKARGKSDNVPSEEVVKKMKNYWRQLLNAKLITQRKFDNLTKAERGGLSELDKAGFIKRQLVETRQITKHVAQILDSRMNTKYDENDKLIREVKVITLKSKLVSDFRKDFQFYKVREINNYHHAHDAYLNAVVGTALIKKYPKLESEFVYGDYKVYDVRKMIAKSEQEIGKATAKYFFYSNIMNFFKTEITLANGEIRKRPLIETNGETGEIVWDKGRDFATVRKVLSMPQVNIVKKTEVQTGGFSKESILPKRNSDKLIARKKDWDPKKYGGFDSPTVAYSVLVVAKVEKGKSKKLKSVKELLGITIMERSSFEKNPIDFLEAKGYKEVKKDLIIKLPKYSLFELENGRKRMLASAGELQKGNELALPSKYVNFLYLASHYEKLKGSPEDNEQKQLFVEQHKHYLDEIIEQISEFSKRVILADANLDKVLSAYNKHRDKPIREQAENIIHLFTLTNLGAPAAFKYFDTTIDRKRYTSTKEVLDATLIHQSITGLYETRIDLSQLGGDGGGSSGSSGGMDPLQLLQPLEAEIKGTKLKAHWNSGATITCVPEAFLEDERPIQTMLIKTIHGEKQQDVYYLTFKVQGRKVEAEVLASPYDYILLNPSDVPWLMKKPLQLTVLVPLHEYQERLLQQTALPKEQKELLQKLFLKYDALWQHWENQVGHRRIKPHNIATGTLAPRPQKQYPINPKAKPSIQIVIDDLLKQGVLIQQNSTMNTPVYPVPKPDGKWRMVLDYREVNKTIPLIAAQNQHSAGILSSIYRGKYKTTLDLTNGFWAHPITPESYWLTAFTWQGKQYCWTRLPQGFLNSPALFTADVVDLLKEIPNVQAYVDDIYISHDDPQEHLEQLEKIFSILLNAGYVVSLKKSEIAQREVEFLGFNITKEGRGLTDTFKQKLLNITPPKDLKQLQSILGLLNFARNFIPNYSELVKPLYTIVANANGKFISWTEDNSNQLQHIISVLNQADNLEERNPETRLIIKVNSSPSAGYIRYYNEGSKRPIMYVNYIFSKAEAKFTQTEKLLTTMHKGLIKAMDLAMGQEILVYSPIVSMTKIQRTPLPERKALPVRWITWMTYLEDPRIQFHYDKSLPELQQIPNVTEDVIAKTKHPSEFAMVFYTDGSAIKHPDVNKSHSAGMGIAQVQFIPEYKIVHQWSIPLGDHTAQLAEIAAVEFACKKALKISGPVLIVTDSFYVAESANKELPYWKSNGFLNNKKKPLRHVSKWKSIAECLQLKPDIIIMHEKGHQQPMTTLHTEGNNLADKLATQGSYVVHAGKRTADGSEFEKRTADGSEFESPKKKAKVE

SEQ ID NO: 424 - protein, 2176 aa, synthetic construct
MPAAKRVKLDGGDKKYSIGLDIGTNSVGWAVITDEYKVPSKKFKVLGNTDRHSIKKNLIGALLFDSGETAEATRLKRTARRRYTRRKNRICYLQEIFSNEMAKVDDSFFHRLEESFLVEEDKKHERHPIFGNIVDEVAYHEKYPTIYHLRKKLVDSTDKADLRLIYLALAHMIKFRGHFLIEGDLNPDNSDVDKLFIQLVQTYNQLFEENPINASGVDAKAILSARLSKSRRLENLIAQLPGEKKNGLFGNLIALSLGLTPNFKSNFDLAEDAKLQLSKDTYDDDLDNLLAQIGDQYADLFLAAKNLSDAILLSDILRVNTEITKAPLSASMIKRYDEHHQDLTLLKALVRQQLPEKYKEIFFDQSKNGYAGYIDGGASQEEFYKFIKPILEKMDGTEELLVKLNREDLLRKQRTFDNGSIPHQIHLGELHAILRRQEDFYPFLKDNREKIEKILTFRIPYYVGPLARGNSRFAWMTRKSEETITPWNFEEVVDKGASAQSFIERMTNFDKNLPNEKVLPKHSLLYEYFTVYNELTKVKYVTEGMRKPAFLSGEQKKAIVDLLFKTNRKVTVKQLKEDYFKKIECFDSVEISGVEDRFNASLGTYHDLLKIIKDKDFLDNEENEDILEDIVLTLTLFEDREMIEERLKTYAHLFDDKVMKQLKRRRYTGWGRLSRKLINGIRDKQSGKTILDFLKSDGFANRNFMQLIHDDSLTFKEDIQKAQVSGQGDSLHEHIANLAGSPAIKKGILQTVKVVDELVKVMGRHKPENIVIEMARENQTTQKGQKNSRERMKRIEEGIKELGSQILKEHPVENTQLQNEKLYLYYLQNGRDMYVDQELDINRLSDYDVDHIVPQSFLKDDSIDNKVLTRSDKARGKSDNVPSEEVVKKMKNYWRQLLNAKLITQRKFDNLTKAERGGLSELDKAGFIKRQLVETRQITKHVAQILDSRMNTKYDENDKLIREVKVITLKSKLVSDFRKDFQFYKVREINNYHHAHDAYLNAVVGTALIKKYPKLESEFVYGDYKVYDVRKMIAKSEQEIGKATAKYFFYSNIMNFFKTEITLANGEIRKRPLIETNGETGEIVWDKGRDFATVRKVLSMPQVNIVKKTEVQTGGFSKESILPKRNSDKLIARKKDWDPKKYGGFDSPTVAYSVLVVAKVEKGKSKKLKSVKELLGITIMERSSFEKNPIDFLEAKGYKEVKKDLIIKLPKYSLFELENGRKRMLASAGELQKGNELALPSKYVNFLYLASHYEKLKGSPEDNEQKQLFVEQHKHYLDEIIEQISEFSKRVILADANLDKVLSAYNKHRDKPIREQAENIIHLFTLTNLGAPAAFKYFDTTIDRKRYTSTKEVLDATLIHQSITGLYETRIDLSQLGGDGGPAPGGGEAAAKGGMDPLQLLQPLEAEIKGTKLKAHWNSGATITCVPEAFLEDERPIQTMLIKTIHGEKQQDVYYLTFKVQGRKVEAEVLASPYDYILLNPSDVPWLMKKPLQLTVLVPLHEYQERLLQQTALPKEQKELLQKLFLKYDALWQHWENQVGHRRIKPHNIATGTLAPRPQKQYPINPKAKPSIQIVIDDLLKQGVLIQQNSTMNTPVYPVPKPDGKWRMVLDYREVNKTIPLIAAQNQHSAGILSSIYRGKYKTTLDLTNGFWAHPITPESYWLTAFTWQGKQYCWTRLPQGFLNSPALFTADVVDLLKEIPNVQAYVDDIYISHDDPQEHLEQLEKIFSILLNAGYVVSLKKSEIAQREVEFLGFNITKEGRGLTDTFKQKLLNITPPKDLKQLQSILGLLNFARNFIPNYSELVKPLYTIVANANGKFISWTEDNSNQLQHIISVLNQADNLEERNPETRLIIKVNSSPSAGYIRYYNEGSKRPIMYVNYIFSKAEAKFTQTEKLLTTMHKGLIKAMDLAMGQEILVYSPIVSMTKIQRTPLPERKALPVRWITWMTYLEDPRIQFHYDKSLPELQQIPNVTEDVIAKTKHPSEFAMVFYTDGSAIKHPDVNKSHSAGMGIAQVQFIPEYKIVHQWSIPLGDHTAQLAEIAAVEFACKKALKISGPVLIVTDSFYVAESANKELPYWKSNGFLNNKKKPLRHVSKWKSIAECLQLKPDIIIMHEKGHQQPMTTLHTEGNNLADKLATQGSYVVHAGKRTADGSEFEKRTADGSEFESPKKKAKVE

SEQ ID NO: 425 - protein, 2174 aa, synthetic construct
MPAAKRVKLDGGDKKYSIGLDIGTNSVGWAVITDEYKVPSKKFKVLGNTDRHSIKKNLIGALLFDSGETAEATRLKRTARRRYTRRKNRICYLQEIFSNEMAKVDDSFFHRLEESFLVEEDKKHERHPIFGNIVDEVAYHEKYPTIYHLRKKLVDSTDKADLRLIYLALAHMIKFRGHFLIEGDLNPDNSDVDKLFIQLVQTYNQLFEENPINASGVDAKAILSARLSKSRRLENLIAQLPGEKKNGLFGNLIALSLGLTPNFKSNFDLAEDAKLQLSKDTYDDDLDNLLAQIGDQYADLFLAAKNLSDAILLSDILRVNTEITKAPLSASMIKRYDEHHQDLTLLKALVRQQLPEKYKEIFFDQSKNGYAGYIDGGASQEEFYKFIKPILEKMDGTEELLVKLNREDLLRKQRTFDNGSIPHQIHLGELHAILRRQEDFYPFLKDNREKIEKILTFRIPYYVGPLARGNSRFAWMTRKSEETITPWNFEEVVDKGASAQSFIERMTNFDKNLPNEKVLPKHSLLYEYFTVYNELTKVKYVTEGMRKPAFLSGEQKKAIVDLLFKTNRKVTVKQLKEDYFKKIECFDSVEISGVEDRFNASLGTYHDLLKIIKDKDFLDNEENEDILEDIVLTLTLFEDREMIEERLKTYAHLFDDKVMKQLKRRRYTGWGRLSRKLINGIRDKQSGKTILDFLKSDGFANRNFMQLIHDDSLTFKEDIQKAQVSGQGDSLHEHIANLAGSPAIKKGILQTVKVVDELVKVMGRHKPENIVIEMARENQTTQKGQKNSRERMKRIEEGIKELGSQILKEHPVENTQLQNEKLYLYYLQNGRDMYVDQELDINRLSDYDVDHIVPQSFLKDDSIDNKVLTRSDKARGKSDNVPSEEVVKKMKNYWRQLLNAKLITQRKFDNLTKAERGGLSELDKAGFIKRQLVETRQITKHVAQILDSRMNTKYDENDKLIREVKVITLKSKLVSDFRKDFQFYKVREINNYHHAHDAYLNAVVGTALIKKYPKLESEFVYGDYKVYDVRKMIAKSEQEIGKATAKYFFYSNIMNFFKTEITLANGEIRKRPLIETNGETGEIVWDKGRDFATVRKVLSMPQVNIVKKTEVQTGGFSKESILPKRNSDKLIARKKDWDPKKYGGFDSPTVAYSVLVVAKVEKGKSKKLKSVKELLGITIMERSSFEKNPIDFLEAKGYKEVKKDLIIKLPKYSLFELENGRKRMLASAGELQKGNELALPSKYVNFLYLASHYEKLKGSPEDNEQKQLFVEQHKHYLDEIIEQISEFSKRVILADANLDKVLSAYNKHRDKPIREQAENIIHLFTLTNLGAPAAFKYFDTTIDRKRYTSTKEVLDATLIHQSITGLYETRIDLSQLGGDGGGGSGGSGGSGGMDPLQLLQPLEAEIKGTKLKAHWNSGATITCVPEAFLEDERPIQTMLIKTIHGEKQQDVYYLTFKVQGRKVEAEVLASPYDYILLNPSDVPWLMKKPLQLTVLVPLHEYQERLLQQTALPKEQKELLQKLFLKYDALWQHWENQVGHRRIKPHNIATGTLAPRPQKQYPINPKAKPSIQIVIDDLLKQGVLIQQNSTMNTPVYPVPKPDGKWRMVLDYREVNKTIPLIAAQNQHSAGILSSIYRGKYKTTLDLTNGFWAHPITPESYWLTAFTWQGKQYCWTRLPQGFLNSPALFTADVVDLLKEIPNVQAYVDDIYISHDDPQEHLEQLEKIFSILLNAGYVVSLKKSEIAQREVEFLGFNITKEGRGLTDTFKQKLLNITPPKDLKQLQSILGLLNFARNFIPNYSELVKPLYTIVANANGKFISWTEDNSNQLQHIISVLNQADNLEERNPETRLIIKVNSSPSAGYIRYYNEGSKRPIMYVNYIFSKAEAKFTQTEKLLTTMHKGLIKAMDLAMGQEILVYSPIVSMTKIQRTPLPERKALPVRWITWMTYLEDPRIQFHYDKSLPELQQIPNVTEDVIAKTKHPSEFAMVFYTDGSAIKHPDVNKSHSAGMGIAQVQFIPEYKIVHQWSIPLGDHTAQLAEIAAVEFACKKALKISGPVLIVTDSFYVAESANKELPYWKSNGFLNNKKKPLRHVSKWKSIAECLQLKPDIIIMHEKGHQQPMTTLHTEGNNLADKLATQGSYVVHAGKRTADGSEFEKRTADGSEFESPKKKAKVE

SEQ ID NO: 426 - protein, 2094 aa, synthetic construct
MPAAKRVKLDGGDKKYSIGLDIGTNSVGWAVITDEYKVPSKKFKVLGNTDRHSIKKNLIGALLFDSGETAEATRLKRTARRRYTRRKNRICYLQEIFSNEMAKVDDSFFHRLEESFLVEEDKKHERHPIFGNIVDEVAYHEKYPTIYHLRKKLVDSTDKADLRLIYLALAHMIKFRGHFLIEGDLNPDNSDVDKLFIQLVQTYNQLFEENPINASGVDAKAILSARLSKSRRLENLIAQLPGEKKNGLFGNLIALSLGLTPNFKSNFDLAEDAKLQLSKDTYDDDLDNLLAQIGDQYADLFLAAKNLSDAILLSDILRVNTEITKAPLSASMIKRYDEHHQDLTLLKALVRQQLPEKYKEIFFDQSKNGYAGYIDGGASQEEFYKFIKPILEKMDGTEELLVKLNREDLLRKQRTFDNGSIPHQIHLGELHAILRRQEDFYPFLKDNREKIEKILTFRIPYYVGPLARGNSRFAWMTRKSEETITPWNFEEVVDKGASAQSFIERMTNFDKNLPNEKVLPKHSLLYEYFTVYNELTKVKYVTEGMRKPAFLSGEQKKAIVDLLFKTNRKVTVKQLKEDYFKKIECFDSVEISGVEDRFNASLGTYHDLLKIIKDKDFLDNEENEDILEDIVLTLTLFEDREMIEERLKTYAHLFDDKVMKQLKRRRYTGWGRLSRKLINGIRDKQSGKTILDFLKSDGFANRNFMQLIHDDSLTFKEDIQKAQVSGQGDSLHEHIANLAGSPAIKKGILQTVKVVDELVKVMGRHKPENIVIEMARENQTTQKGQKNSRERMKRIEEGIKELGSQILKEHPVENTQLQNEKLYLYYLQNGRDMYVDQELDINRLSDYDVDHIVPQSFLKDDSIDNKVLTRSDKARGKSDNVPSEEVVKKMKNYWRQLLNAKLITQRKFDNLTKAERGGLSELDKAGFIKRQLVETRQITKHVAQILDSRMNTKYDENDKLIREVKVITLKSKLVSDFRKDFQFYKVREINNYHHAHDAYLNAVVGTALIKKYPKLESEFVYGDYKVYDVRKMIAKSEQEIGKATAKYFFYSNIMNFFKTEITLANGEIRKRPLIETNGETGEIVWDKGRDFATVRKVLSMPQVNIVKKTEVQTGGFSKESILPKRNSDKLIARKKDWDPKKYGGFDSPTVAYSVLVVAKVEKGKSKKLKSVKELLGITIMERSSFEKNPIDFLEAKGYKEVKKDLIIKLPKYSLFELENGRKRMLASAGELQKGNELALPSKYVNFLYLASHYEKLKGSPEDNEQKQLFVEQHKHYLDEIIEQISEFSKRVILADANLDKVLSAYNKHRDKPIREQAENIIHLFTLTNLGAPAAFKYFDTTIDRKRYTSTKEVLDATLIHQSITGLYETRIDLSQLGGDGGGSSGSSGSSGSSGSSGSSGGVPWLMKKPLQLTVLVPLHEYQERLLQQTALPKEQKELLQKLFLKYDALWQHWENQVGHRRIKPHNIATGTLAPRPQKQYPINPKAKPSIQIVIDDLLKQGVLIQQNSTMNTPVYPVPKPDGKWRMVLDYREVNKTIPLIAAQNQHSAGILSSIYRGKYKTTLDLTNGFWAHPITPESYWLTAFTWQGKQYCWTRLPQGFLNSPALFTADVVDLLKEIPNVQAYVDDIYISHDDPQEHLEQLEKIFSILLNAGYVVSLKKSEIAQREVEFLGFNITKEGRGLTDTFKQKLLNITPPKDLKQLQSILGLLNFARNFIPNYSELVKPLYTIVANANGKFISWTEDNSNQLQHIISVLNQADNLEERNPETRLIIKVNSSPSAGYIRYYNEGSKRPIMYVNYIFSKAEAKFTQTEKLLTTMHKGLIKAMDLAMGQEILVYSPIVSMTKIQRTPLPERKALPVRWITWMTYLEDPRIQFHYDKSLPELQQIPNVTEDVIAKTKHPSEFAMVFYTDGSAIKHPDVNKSHSAGMGIAQVQFIPEYKIVHQWSIPLGDHTAQLAEIAAVEFACKKALKISGPVLIVTDSFYVAESANKELPYWKSNGFLNNKKKPLRHVSKWKSIAECLQLKPDIIIMHEKGHQQPMTTLHTEGNNLADKLATQGSYVVHAGKRTADGSEFEKRTADGSEFESPKKKAKVE

SEQ ID NO: 427 - protein, 2087 aa, synthetic construct
MPAAKRVKLDGGDKKYSIGLDIGTNSVGWAVITDEYKVPSKKFKVLGNTDRHSIKKNLIGALLFDSGETAEATRLKRTARRRYTRRKNRICYLQEIFSNEMAKVDDSFFHRLEESFLVEEDKKHERHPIFGNIVDEVAYHEKYPTIYHLRKKLVDSTDKADLRLIYLALAHMIKFRGHFLIEGDLNPDNSDVDKLFIQLVQTYNQLFEENPINASGVDAKAILSARLSKSRRLENLIAQLPGEKKNGLFGNLIALSLGLTPNFKSNFDLAEDAKLQLSKDTYDDDLDNLLAQIGDQYADLFLAAKNLSDAILLSDILRVNTEITKAPLSASMIKRYDEHHQDLTLLKALVRQQLPEKYKEIFFDQSKNGYAGYIDGGASQEEFYKFIKPILEKMDGTEELLVKLNREDLLRKQRTFDNGSIPHQIHLGELHAILRRQEDFYPFLKDNREKIEKILTFRIPYYVGPLARGNSRFAWMTRKSEETITPWNFEEVVDKGASAQSFIERMTNFDKNLPNEKVLPKHSLLYEYFTVYNELTKVKYVTEGMRKPAFLSGEQKKAIVDLLFKTNRKVTVKQLKEDYFKKIECFDSVEISGVEDRFNASLGTYHDLLKIIKDKDFLDNEENEDILEDIVLTLTLFEDREMIEERLKTYAHLFDDKVMKQLKRRRYTGWGRLSRKLINGIRDKQSGKTILDFLKSDGFANRNFMQLIHDDSLTFKEDIQKAQVSGQGDSLHEHIANLAGSPAIKKGILQTVKVVDELVKVMGRHKPENIVIEMARENQTTQKGQKNSRERMKRIEEGIKELGSQILKEHPVENTQLQNEKLYLYYLQNGRDMYVDQELDINRLSDYDVDHIVPQSFLKDDSIDNKVLTRSDKARGKSDNVPSEEVVKKMKNYWRQLLNAKLITQRKFDNLTKAERGGLSELDKAGFIKRQLVETRQITKHVAQILDSRMNTKYDENDKLIREVKVITLKSKLVSDFRKDFQFYKVREINNYHHAHDAYLNAVVGTALIKKYPKLESEFVYGDYKVYDVRKMIAKSEQEIGKATAKYFFYSNIMNFFKTEITLANGEIRKRPLIETNGETGEIVWDKGRDFATVRKVLSMPQVNIVKKTEVQTGGFSKESILPKRNSDKLIARKKDWDPKKYGGFDSPTVAYSVLVVAKVEKGKSKKLKSVKELLGITIMERSSFEKNPIDFLEAKGYKEVKKDLIIKLPKYSLFELENGRKRMLASAGELQKGNELALPSKYVNFLYLASHYEKLKGSPEDNEQKQLFVEQHKHYLDEIIEQISEFSKRVILADANLDKVLSAYNKHRDKPIREQAENIIHLFTLTNLGAPAAFKYFDTTIDRKRYTSTKEVLDATLIHQSITGLYETRIDLSQLGGDGGPAPEAAAKGSSGGVPWLMKKPLQLTVLVPLHEYQERLLQQTALPKEQKELLQKLFLKYDALWQHWENQVGHRRIKPHNIATGTLAPRPQKQYPINPKAKPSIQIVIDDLLKQGVLIQQNSTMNTPVYPVPKPDGKWRMVLDYREVNKTIPLIAAQNQHSAGILSSIYRGKYKTTLDLTNGFWAHPITPESYWLTAFTWQGKQYCWTRLPQGFLNSPALFTADVVDLLKEIPNVQAYVDDIYISHDDPQEHLEQLEKIFSILLNAGYVVSLKKSEIAQREVEFLGFNITKEGRGLTDTFKQKLLNITPPKDLKQLQSILGLLNFARNFIPNYSELVKPLYTIVANANGKFISWTEDNSNQLQHIISVLNQADNLEERNPETRLIIKVNSSPSAGYIRYYNEGSKRPIMYVNYIFSKAEAKFTQTEKLLTTMHKGLIKAMDLAMGQEILVYSPIVSMTKIQRTPLPERKALPVRWITWMTYLEDPRIQFHYDKSLPELQQIPNVTEDVIAKTKHPSEFAMVFYTDGSAIKHPDVNKSHSAGMGIAQVQFIPEYKIVHQWSIPLGDHTAQLAEIAAVEFACKKALKISGPVLIVTDSFYVAESANKELPYWKSNGFLNNKKKPLRHVSKWKSIAECLQLKPDIIIMHEKGHQQPMTTLHTEGNNLADKLATQGSYVVHAGKRTADGSEFEKRTADGSEFESPKKKAKVE

SEQ ID NO: 428 - protein, 2091 aa, synthetic construct
MPAAKRVKLDGGDKKYSIGLDIGTNSVGWAVITDEYKVPSKKFKVLGNTDRHSIKKNLIGALLFDSGETAEATRLKRTARRRYTRRKNRICYLQEIFSNEMAKVDDSFFHRLEESFLVEEDKKHERHPIFGNIVDEVAYHEKYPTIYHLRKKLVDSTDKADLRLIYLALAHMIKFRGHFLIEGDLNPDNSDVDKLFIQLVQTYNQLFEENPINASGVDAKAILSARLSKSRRLENLIAQLPGEKKNGLFGNLIALSLGLTPNFKSNFDLAEDAKLQLSKDTYDDDLDNLLAQIGDQYADLFLAAKNLSDAILLSDILRVNTEITKAPLSASMIKRYDEHHQDLTLLKALVRQQLPEKYKEIFFDQSKNGYAGYIDGGASQEEFYKFIKPILEKMDGTEELLVKLNREDLLRKQRTFDNGSIPHQIHLGELHAILRRQEDFYPFLKDNREKIEKILTFRIPYYVGPLARGNSRFAWMTRKSEETITPWNFEEVVDKGASAQSFIERMTNFDKNLPNEKVLPKHSLLYEYFTVYNELTKVKYVTEGMRKPAFLSGEQKKAIVDLLFKTNRKVTVKQLKEDYFKKIECFDSVEISGVEDRFNASLGTYHDLLKIIKDKDFLDNEENEDILEDIVLTLTLFEDREMIEERLKTYAHLFDDKVMKQLKRRRYTGWGRLSRKLINGIRDKQSGKTILDFLKSDGFANRNFMQLIHDDSLTFKEDIQKAQVSGQGDSLHEHIANLAGSPAIKKGILQTVKVVDELVKVMGRHKPENIVIEMARENQTTQKGQKNSRERMKRIEEGIKELGSQILKEHPVENTQLQNEKLYLYYLQNGRDMYVDQELDINRLSDYDVDHIVPQSFLKDDSIDNKVLTRSDKARGKSDNVPSEEVVKKMKNYWRQLLNAKLITQRKFDNLTKAERGGLSELDKAGFIKRQLVETRQITKHVAQILDSRMNTKYDENDKLIREVKVITLKSKLVSDFRKDFQFYKVREINNYHHAHDAYLNAVVGTALIKKYPKLESEFVYGDYKVYDVRKMIAKSEQEIGKATAKYFFYSNIMNFFKTEITLANGEIRKRPLIETNGETGEIVWDKGRDFATVRKVLSMPQVNIVKKTEVQTGGFSKESILPKRNSDKLIARKKDWDPKKYGGFDSPTVAYSVLVVAKVEKGKSKKLKSVKELLGITIMERSSFEKNPIDFLEAKGYKEVKKDLIIKLPKYSLFELENGRKRMLASAGELQKGNELALPSKYVNFLYLASHYEKLKGSPEDNEQKQLFVEQHKHYLDEIIEQISEFSKRVILADANLDKVLSAYNKHRDKPIREQAENIIHLFTLTNLGAPAAFKYFDTTIDRKRYTSTKEVLDATLIHQSITGLYETRIDLSQLGGDGGGSSGSSGSSGSSGSSGGVPWLMKKPLQLTVLVPLHEYQERLLQQTALPKEQKELLQKLFLKYDALWQHWENQVGHRRIKPHNIATGTLAPRPQKQYPINPKAKPSIQIVIDDLLKQGVLIQQNSTMNTPVYPVPKPDGKWRMVLDYREVNKTIPLIAAQNQHSAGILSSIYRGKYKTTLDLTNGFWAHPITPESYWLTAFTWQGKQYCWTRLPQGFLNSPALFTADVVDLLKEIPNVQAYVDDIYISHDDPQEHLEQLEKIFSILLNAGYVVSLKKSEIAQREVEFLGFNITKEGRGLTDTFKQKLLNITPPKDLKQLQSILGLLNFARNFIPNYSELVKPLYTIVANANGKFISWTEDNSNQLQHIISVLNQADNLEERNPETRLIIKVNSSPSAGYIRYYNEGSKRPIMYVNYIFSKAEAKFTQTEKLLTTMHKGLIKAMDLAMGQEILVYSPIVSMTKIQRTPLPERKALPVRWITWMTYLEDPRIQFHYDKSLPELQQIPNVTEDVIAKTKHPSEFAMVFYTDGSAIKHPDVNKSHSAGMGIAQVQFIPEYKIVHQWSIPLGDHTAQLAEIAAVEFACKKALKISGPVLIVTDSFYVAESANKELPYWKSNGFLNNKKKPLRHVSKWKSIAECLQLKPDIIIMHEKGHQQPMTTLHTEGNNLADKLATQGSYVVHAGKRTADGSEFEKRTADGSEFESPKKKAKVE

SEQ ID NO: 429 - protein, 2084 aa, synthetic construct
MPAAKRVKLDGGDKKYSIGLDIGTNSVGWAVITDEYKVPSKKFKVLGNTDRHSIKKNLIGALLFDSGETAEATRLKRTARRRYTRRKNRICYLQEIFSNEMAKVDDSFFHRLEESFLVEEDKKHERHPIFGNIVDEVAYHEKYPTIYHLRKKLVDSTDKADLRLIYLALAHMIKFRGHFLIEGDLNPDNSDVDKLFIQLVQTYNQLFEENPINASGVDAKAILSARLSKSRRLENLIAQLPGEKKNGLFGNLIALSLGLTPNFKSNFDLAEDAKLQLSKDTYDDDLDNLLAQIGDQYADLFLAAKNLSDAILLSDILRVNTEITKAPLSASMIKRYDEHHQDLTLLKALVRQQLPEKYKEIFFDQSKNGYAGYIDGGASQEEFYKFIKPILEKMDGTEELLVKLNREDLLRKQRTFDNGSIPHQIHLGELHAILRRQEDFYPFLKDNREKIEKILTFRIPYYVGPLARGNSRFAWMTRKSEETITPWNFEEVVDKGASAQSFIERMTNFDKNLPNEKVLPKHSLLYEYFTVYNELTKVKYVTEGMRKPAFLSGEQKKAIVDLLFKTNRKVTVKQLKEDYFKKIECFDSVEISGVEDRFNASLGTYHDLLKIIKDKDFLDNEENEDILEDIVLTLTLFEDREMIEERLKTYAHLFDDKVMKQLKRRRYTGWGRLSRKLINGIRDKQSGKTILDFLKSDGFANRNFMQLIHDDSLTFKEDIQKAQVSGQGDSLHEHIANLAGSPAIKKGILQTVKVVDELVKVMGRHKPENIVIEMARENQTTQKGQKNSRERMKRIEEGIKELGSQILKEHPVENTQLQNEKLYLYYLQNGRDMYVDQELDINRLSDYDVDHIVPQSFLKDDSIDNKVLTRSDKARGKSDNVPSEEVVKKMKNYWRQLLNAKLITQRKFDNLTKAERGGLSELDKAGFIKRQLVETRQITKHVAQILDSRMNTKYDENDKLIREVKVITLKSKLVSDFRKDFQFYKVREINNYHHAHDAYLNAVVGTALIKKYPKLESEFVYGDYKVYDVRKMIAKSEQEIGKATAKYFFYSNIMNFFKTEITLANGEIRKRPLIETNGETGEIVWDKGRDFATVRKVLSMPQVNIVKKTEVQTGGFSKESILPKRNSDKLIARKKDWDPKKYGGFDSPTVAYSVLVVAKVEKGKSKKLKSVKELLGITIMERSSFEKNPIDFLEAKGYKEVKKDLIIKLPKYSLFELENGRKRMLASAGELQKGNELALPSKYVNFLYLASHYEKLKGSPEDNEQKQLFVEQHKHYLDEIIEQISEFSKRVILADANLDKVLSAYNKHRDKPIREQAENIIHLFTLTNLGAPAAFKYFDTTIDRKRYTSTKEVLDATLIHQSITGLYETRIDLSQLGGDGGGGGGGGGGGGVPWLMKKPLQLTVLVPLHEYQERLLQQTALPKEQKELLQKLFLKYDALWQHWENQVGHRRIKPHNIATGTLAPRPQKQYPINPKAKPSIQIVIDDLLKQGVLIQQNSTMNTPVYPVPKPDGKWRMVLDYREVNKTIPLIAAQNQHSAGILSSIYRGKYKTTLDLTNGFWAHPITPESYWLTAFTWQGKQYCWTRLPQGFLNSPALFTADVVDLLKEIPNVQAYVDDIYISHDDPQEHLEQLEKIFSILLNAGYVVSLKKSEIAQREVEFLGFNITKEGRGLTDTFKQKLLNITPPKDLKQLQSILGLLNFARNFIPNYSELVKPLYTIVANANGKFISWTEDNSNQLQHIISVLNQADNLEERNPETRLIIKVNSSPSAGYIRYYNEGSKRPIMYVNYIFSKAEAKFTQTEKLLTTMHKGLIKAMDLAMGQEILVYSPIVSMTKIQRTPLPERKALPVRWITWMTYLEDPRIQFHYDKSLPELQQIPNVTEDVIAKTKHPSEFAMVFYTDGSAIKHPDVNKSHSAGMGIAQVQFIPEYKIVHQWSIPLGDHTAQLAEIAAVEFACKKALKISGPVLIVTDSFYVAESANKELPYWKSNGFLNNKKKPLRHVSKWKSIAECLQLKPDIIIMHEKGHQQPMTTLHTEGNNLADKLATQGSYVVHAGKRTADGSEFEKRTADGSEFESPKKKAKVE

SEQ ID NO: 430 - protein, 2084 aa, synthetic construct
MPAAKRVKLDGGDKKYSIGLDIGTNSVGWAVITDEYKVPSKKFKVLGNTDRHSIKKNLIGALLFDSGETAEATRLKRTARRRYTRRKNRICYLQEIFSNEMAKVDDSFFHRLEESFLVEEDKKHERHPIFGNIVDEVAYHEKYPTIYHLRKKLVDSTDKADLRLIYLALAHMIKFRGHFLIEGDLNPDNSDVDKLFIQLVQTYNQLFEENPINASGVDAKAILSARLSKSRRLENLIAQLPGEKKNGLFGNLIALSLGLTPNFKSNFDLAEDAKLQLSKDTYDDDLDNLLAQIGDQYADLFLAAKNLSDAILLSDILRVNTEITKAPLSASMIKRYDEHHQDLTLLKALVRQQLPEKYKEIFFDQSKNGYAGYIDGGASQEEFYKFIKPILEKMDGTEELLVKLNREDLLRKQRTFDNGSIPHQIHLGELHAILRRQEDFYPFLKDNREKIEKILTFRIPYYVGPLARGNSRFAWMTRKSEETITPWNFEEVVDKGASAQSFIERMTNFDKNLPNEKVLPKHSLLYEYFTVYNELTKVKYVTEGMRKPAFLSGEQKKAIVDLLFKTNRKVTVKQLKEDYFKKIECFDSVEISGVEDRFNASLGTYHDLLKIIKDKDFLDNEENEDILEDIVLTLTLFEDREMIEERLKTYAHLFDDKVMKQLKRRRYTGWGRLSRKLINGIRDKQSGKTILDFLKSDGFANRNFMQLIHDDSLTFKEDIQKAQVSGQGDSLHEHIANLAGSPAIKKGILQTVKVVDELVKVMGRHKPENIVIEMARENQTTQKGQKNSRERMKRIEEGIKELGSQILKEHPVENTQLQNEKLYLYYLQNGRDMYVDQELDINRLSDYDVDHIVPQSFLKDDSIDNKVLTRSDKARGKSDNVPSEEVVKKMKNYWRQLLNAKLITQRKFDNLTKAERGGLSELDKAGFIKRQLVETRQITKHVAQILDSRMNTKYDENDKLIREVKVITLKSKLVSDFRKDFQFYKVREINNYHHAHDAYLNAVVGTALIKKYPKLESEFVYGDYKVYDVRKMIAKSEQEIGKATAKYFFYSNIMNFFKTEITLANGEIRKRPLIETNGETGEIVWDKGRDFATVRKVLSMPQVNIVKKTEVQTGGFSKESILPKRNSDKLIARKKDWDPKKYGGFDSPTVAYSVLVVAKVEKGKSKKLKSVKELLGITIMERSSFEKNPIDFLEAKGYKEVKKDLIIKLPKYSLFELENGRKRMLASAGELQKGNELALPSKYVNFLYLASHYEKLKGSPEDNEQKQLFVEQHKHYLDEIIEQISEFSKRVILADANLDKVLSAYNKHRDKPIREQAENIIHLFTLTNLGAPAAFKYFDTTIDRKRYTSTKEVLDATLIHQSITGLYETRIDLSQLGGDGGPAPEAAAKGGVPWLMKKPLQLTVLVPLHEYQERLLQQTALPKEQKELLQKLFLKYDALWQHWENQVGHRRIKPHNIATGTLAPRPQKQYPINPKAKPSIQIVIDDLLKQGVLIQQNSTMNTPVYPVPKPDGKWRMVLDYREVNKTIPLIAAQNQHSAGILSSIYRGKYKTTLDLTNGFWAHPITPESYWLTAFTWQGKQYCWTRLPQGFLNSPALFTADVVDLLKEIPNVQAYVDDIYISHDDPQEHLEQLEKIFSILLNAGYVVSLKKSEIAQREVEFLGFNITKEGRGLTDTFKQKLLNITPPKDLKQLQSILGLLNFARNFIPNYSELVKPLYTIVANANGKFISWTEDNSNQLQHIISVLNQADNLEERNPETRLIIKVNSSPSAGYIRYYNEGSKRPIMYVNYIFSKAEAKFTQTEKLLTTMHKGLIKAMDLAMGQEILVYSPIVSMTKIQRTPLPERKALPVRWITWMTYLEDPRIQFHYDKSLPELQQIPNVTEDVIAKTKHPSEFAMVFYTDGSAIKHPDVNKSHSAGMGIAQVQFIPEYKIVHQWSIPLGDHTAQLAEIAAVEFACKKALKISGPVLIVTDSFYVAESANKELPYWKSNGFLNNKKKPLRHVSKWKSIAECLQLKPDIIIMHEKGHQQPMTTLHTEGNNLADKLATQGSYVVHAGKRTADGSEFEKRTADGSEFESPKKKAKVE

SEQ ID NO: 431 - protein, 2082 aa, synthetic construct
MPAAKRVKLDGGDKKYSIGLDIGTNSVGWAVITDEYKVPSKKFKVLGNTDRHSIKKNLIGALLFDSGETAEATRLKRTARRRYTRRKNRICYLQEIFSNEMAKVDDSFFHRLEESFLVEEDKKHERHPIFGNIVDEVAYHEKYPTIYHLRKKLVDSTDKADLRLIYLALAHMIKFRGHFLIEGDLNPDNSDVDKLFIQLVQTYNQLFEENPINASGVDAKAILSARLSKSRRLENLIAQLPGEKKNGLFGNLIALSLGLTPNFKSNFDLAEDAKLQLSKDTYDDDLDNLLAQIGDQYADLFLAAKNLSDAILLSDILRVNTEITKAPLSASMIKRYDEHHQDLTLLKALVRQQLPEKYKEIFFDQSKNGYAGYIDGGASQEEFYKFIKPILEKMDGTEELLVKLNREDLLRKQRTFDNGSIPHQIHLGELHAILRRQEDFYPFLKDNREKIEKILTFRIPYYVGPLARGNSRFAWMTRKSEETITPWNFEEVVDKGASAQSFIERMTNFDKNLPNEKVLPKHSLLYEYFTVYNELTKVKYVTEGMRKPAFLSGEQKKAIVDLLFKTNRKVTVKQLKEDYFKKIECFDSVEISGVEDRFNASLGTYHDLLKIIKDKDFLDNEENEDILEDIVLTLTLFEDREMIEERLKTYAHLFDDKVMKQLKRRRYTGWGRLSRKLINGIRDKQSGKTILDFLKSDGFANRNFMQLIHDDSLTFKEDIQKAQVSGQGDSLHEHIANLAGSPAIKKGILQTVKVVDELVKVMGRHKPENIVIEMARENQTTQKGQKNSRERMKRIEEGIKELGSQILKEHPVENTQLQNEKLYLYYLQNGRDMYVDQELDINRLSDYDVDHIVPQSFLKDDSIDNKVLTRSDKARGKSDNVPSEEVVKKMKNYWRQLLNAKLITQRKFDNLTKAERGGLSELDKAGFIKRQLVETRQITKHVAQILDSRMNTKYDENDKLIREVKVITLKSKLVSDFRKDFQFYKVREINNYHHAHDAYLNAVVGTALIKKYPKLESEFVYGDYKVYDVRKMIAKSEQEIGKATAKYFFYSNIMNFFKTEITLANGEIRKRPLIETNGETGEIVWDKGRDFATVRKVLSMPQVNIVKKTEVQTGGFSKESILPKRNSDKLIARKKDWDPKKYGGFDSPTVAYSVLVVAKVEKGKSKKLKSVKELLGITIMERSSFEKNPIDFLEAKGYKEVKKDLIIKLPKYSLFELENGRKRMLASAGELQKGNELALPSKYVNFLYLASHYEKLKGSPEDNEQKQLFVEQHKHYLDEIIEQISEFSKRVILADANLDKVLSAYNKHRDKPIREQAENIIHLFTLTNLGAPAAFKYFDTTIDRKRYTSTKEVLDATLIHQSITGLYETRIDLSQLGGDGGGGGGGGGGVPWLMKKPLQLTVLVPLHEYQERLLQQTALPKEQKELLQKLFLKYDALWQHWENQVGHRRIKPHNIATGTLAPRPQKQYPINPKAKPSIQIVIDDLLKQGVLIQQNSTMNTPVYPVPKPDGKWRMVLDYREVNKTIPLIAAQNQHSAGILSSIYRGKYKTTLDLTNGFWAHPITPESYWLTAFTWQGKQYCWTRLPQGFLNSPALFTADVVDLLKEIPNVQAYVDDIYISHDDPQEHLEQLEKIFSILLNAGYVVSLKKSEIAQREVEFLGFNITKEGRGLTDTFKQKLLNITPPKDLKQLQSILGLLNFARNFIPNYSELVKPLYTIVANANGKFISWTEDNSNQLQHIISVLNQADNLEERNPETRLIIKVNSSPSAGYIRYYNEGSKRPIMYVNYIFSKAEAKFTQTEKLLTTMHKGLIKAMDLAMGQEILVYSPIVSMTKIQRTPLPERKALPVRWITWMTYLEDPRIQFHYDKSLPELQQIPNVTEDVIAKTKHPSEFAMVFYTDGSAIKHPDVNKSHSAGMGIAQVQFIPEYKIVHQWSIPLGDHTAQLAEIAAVEFACKKALKISGPVLIVTDSFYVAESANKELPYWKSNGFLNNKKKPLRHVSKWKSIAECLQLKPDIIIMHEKGHQQPMTTLHTEGNNLADKLATQGSYVVHAGKRTADGSEFEKRTADGSEFESPKKKAKVE

SEQ ID NO: 432 - protein, 2087 aa, synthetic construct
MPAAKRVKLDGGDKKYSIGLDIGTNSVGWAVITDEYKVPSKKFKVLGNTDRHSIKKNLIGALLFDSGETAEATRLKRTARRRYTRRKNRICYLQEIFSNEMAKVDDSFFHRLEESFLVEEDKKHERHPIFGNIVDEVAYHEKYPTIYHLRKKLVDSTDKADLRLIYLALAHMIKFRGHFLIEGDLNPDNSDVDKLFIQLVQTYNQLFEENPINASGVDAKAILSARLSKSRRLENLIAQLPGEKKNGLFGNLIALSLGLTPNFKSNFDLAEDAKLQLSKDTYDDDLDNLLAQIGDQYADLFLAAKNLSDAILLSDILRVNTEITKAPLSASMIKRYDEHHQDLTLLKALVRQQLPEKYKEIFFDQSKNGYAGYIDGGASQEEFYKFIKPILEKMDGTEELLVKLNREDLLRKQRTFDNGSIPHQIHLGELHAILRRQEDFYPFLKDNREKIEKILTFRIPYYVGPLARGNSRFAWMTRKSEETITPWNFEEVVDKGASAQSFIERMTNFDKNLPNEKVLPKHSLLYEYFTVYNELTKVKYVTEGMRKPAFLSGEQKKAIVDLLFKTNRKVTVKQLKEDYFKKIECFDSVEISGVEDRFNASLGTYHDLLKIIKDKDFLDNEENEDILEDIVLTLTLFEDREMIEERLKTYAHLFDDKVMKQLKRRRYTGWGRLSRKLINGIRDKQSGKTILDFLKSDGFANRNFMQLIHDDSLTFKEDIQKAQVSGQGDSLHEHIANLAGSPAIKKGILQTVKVVDELVKVMGRHKPENIVIEMARENQTTQKGQKNSRERMKRIEEGIKELGSQILKEHPVENTQLQNEKLYLYYLQNGRDMYVDQELDINRLSDYDVDHIVPQSFLKDDSIDNKVLTRSDKARGKSDNVPSEEVVKKMKNYWRQLLNAKLITQRKFDNLTKAERGGLSELDKAGFIKRQLVETRQITKHVAQILDSRMNTKYDENDKLIREVKVITLKSKLVSDFRKDFQFYKVREINNYHHAHDAYLNAVVGTALIKKYPKLESEFVYGDYKVYDVRKMIAKSEQEIGKATAKYFFYSNIMNFFKTEITLANGEIRKRPLIETNGETGEIVWDKGRDFATVRKVLSMPQVNIVKKTEVQTGGFSKESILPKRNSDKLIARKKDWDPKKYGGFDSPTVAYSVLVVAKVEKGKSKKLKSVKELLGITIMERSSFEKNPIDFLEAKGYKEVKKDLIIKLPKYSLFELENGRKRMLASAGELQKGNELALPSKYVNFLYLASHYEKLKGSPEDNEQKQLFVEQHKHYLDEIIEQISEFSKRVILADANLDKVLSAYNKHRDKPIREQAENIIHLFTLTNLGAPAAFKYFDTTIDRKRYTSTKEVLDATLIHQSITGLYETRIDLSQLGGDGGGGSEAAAKPAPGGVPWLMKKPLQLTVLVPLHEYQERLLQQTALPKEQKELLQKLFLKYDALWQHWENQVGHRRIKPHNIATGTLAPRPQKQYPINPKAKPSIQIVIDDLLKQGVLIQQNSTMNTPVYPVPKPDGKWRMVLDYREVNKTIPLIAAQNQHSAGILSSIYRGKYKTTLDLTNGFWAHPITPESYWLTAFTWQGKQYCWTRLPQGFLNSPALFTADVVDLLKEIPNVQAYVDDIYISHDDPQEHLEQLEKIFSILLNAGYVVSLKKSEIAQREVEFLGFNITKEGRGLTDTFKQKLLNITPPKDLKQLQSILGLLNFARNFIPNYSELVKPLYTIVANANGKFISWTEDNSNQLQHIISVLNQADNLEERNPETRLIIKVNSSPSAGYIRYYNEGSKRPIMYVNYIFSKAEAKFTQTEKLLTTMHKGLIKAMDLAMGQEILVYSPIVSMTKIQRTPLPERKALPVRWITWMTYLEDPRIQFHYDKSLPELQQIPNVTEDVIAKTKHPSEFAMVFYTDGSAIKHPDVNKSHSAGMGIAQVQFIPEYKIVHQWSIPLGDHTAQLAEIAAVEFACKKALKISGPVLIVTDSFYVAESANKELPYWKSNGFLNNKKKPLRHVSKWKSIAECLQLKPDIIIMHEKGHQQPMTTLHTEGNNLADKLATQGSYVVHAGKRTADGSEFEKRTADGSEFESPKKKAKVE

SEQ ID NO: 433 - protein, 2087 aa, synthetic construct
MPAAKRVKLDGGDKKYSIGLDIGTNSVGWAVITDEYKVPSKKFKVLGNTDRHSIKKNLIGALLFDSGETAEATRLKRTARRRYTRRKNRICYLQEIFSNEMAKVDDSFFHRLEESFLVEEDKKHERHPIFGNIVDEVAYHEKYPTIYHLRKKLVDSTDKADLRLIYLALAHMIKFRGHFLIEGDLNPDNSDVDKLFIQLVQTYNQLFEENPINASGVDAKAILSARLSKSRRLENLIAQLPGEKKNGLFGNLIALSLGLTPNFKSNFDLAEDAKLQLSKDTYDDDLDNLLAQIGDQYADLFLAAKNLSDAILLSDILRVNTEITKAPLSASMIKRYDEHHQDLTLLKALVRQQLPEKYKEIFFDQSKNGYAGYIDGGASQEEFYKFIKPILEKMDGTEELLVKLNREDLLRKQRTFDNGSIPHQIHLGELHAILRRQEDFYPFLKDNREKIEKILTFRIPYYVGPLARGNSRFAWMTRKSEETITPWNFEEVVDKGASAQSFIERMTNFDKNLPNEKVLPKHSLLYEYFTVYNELTKVKYVTEGMRKPAFLSGEQKKAIVDLLFKTNRKVTVKQLKEDYFKKIECFDSVEISGVEDRFNASLGTYHDLLKIIKDKDFLDNEENEDILEDIVLTLTLFEDREMIEERLKTYAHLFDDKVMKQLKRRRYTGWGRLSRKLINGIRDKQSGKTILDFLKSDGFANRNFMQLIHDDSLTFKEDIQKAQVSGQGDSLHEHIANLAGSPAIKKGILQTVKVVDELVKVMGRHKPENIVIEMARENQTTQKGQKNSRERMKRIEEGIKELGSQILKEHPVENTQLQNEKLYLYYLQNGRDMYVDQELDINRLSDYDVDHIVPQSFLKDDSIDNKVLTRSDKARGKSDNVPSEEVVKKMKNYWRQLLNAKLITQRKFDNLTKAERGGLSELDKAGFIKRQLVETRQITKHVAQILDSRMNTKYDENDKLIREVKVITLKSKLVSDFRKDFQFYKVREINNYHHAHDAYLNAVVGTALIKKYPKLESEFVYGDYKVYDVRKMIAKSEQEIGKATAKYFFYSNIMNFFKTEITLANGEIRKRPLIETNGETGEIVWDKGRDFATVRKVLSMPQVNIVKKTEVQTGGFSKESILPKRNSDKLIARKKDWDPKKYGGFDSPTVAYSVLVVAKVEKGKSKKLKSVKELLGITIMERSSFEKNPIDFLEAKGYKEVKKDLIIKLPKYSLFELENGRKRMLASAGELQKGNELALPSKYVNFLYLASHYEKLKGSPEDNEQKQLFVEQHKHYLDEIIEQISEFSKRVILADANLDKVLSAYNKHRDKPIREQAENIIHLFTLTNLGAPAAFKYFDTTIDRKRYTSTKEVLDATLIHQSITGLYETRIDLSQLGGDGGGGGEAAAKGSSGGVPWLMKKPLQLTVLVPLHEYQERLLQQTALPKEQKELLQKLFLKYDALWQHWENQVGHRRIKPHNIATGTLAPRPQKQYPINPKAKPSIQIVIDDLLKQGVLIQQNSTMNTPVYPVPKPDGKWRMVLDYREVNKTIPLIAAQNQHSAGILSSIYRGKYKTTLDLTNGFWAHPITPESYWLTAFTWQGKQYCWTRLPQGFLNSPALFTADVVDLLKEIPNVQAYVDDIYISHDDPQEHLEQLEKIFSILLNAGYVVSLKKSEIAQREVEFLGFNITKEGRGLTDTFKQKLLNITPPKDLKQLQSILGLLNFARNFIPNYSELVKPLYTIVANANGKFISWTEDNSNQLQHIISVLNQADNLEERNPETRLIIKVNSSPSAGYIRYYNEGSKRPIMYVNYIFSKAEAKFTQTEKLLTTMHKGLIKAMDLAMGQEILVYSPIVSMTKIQRTPLPERKALPVRWITWMTYLEDPRIQFHYDKSLPELQQIPNVTEDVIAKTKHPSEFAMVFYTDGSAIKHPDVNKSHSAGMGIAQVQFIPEYKIVHQWSIPLGDHTAQLAEIAAVEFACKKALKISGPVLIVTDSFYVAESANKELPYWKSNGFLNNKKKPLRHVSKWKSIAECLQLKPDIIIMHEKGHQQPMTTLHTEGNNLADKLATQGSYVVHAGKRTADGSEFEKRTADGSEFESPKKKAKVE

SEQ ID NO: 434 - protein, 2082 aa, synthetic construct
MPAAKRVKLDGGDKKYSIGLDIGTNSVGWAVITDEYKVPSKKFKVLGNTDRHSIKKNLIGALLFDSGETAEATRLKRTARRRYTRRKNRICYLQEIFSNEMAKVDDSFFHRLEESFLVEEDKKHERHPIFGNIVDEVAYHEKYPTIYHLRKKLVDSTDKADLRLIYLALAHMIKFRGHFLIEGDLNPDNSDVDKLFIQLVQTYNQLFEENPINASGVDAKAILSARLSKSRRLENLIAQLPGEKKNGLFGNLIALSLGLTPNFKSNFDLAEDAKLQLSKDTYDDDLDNLLAQIGDQYADLFLAAKNLSDAILLSDILRVNTEITKAPLSASMIKRYDEHHQDLTLLKALVRQQLPEKYKEIFFDQSKNGYAGYIDGGASQEEFYKFIKPILEKMDGTEELLVKLNREDLLRKQRTFDNGSIPHQIHLGELHAILRRQEDFYPFLKDNREKIEKILTFRIPYYVGPLARGNSRFAWMTRKSEETITPWNFEEVVDKGASAQSFIERMTNFDKNLPNEKVLPKHSLLYEYFTVYNELTKVKYVTEGMRKPAFLSGEQKKAIVDLLFKTNRKVTVKQLKEDYFKKIECFDSVEISGVEDRFNASLGTYHDLLKIIKDKDFLDNEENEDILEDIVLTLTLFEDREMIEERLKTYAHLFDDKVMKQLKRRRYTGWGRLSRKLINGIRDKQSGKTILDFLKSDGFANRNFMQLIHDDSLTFKEDIQKAQVSGQGDSLHEHIANLAGSPAIKKGILQTVKVVDELVKVMGRHKPENIVIEMARENQTTQKGQKNSRERMKRIEEGIKELGSQILKEHPVENTQLQNEKLYLYYLQNGRDMYVDQELDINRLSDYDVDHIVPQSFLKDDSIDNKVLTRSDKARGKSDNVPSEEVVKKMKNYWRQLLNAKLITQRKFDNLTKAERGGLSELDKAGFIKRQLVETRQITKHVAQILDSRMNTKYDENDKLIREVKVITLKSKLVSDFRKDFQFYKVREINNYHHAHDAYLNAVVGTALIKKYPKLESEFVYGDYKVYDVRKMIAKSEQEIGKATAKYFFYSNIMNFFKTEITLANGEIRKRPLIETNGETGEIVWDKGRDFATVRKVLSMPQVNIVKKTEVQTGGFSKESILPKRNSDKLIARKKDWDPKKYGGFDSPTVAYSVLVVAKVEKGKSKKLKSVKELLGITIMERSSFEKNPIDFLEAKGYKEVKKDLIIKLPKYSLFELENGRKRMLASAGELQKGNELALPSKYVNFLYLASHYEKLKGSPEDNEQKQLFVEQHKHYLDEIIEQISEFSKRVILADANLDKVLSAYNKHRDKPIREQAENIIHLFTLTNLGAPAAFKYFDTTIDRKRYTSTKEVLDATLIHQSITGLYETRIDLSQLGGDGGGSSGSSGGVPWLMKKPLQLTVLVPLHEYQERLLQQTALPKEQKELLQKLFLKYDALWQHWENQVGHRRIKPHNIATGTLAPRPQKQYPINPKAKPSIQIVIDDLLKQGVLIQQNSTMNTPVYPVPKPDGKWRMVLDYREVNKTIPLIAAQNQHSAGILSSIYRGKYKTTLDLTNGFWAHPITPESYWLTAFTWQGKQYCWTRLPQGFLNSPALFTADVVDLLKEIPNVQAYVDDIYISHDDPQEHLEQLEKIFSILLNAGYVVSLKKSEIAQREVEFLGFNITKEGRGLTDTFKQKLLNITPPKDLKQLQSILGLLNFARNFIPNYSELVKPLYTIVANANGKFISWTEDNSNQLQHIISVLNQADNLEERNPETRLIIKVNSSPSAGYIRYYNEGSKRPIMYVNYIFSKAEAKFTQTEKLLTTMHKGLIKAMDLAMGQEILVYSPIVSMTKIQRTPLPERKALPVRWITWMTYLEDPRIQFHYDKSLPELQQIPNVTEDVIAKTKHPSEFAMVFYTDGSAIKHPDVNKSHSAGMGIAQVQFIPEYKIVHQWSIPLGDHTAQLAEIAAVEFACKKALKISGPVLIVTDSFYVAESANKELPYWKSNGFLNNKKKPLRHVSKWKSIAECLQLKPDIIIMHEKGHQQPMTTLHTEGNNLADKLATQGSYVVHAGKRTADGSEFEKRTADGSEFESPKKKAKVE

SEQ ID NO: 435 - protein, 2084 aa, synthetic construct
MPAAKRVKLDGGDKKYSIGLDIGTNSVGWAVITDEYKVPSKKFKVLGNTDRHSIKKNLIGALLFDSGETAEATRLKRTARRRYTRRKNRICYLQEIFSNEMAKVDDSFFHRLEESFLVEEDKKHERHPIFGNIVDEVAYHEKYPTIYHLRKKLVDSTDKADLRLIYLALAHMIKFRGHFLIEGDLNPDNSDVDKLFIQLVQTYNQLFEENPINASGVDAKAILSARLSKSRRLENLIAQLPGEKKNGLFGNLIALSLGLTPNFKSNFDLAEDAKLQLSKDTYDDDLDNLLAQIGDQYADLFLAAKNLSDAILLSDILRVNTEITKAPLSASMIKRYDEHHQDLTLLKALVRQQLPEKYKEIFFDQSKNGYAGYIDGGASQEEFYKFIKPILEKMDGTEELLVKLNREDLLRKQRTFDNGSIPHQIHLGELHAILRRQEDFYPFLKDNREKIEKILTFRIPYYVGPLARGNSRFAWMTRKSEETITPWNFEEVVDKGASAQSFIERMTNFDKNLPNEKVLPKHSLLYEYFTVYNELTKVKYVTEGMRKPAFLSGEQKKAIVDLLFKTNRKVTVKQLKEDYFKKIECFDSVEISGVEDRFNASLGTYHDLLKIIKDKDFLDNEENEDILEDIVLTLTLFEDREMIEERLKTYAHLFDDKVMKQLKRRRYTGWGRLSRKLINGIRDKQSGKTILDFLKSDGFANRNFMQLIHDDSLTFKEDIQKAQVSGQGDSLHEHIANLAGSPAIKKGILQTVKVVDELVKVMGRHKPENIVIEMARENQTTQKGQKNSRERMKRIEEGIKELGSQILKEHPVENTQLQNEKLYLYYLQNGRDMYVDQELDINRLSDYDVDHIVPQSFLKDDSIDNKVLTRSDKARGKSDNVPSEEVVKKMKNYWRQLLNAKLITQRKFDNLTKAERGGLSELDKAGFIKRQLVETRQITKHVAQILDSRMNTKYDENDKLIREVKVITLKSKLVSDFRKDFQFYKVREINNYHHAHDAYLNAVVGTALIKKYPKLESEFVYGDYKVYDVRKMIAKSEQEIGKATAKYFFYSNIMNFFKTEITLANGEIRKRPLIETNGETGEIVWDKGRDFATVRKVLSMPQVNIVKKTEVQTGGFSKESILPKRNSDKLIARKKDWDPKKYGGFDSPTVAYSVLVVAKVEKGKSKKLKSVKELLGITIMERSSFEKNPIDFLEAKGYKEVKKDLIIKLPKYSLFELENGRKRMLASAGELQKGNELALPSKYVNFLYLASHYEKLKGSPEDNEQKQLFVEQHKHYLDEIIEQISEFSKRVILADANLDKVLSAYNKHRDKPIREQAENIIHLFTLTNLGAPAAFKYFDTTIDRKRYTSTKEVLDATLIHQSITGLYETRIDLSQLGGDGGGGGEAAAKGGVPWLMKKPLQLTVLVPLHEYQERLLQQTALPKEQKELLQKLFLKYDALWQHWENQVGHRRIKPHNIATGTLAPRPQKQYPINPKAKPSIQIVIDDLLKQGVLIQQNSTMNTPVYPVPKPDGKWRMVLDYREVNKTIPLIAAQNQHSAGILSSIYRGKYKTTLDLTNGFWAHPITPESYWLTAFTWQGKQYCWTRLPQGFLNSPALFTADVVDLLKEIPNVQAYVDDIYISHDDPQEHLEQLEKIFSILLNAGYVVSLKKSEIAQREVEFLGFNITKEGRGLTDTFKQKLLNITPPKDLKQLQSILGLLNFARNFIPNYSELVKPLYTIVANANGKFISWTEDNSNQLQHIISVLNQADNLEERNPETRLIIKVNSSPSAGYIRYYNEGSKRPIMYVNYIFSKAEAKFTQTEKLLTTMHKGLIKAMDLAMGQEILVYSPIVSMTKIQRTPLPERKALPVRWITWMTYLEDPRIQFHYDKSLPELQQIPNVTEDVIAKTKHPSEFAMVFYTDGSAIKHPDVNKSHSAGMGIAQVQFIPEYKIVHQWSIPLGDHTAQLAEIAAVEFACKKALKISGPVLIVTDSFYVAESANKELPYWKSNGFLNNKKKPLRHVSKWKSIAECLQLKPDIIIMHEKGHQQPMTTLHTEGNNLADKLATQGSYVVHAGKRTADGSEFEKRTADGSEFESPKKKAKVE

SEQ ID NO: 436 - protein, 2087 aa, synthetic construct
MPAAKRVKLDGGDKKYSIGLDIGTNSVGWAVITDEYKVPSKKFKVLGNTDRHSIKKNLIGALLFDSGETAEATRLKRTARRRYTRRKNRICYLQEIFSNEMAKVDDSFFHRLEESFLVEEDKKHERHPIFGNIVDEVAYHEKYPTIYHLRKKLVDSTDKADLRLIYLALAHMIKFRGHFLIEGDLNPDNSDVDKLFIQLVQTYNQLFEENPINASGVDAKAILSARLSKSRRLENLIAQLPGEKKNGLFGNLIALSLGLTPNFKSNFDLAEDAKLQLSKDTYDDDLDNLLAQIGDQYADLFLAAKNLSDAILLSDILRVNTEITKAPLSASMIKRYDEHHQDLTLLKALVRQQLPEKYKEIFFDQSKNGYAGYIDGGASQEEFYKFIKPILEKMDGTEELLVKLNREDLLRKQRTFDNGSIPHQIHLGELHAILRRQEDFYPFLKDNREKIEKILTFRIPYYVGPLARGNSRFAWMTRKSEETITPWNFEEVVDKGASAQSFIERMTNFDKNLPNEKVLPKHSLLYEYFTVYNELTKVKYVTEGMRKPAFLSGEQKKAIVDLLFKTNRKVTVKQLKEDYFKKIECFDSVEISGVEDRFNASLGTYHDLLKIIKDKDFLDNEENEDILEDIVLTLTLFEDREMIEERLKTYAHLFDDKVMKQLKRRRYTGWGRLSRKLINGIRDKQSGKTILDFLKSDGFANRNFMQLIHDDSLTFKEDIQKAQVSGQGDSLHEHIANLAGSPAIKKGILQTVKVVDELVKVMGRHKPENIVIEMARENQTTQKGQKNSRERMKRIEEGIKELGSQILKEHPVENTQLQNEKLYLYYLQNGRDMYVDQELDINRLSDYDVDHIVPQSFLKDDSIDNKVLTRSDKARGKSDNVPSEEVVKKMKNYWRQLLNAKLITQRKFDNLTKAERGGLSELDKAGFIKRQLVETRQITKHVAQILDSRMNTKYDENDKLIREVKVITLKSKLVSDFRKDFQFYKVREINNYHHAHDAYLNAVVGTALIKKYPKLESEFVYGDYKVYDVRKMIAKSEQEIGKATAKYFFYSNIMNFFKTEITLANGEIRKRPLIETNGETGEIVWDKGRDFATVRKVLSMPQVNIVKKTEVQTGGFSKESILPKRNSDKLIARKKDWDPKKYGGFDSPTVAYSVLVVAKVEKGKSKKLKSVKELLGITIMERSSFEKNPIDFLEAKGYKEVKKDLIIKLPKYSLFELENGRKRMLASAGELQKGNELALPSKYVNFLYLASHYEKLKGSPEDNEQKQLFVEQHKHYLDEIIEQISEFSKRVILADANLDKVLSAYNKHRDKPIREQAENIIHLFTLTNLGAPAAFKYFDTTIDRKRYTSTKEVLDATLIHQSITGLYETRIDLSQLGGDGGPAPGGGEAAAKGGVPWLMKKPLQLTVLVPLHEYQERLLQQTALPKEQKELLQKLFLKYDALWQHWENQVGHRRIKPHNIATGTLAPRPQKQYPINPKAKPSIQIVIDDLLKQGVLIQQNSTMNTPVYPVPKPDGKWRMVLDYREVNKTIPLIAAQNQHSAGILSSIYRGKYKTTLDLTNGFWAHPITPESYWLTAFTWQGKQYCWTRLPQGFLNSPALFTADVVDLLKEIPNVQAYVDDIYISHDDPQEHLEQLEKIFSILLNAGYVVSLKKSEIAQREVEFLGFNITKEGRGLTDTFKQKLLNITPPKDLKQLQSILGLLNFARNFIPNYSELVKPLYTIVANANGKFISWTEDNSNQLQHIISVLNQADNLEERNPETRLIIKVNSSPSAGYIRYYNEGSKRPIMYVNYIFSKAEAKFTQTEKLLTTMHKGLIKAMDLAMGQEILVYSPIVSMTKIQRTPLPERKALPVRWITWMTYLEDPRIQFHYDKSLPELQQIPNVTEDVIAKTKHPSEFAMVFYTDGSAIKHPDVNKSHSAGMGIAQVQFIPEYKIVHQWSIPLGDHTAQLAEIAAVEFACKKALKISGPVLIVTDSFYVAESANKELPYWKSNGFLNNKKKPLRHVSKWKSIAECLQLKPDIIIMHEKGHQQPMTTLHTEGNNLADKLATQGSYVVHAGKRTADGSEFEKRTADGSEFESPKKKAKVE

SEQ ID NO: 437 - protein, 2094 aa, synthetic construct
MPAAKRVKLDGGDKKYSIGLDIGTNSVGWAVITDEYKVPSKKFKVLGNTDRHSIKKNLIGALLFDSGETAEATRLKRTARRRYTRRKNRICYLQEIFSNEMAKVDDSFFHRLEESFLVEEDKKHERHPIFGNIVDEVAYHEKYPTIYHLRKKLVDSTDKADLRLIYLALAHMIKFRGHFLIEGDLNPDNSDVDKLFIQLVQTYNQLFEENPINASGVDAKAILSARLSKSRRLENLIAQLPGEKKNGLFGNLIALSLGLTPNFKSNFDLAEDAKLQLSKDTYDDDLDNLLAQIGDQYADLFLAAKNLSDAILLSDILRVNTEITKAPLSASMIKRYDEHHQDLTLLKALVRQQLPEKYKEIFFDQSKNGYAGYIDGGASQEEFYKFIKPILEKMDGTEELLVKLNREDLLRKQRTFDNGSIPHQIHLGELHAILRRQEDFYPFLKDNREKIEKILTFRIPYYVGPLARGNSRFAWMTRKSEETITPWNFEEVVDKGASAQSFIERMTNFDKNLPNEKVLPKHSLLYEYFTVYNELTKVKYVTEGMRKPAFLSGEQKKAIVDLLFKTNRKVTVKQLKEDYFKKIECFDSVEISGVEDRFNASLGTYHDLLKIIKDKDFLDNEENEDILEDIVLTLTLFEDREMIEERLKTYAHLFDDKVMKQLKRRRYTGWGRLSRKLINGIRDKQSGKTILDFLKSDGFANRNFMQLIHDDSLTFKEDIQKAQVSGQGDSLHEHIANLAGSPAIKKGILQTVKVVDELVKVMGRHKPENIVIEMARENQTTQKGQKNSRERMKRIEEGIKELGSQILKEHPVENTQLQNEKLYLYYLQNGRDMYVDQELDINRLSDYDVDHIVPQSFLKDDSIDNKVLTRSDKARGKSDNVPSEEVVKKMKNYWRQLLNAKLITQRKFDNLTKAERGGLSELDKAGFIKRQLVETRQITKHVAQILDSRMNTKYDENDKLIREVKVITLKSKLVSDFRKDFQFYKVREINNYHHAHDAYLNAVVGTALIKKYPKLESEFVYGDYKVYDVRKMIAKSEQEIGKATAKYFFYSNIMNFFKTEITLANGEIRKRPLIETNGETGEIVWDKGRDFATVRKVLSMPQVNIVKKTEVQTGGFSKESILPKRNSDKLIARKKDWDPKKYGGFDSPTVAYSVLVVAKVEKGKSKKLKSVKELLGITIMERSSFEKNPIDFLEAKGYKEVKKDLIIKLPKYSLFELENGRKRMLASAGELQKGNELALPSKYVNFLYLASHYEKLKGSPEDNEQKQLFVEQHKHYLDEIIEQISEFSKRVILADANLDKVLSAYNKHRDKPIREQAENIIHLFTLTNLGAPAAFKYFDTTIDRKRYTSTKEVLDATLIHQSITGLYETRIDLSQLGGDGGGSSGSSGSSGSSGSSGSSGGVPWLMKKPLQLTVLVPLHEYQERLLQQTALPKEQKELLQKLFLKYDALWQHWENQVGHRRIKPHNIATGTLAPRPQKQYPINPKAKPSIQIVIDDLLKQGVLIQQNSTMNTPVYPVPKPDGKWRMVLDYREVNKTIPLIAAQNQHSAGILSSIYRGKYKTTLDLTNGFWAHPITPESYWLTAFTWQGKQYCWTRLPQGFLNSPALFNADVVDLLKEIPNVQAYVDDIYISHDDPQEHLEQLEKIFSILLNAGYVVSLKKSEIAQREVEFLGFNITKEGRGLTDTFKQKLLNITPPKDLKQLQSILGLLNFARNFIPNYSELVKPLYTIVAPANGKFISWTEDNSNQLQHIISVLNQADNLEERNPETRLIIKVNSSPSAGYIRYYNEGSKRPIMYVNYIFSKAEAKFTQTEKLLTTMHKGLIKAMDLAMGQEILVYSPIVSMTKIQRTPLPERKALPVRWITWMTYLEDPRIQFHYDKSLPELQQIPNVTEDVIAKTKHPSEFAMVFYTDGSAIKHPDVNKSHSAGMGIAQVQFIPEYKIVHQWSIPLGDHTAQLAEIAAVEFACKKALKISGPVLIVTDSFYVAESANKELPYWKSNGFLNNKKKPLRHVSKWKSIAECLQLKPDIIIMHEKGHQQPMTTLHTEGNNLADKLATQGSYVVHAGKRTADGSEFEKRTADGSEFESPKKKAKVE

SEQ ID NO: 438 - protein, 2087 aa, synthetic construct
MPAAKRVKLDGGDKKYSIGLDIGTNSVGWAVITDEYKVPSKKFKVLGNTDRHSIKKNLIGALLFDSGETAEATRLKRTARRRYTRRKNRICYLQEIFSNEMAKVDDSFFHRLEESFLVEEDKKHERHPIFGNIVDEVAYHEKYPTIYHLRKKLVDSTDKADLRLIYLALAHMIKFRGHFLIEGDLNPDNSDVDKLFIQLVQTYNQLFEENPINASGVDAKAILSARLSKSRRLENLIAQLPGEKKNGLFGNLIALSLGLTPNFKSNFDLAEDAKLQLSKDTYDDDLDNLLAQIGDQYADLFLAAKNLSDAILLSDILRVNTEITKAPLSASMIKRYDEHHQDLTLLKALVRQQLPEKYKEIFFDQSKNGYAGYIDGGASQEEFYKFIKPILEKMDGTEELLVKLNREDLLRKQRTFDNGSIPHQIHLGELHAILRRQEDFYPFLKDNREKIEKILTFRIPYYVGPLARGNSRFAWMTRKSEETITPWNFEEVVDKGASAQSFIERMTNFDKNLPNEKVLPKHSLLYEYFTVYNELTKVKYVTEGMRKPAFLSGEQKKAIVDLLFKTNRKVTVKQLKEDYFKKIECFDSVEISGVEDRFNASLGTYHDLLKIIKDKDFLDNEENEDILEDIVLTLTLFEDREMIEERLKTYAHLFDDKVMKQLKRRRYTGWGRLSRKLINGIRDKQSGKTILDFLKSDGFANRNFMQLIHDDSLTFKEDIQKAQVSGQGDSLHEHIANLAGSPAIKKGILQTVKVVDELVKVMGRHKPENIVIEMARENQTTQKGQKNSRERMKRIEEGIKELGSQILKEHPVENTQLQNEKLYLYYLQNGRDMYVDQELDINRLSDYDVDHIVPQSFLKDDSIDNKVLTRSDKARGKSDNVPSEEVVKKMKNYWRQLLNAKLITQRKFDNLTKAERGGLSELDKAGFIKRQLVETRQITKHVAQILDSRMNTKYDENDKLIREVKVITLKSKLVSDFRKDFQFYKVREINNYHHAHDAYLNAVVGTALIKKYPKLESEFVYGDYKVYDVRKMIAKSEQEIGKATAKYFFYSNIMNFFKTEITLANGEIRKRPLIETNGETGEIVWDKGRDFATVRKVLSMPQVNIVKKTEVQTGGFSKESILPKRNSDKLIARKKDWDPKKYGGFDSPTVAYSVLVVAKVEKGKSKKLKSVKELLGITIMERSSFEKNPIDFLEAKGYKEVKKDLIIKLPKYSLFELENGRKRMLASAGELQKGNELALPSKYVNFLYLASHYEKLKGSPEDNEQKQLFVEQHKHYLDEIIEQISEFSKRVILADANLDKVLSAYNKHRDKPIREQAENIIHLFTLTNLGAPAAFKYFDTTIDRKRYTSTKEVLDATLIHQSITGLYETRIDLSQLGGDGGGSSGGGEAAAKGGVPWLMKKPLQLTVLVPLHEYQERLLQQTALPKEQKELLQKLFLKYDALWQHWENQVGHRRIKPHNIATGTLAPRPQKQYPINPKAKPSIQIVIDDLLKQGVLIQQNSTMNTPVYPVPKPDGKWRMVLDYREVNKTIPLIAAQNQHSAGILSSIYRGKYKTTLDLTNGFWAHPITPESYWLTAFTWQGKQYCWTRLPQGFLNSPALFNADVVDLLKEIPNVQAYVDDIYISHDDPQEHLEQLEKIFSILLNAGYVVSLKKSEIAQREVEFLGFNITKEGRGLTDTFKQKLLNITPPKDLKQLQSILGLLNFARNFIPNYSELVKPLYTIVAPANGKFISWTEDNSNQLQHIISVLNQADNLEERNPETRLIIKVNSSPSAGYIRYYNEGSKRPIMYVNYIFSKAEAKFTQTEKLLTTMHKGLIKAMDLAMGQEILVYSPIVSMTKIQRTPLPERKALPVRWITWMTYLEDPRIQFHYDKSLPELQQIPNVTEDVIAKTKHPSEFAMVFYTDGSAIKHPDVNKSHSAGMGIAQVQFIPEYKIVHQWSIPLGDHTAQLAEIAAVEFACKKALKISGPVLIVTDSFYVAESANKELPYWKSNGFLNNKKKPLRHVSKWKSIAECLQLKPDIIIMHEKGHQQPMTTLHTEGNNLADKLATQGSYVVHAGKRTADGSEFEKRTADGSEFESPKKKAKVE

SEQ ID NO: 439 - protein, 2091 aa, synthetic construct
MPAAKRVKLDGGDKKYSIGLDIGTNSVGWAVITDEYKVPSKKFKVLGNTDRHSIKKNLIGALLFDSGETAEATRLKRTARRRYTRRKNRICYLQEIFSNEMAKVDDSFFHRLEESFLVEEDKKHERHPIFGNIVDEVAYHEKYPTIYHLRKKLVDSTDKADLRLIYLALAHMIKFRGHFLIEGDLNPDNSDVDKLFIQLVQTYNQLFEENPINASGVDAKAILSARLSKSRRLENLIAQLPGEKKNGLFGNLIALSLGLTPNFKSNFDLAEDAKLQLSKDTYDDDLDNLLAQIGDQYADLFLAAKNLSDAILLSDILRVNTEITKAPLSASMIKRYDEHHQDLTLLKALVRQQLPEKYKEIFFDQSKNGYAGYIDGGASQEEFYKFIKPILEKMDGTEELLVKLNREDLLRKQRTFDNGSIPHQIHLGELHAILRRQEDFYPFLKDNREKIEKILTFRIPYYVGPLARGNSRFAWMTRKSEETITPWNFEEVVDKGASAQSFIERMTNFDKNLPNEKVLPKHSLLYEYFTVYNELTKVKYVTEGMRKPAFLSGEQKKAIVDLLFKTNRKVTVKQLKEDYFKKIECFDSVEISGVEDRFNASLGTYHDLLKIIKDKDFLDNEENEDILEDIVLTLTLFEDREMIEERLKTYAHLFDDKVMKQLKRRRYTGWGRLSRKLINGIRDKQSGKTILDFLKSDGFANRNFMQLIHDDSLTFKEDIQKAQVSGQGDSLHEHIANLAGSPAIKKGILQTVKVVDELVKVMGRHKPENIVIEMARENQTTQKGQKNSRERMKRIEEGIKELGSQILKEHPVENTQLQNEKLYLYYLQNGRDMYVDQELDINRLSDYDVDHIVPQSFLKDDSIDNKVLTRSDKARGKSDNVPSEEVVKKMKNYWRQLLNAKLITQRKFDNLTKAERGGLSELDKAGFIKRQLVETRQITKHVAQILDSRMNTKYDENDKLIREVKVITLKSKLVSDFRKDFQFYKVREINNYHHAHDAYLNAVVGTALIKKYPKLESEFVYGDYKVYDVRKMIAKSEQEIGKATAKYFFYSNIMNFFKTEITLANGEIRKRPLIETNGETGEIVWDKGRDFATVRKVLSMPQVNIVKKTEVQTGGFSKESILPKRNSDKLIARKKDWDPKKYGGFDSPTVAYSVLVVAKVEKGKSKKLKSVKELLGITIMERSSFEKNPIDFLEAKGYKEVKKDLIIKLPKYSLFELENGRKRMLASAGELQKGNELALPSKYVNFLYLASHYEKLKGSPEDNEQKQLFVEQHKHYLDEIIEQISEFSKRVILADANLDKVLSAYNKHRDKPIREQAENIIHLFTLTNLGAPAAFKYFDTTIDRKRYTSTKEVLDATLIHQSITGLYETRIDLSQLGGDGGGGGGSEAAAKGGGGSGGVPWLMKKPLQLTVLVPLHEYQERLLQQTALPKEQKELLQKLFLKYDALWQHWENQVGHRRIKPHNIATGTLAPRPQKQYPINPKAKPSIQIVIDDLLKQGVLIQQNSTMNTPVYPVPKPDGKWRMVLDYREVNKTIPLIAAQNQHSAGILSSIYRGKYKTTLDLTNGFWAHPITPESYWLTAFTWQGKQYCWTRLPQGFLNSPALFNADVVDLLKEIPNVQAYVDDIYISHDDPQEHLEQLEKIFSILLNAGYVVSLKKSEIAQREVEFLGFNITKEGRGLTDTFKQKLLNITPPKDLKQLQSILGLLNFARNFIPNYSELVKPLYTIVAPANGKFISWTEDNSNQLQHIISVLNQADNLEERNPETRLIIKVNSSPSAGYIRYYNEGSKRPIMYVNYIFSKAEAKFTQTEKLLTTMHKGLIKAMDLAMGQEILVYSPIVSMTKIQRTPLPERKALPVRWITWMTYLEDPRIQFHYDKSLPELQQIPNVTEDVIAKTKHPSEFAMVFYTDGSAIKHPDVNKSHSAGMGIAQVQFIPEYKIVHQWSIPLGDHTAQLAEIAAVEFACKKALKISGPVLIVTDSFYVAESANKELPYWKSNGFLNNKKKPLRHVSKWKSIAECLQLKPDIIIMHEKGHQQPMTTLHTEGNNLADKLATQGSYVVHAGKRTADGSEFEKRTADGSEFESPKKKAKVE

SEQ ID NO: 440 - protein, 2085 aa, synthetic construct
MPAAKRVKLDGGDKKYSIGLDIGTNSVGWAVITDEYKVPSKKFKVLGNTDRHSIKKNLIGALLFDSGETAEATRLKRTARRRYTRRKNRICYLQEIFSNEMAKVDDSFFHRLEESFLVEEDKKHERHPIFGNIVDEVAYHEKYPTIYHLRKKLVDSTDKADLRLIYLALAHMIKFRGHFLIEGDLNPDNSDVDKLFIQLVQTYNQLFEENPINASGVDAKAILSARLSKSRRLENLIAQLPGEKKNGLFGNLIALSLGLTPNFKSNFDLAEDAKLQLSKDTYDDDLDNLLAQIGDQYADLFLAAKNLSDAILLSDILRVNTEITKAPLSASMIKRYDEHHQDLTLLKALVRQQLPEKYKEIFFDQSKNGYAGYIDGGASQEEFYKFIKPILEKMDGTEELLVKLNREDLLRKQRTFDNGSIPHQIHLGELHAILRRQEDFYPFLKDNREKIEKILTFRIPYYVGPLARGNSRFAWMTRKSEETITPWNFEEVVDKGASAQSFIERMTNFDKNLPNEKVLPKHSLLYEYFTVYNELTKVKYVTEGMRKPAFLSGEQKKAIVDLLFKTNRKVTVKQLKEDYFKKIECFDSVEISGVEDRFNASLGTYHDLLKIIKDKDFLDNEENEDILEDIVLTLTLFEDREMIEERLKTYAHLFDDKVMKQLKRRRYTGWGRLSRKLINGIRDKQSGKTILDFLKSDGFANRNFMQLIHDDSLTFKEDIQKAQVSGQGDSLHEHIANLAGSPAIKKGILQTVKVVDELVKVMGRHKPENIVIEMARENQTTQKGQKNSRERMKRIEEGIKELGSQILKEHPVENTQLQNEKLYLYYLQNGRDMYVDQELDINRLSDYDVDHIVPQSFLKDDSIDNKVLTRSDKARGKSDNVPSEEVVKKMKNYWRQLLNAKLITQRKFDNLTKAERGGLSELDKAGFIKRQLVETRQITKHVAQILDSRMNTKYDENDKLIREVKVITLKSKLVSDFRKDFQFYKVREINNYHHAHDAYLNAVVGTALIKKYPKLESEFVYGDYKVYDVRKMIAKSEQEIGKATAKYFFYSNIMNFFKTEITLANGEIRKRPLIETNGETGEIVWDKGRDFATVRKVLSMPQVNIVKKTEVQTGGFSKESILPKRNSDKLIARKKDWDPKKYGGFDSPTVAYSVLVVAKVEKGKSKKLKSVKELLGITIMERSSFEKNPIDFLEAKGYKEVKKDLIIKLPKYSLFELENGRKRMLASAGELQKGNELALPSKYVNFLYLASHYEKLKGSPEDNEQKQLFVEQHKHYLDEIIEQISEFSKRVILADANLDKVLSAYNKHRDKPIREQAENIIHLFTLTNLGAPAAFKYFDTTIDRKRYTSTKEVLDATLIHQSITGLYETRIDLSQLGGDGGPAPGSSGGSGGVPWLMKKPLQLTVLVPLHEYQERLLQQTALPKEQKELLQKLFLKYDALWQHWENQVGHRRIKPHNIATGTLAPRPQKQYPINPKAKPSIQIVIDDLLKQGVLIQQNSTMNTPVYPVPKPDGKWRMVLDYREVNKTIPLIAAQNQHSAGILSSIYRGKYKTTLDLTNGFWAHPITPESYWLTAFTWQGKQYCWTRLPQGFLNSPALFNADVVDLLKEIPNVQAYVDDIYISHDDPQEHLEQLEKIFSILLNAGYVVSLKKSEIAQREVEFLGFNITKEGRGLTDTFKQKLLNITPPKDLKQLQSILGLLNFARNFIPNYSELVKPLYTIVAPANGKFISWTEDNSNQLQHIISVLNQADNLEERNPETRLIIKVNSSPSAGYIRYYNEGSKRPIMYVNYIFSKAEAKFTQTEKLLTTMHKGLIKAMDLAMGQEILVYSPIVSMTKIQRTPLPERKALPVRWITWMTYLEDPRIQFHYDKSLPELQQIPNVTEDVIAKTKHPSEFAMVFYTDGSAIKHPDVNKSHSAGMGIAQVQFIPEYKIVHQWSIPLGDHTAQLAEIAAVEFACKKALKISGPVLIVTDSFYVAESANKELPYWKSNGFLNNKKKPLRHVSKWKSIAECLQLKPDIIIMHEKGHQQPMTTLHTEGNNLADKLATQGSYVVHAGKRTADGSEFEKRTADGSEFESPKKKAKVE

SEQ ID NO: 441 - protein, 2087 aa, synthetic construct
MPAAKRVKLDGGDKKYSIGLDIGTNSVGWAVITDEYKVPSKKFKVLGNTDRHSIKKNLIGALLFDSGETAEATRLKRTARRRYTRRKNRICYLQEIFSNEMAKVDDSFFHRLEESFLVEEDKKHERHPIFGNIVDEVAYHEKYPTIYHLRKKLVDSTDKADLRLIYLALAHMIKFRGHFLIEGDLNPDNSDVDKLFIQLVQTYNQLFEENPINASGVDAKAILSARLSKSRRLENLIAQLPGEKKNGLFGNLIALSLGLTPNFKSNFDLAEDAKLQLSKDTYDDDLDNLLAQIGDQYADLFLAAKNLSDAILLSDILRVNTEITKAPLSASMIKRYDEHHQDLTLLKALVRQQLPEKYKEIFFDQSKNGYAGYIDGGASQEEFYKFIKPILEKMDGTEELLVKLNREDLLRKQRTFDNGSIPHQIHLGELHAILRRQEDFYPFLKDNREKIEKILTFRIPYYVGPLARGNSRFAWMTRKSEETITPWNFEEVVDKGASAQSFIERMTNFDKNLPNEKVLPKHSLLYEYFTVYNELTKVKYVTEGMRKPAFLSGEQKKAIVDLLFKTNRKVTVKQLKEDYFKKIECFDSVEISGVEDRFNASLGTYHDLLKIIKDKDFLDNEENEDILEDIVLTLTLFEDREMIEERLKTYAHLFDDKVMKQLKRRRYTGWGRLSRKLINGIRDKQSGKTILDFLKSDGFANRNFMQLIHDDSLTFKEDIQKAQVSGQGDSLHEHIANLAGSPAIKKGILQTVKVVDELVKVMGRHKPENIVIEMARENQTTQKGQKNSRERMKRIEEGIKELGSQILKEHPVENTQLQNEKLYLYYLQNGRDMYVDQELDINRLSDYDVDHIVPQSFLKDDSIDNKVLTRSDKARGKSDNVPSEEVVKKMKNYWRQLLNAKLITQRKFDNLTKAERGGLSELDKAGFIKRQLVETRQITKHVAQILDSRMNTKYDENDKLIREVKVITLKSKLVSDFRKDFQFYKVREINNYHHAHDAYLNAVVGTALIKKYPKLESEFVYGDYKVYDVRKMIAKSEQEIGKATAKYFFYSNIMNFFKTEITLANGEIRKRPLIETNGETGEIVWDKGRDFATVRKVLSMPQVNIVKKTEVQTGGFSKESILPKRNSDKLIARKKDWDPKKYGGFDSPTVAYSVLVVAKVEKGKSKKLKSVKELLGITIMERSSFEKNPIDFLEAKGYKEVKKDLIIKLPKYSLFELENGRKRMLASAGELQKGNELALPSKYVNFLYLASHYEKLKGSPEDNEQKQLFVEQHKHYLDEIIEQISEFSKRVILADANLDKVLSAYNKHRDKPIREQAENIIHLFTLTNLGAPAAFKYFDTTIDRKRYTSTKEVLDATLIHQSITGLYETRIDLSQLGGDGGGGGEAAAKPAPGGVPWLMKKPLQLTVLVPLHEYQERLLQQTALPKEQKELLQKLFLKYDALWQHWENQVGHRRIKPHNIATGTLAPRPQKQYPINPKAKPSIQIVIDDLLKQGVLIQQNSTMNTPVYPVPKPDGKWRMVLDYREVNKTIPLIAAQNQHSAGILSSIYRGKYKTTLDLTNGFWAHPITPESYWLTAFTWQGKQYCWTRLPQGFLNSPALFNADVVDLLKEIPNVQAYVDDIYISHDDPQEHLEQLEKIFSILLNAGYVVSLKKSEIAQREVEFLGFNITKEGRGLTDTFKQKLLNITPPKDLKQLQSILGLLNFARNFIPNYSELVKPLYTIVAPANGKFISWTEDNSNQLQHIISVLNQADNLEERNPETRLIIKVNSSPSAGYIRYYNEGSKRPIMYVNYIFSKAEAKFTQTEKLLTTMHKGLIKAMDLAMGQEILVYSPIVSMTKIQRTPLPERKALPVRWITWMTYLEDPRIQFHYDKSLPELQQIPNVTEDVIAKTKHPSEFAMVFYTDGSAIKHPDVNKSHSAGMGIAQVQFIPEYKIVHQWSIPLGDHTAQLAEIAAVEFACKKALKISGPVLIVTDSFYVAESANKELPYWKSNGFLNNKKKPLRHVSKWKSIAECLQLKPDIIIMHEKGHQQPMTTLHTEGNNLADKLATQGSYVVHAGKRTADGSEFEKRTADGSEFESPKKKAKVE

SEQ ID NO: 442 - protein, 2087 aa, synthetic construct
MPAAKRVKLDGGDKKYSIGLDIGTNSVGWAVITDEYKVPSKKFKVLGNTDRHSIKKNLIGALLFDSGETAEATRLKRTARRRYTRRKNRICYLQEIFSNEMAKVDDSFFHRLEESFLVEEDKKHERHPIFGNIVDEVAYHEKYPTIYHLRKKLVDSTDKADLRLIYLALAHMIKFRGHFLIEGDLNPDNSDVDKLFIQLVQTYNQLFEENPINASGVDAKAILSARLSKSRRLENLIAQLPGEKKNGLFGNLIALSLGLTPNFKSNFDLAEDAKLQLSKDTYDDDLDNLLAQIGDQYADLFLAAKNLSDAILLSDILRVNTEITKAPLSASMIKRYDEHHQDLTLLKALVRQQLPEKYKEIFFDQSKNGYAGYIDGGASQEEFYKFIKPILEKMDGTEELLVKLNREDLLRKQRTFDNGSIPHQIHLGELHAILRRQEDFYPFLKDNREKIEKILTFRIPYYVGPLARGNSRFAWMTRKSEETITPWNFEEVVDKGASAQSFIERMTNFDKNLPNEKVLPKHSLLYEYFTVYNELTKVKYVTEGMRKPAFLSGEQKKAIVDLLFKTNRKVTVKQLKEDYFKKIECFDSVEISGVEDRFNASLGTYHDLLKIIKDKDFLDNEENEDILEDIVLTLTLFEDREMIEERLKTYAHLFDDKVMKQLKRRRYTGWGRLSRKLINGIRDKQSGKTILDFLKSDGFANRNFMQLIHDDSLTFKEDIQKAQVSGQGDSLHEHIANLAGSPAIKKGILQTVKVVDELVKVMGRHKPENIVIEMARENQTTQKGQKNSRERMKRIEEGIKELGSQILKEHPVENTQLQNEKLYLYYLQNGRDMYVDQELDINRLSDYDVDHIVPQSFLKDDSIDNKVLTRSDKARGKSDNVPSEEVVKKMKNYWRQLLNAKLITQRKFDNLTKAERGGLSELDKAGFIKRQLVETRQITKHVAQILDSRMNTKYDENDKLIREVKVITLKSKLVSDFRKDFQFYKVREINNYHHAHDAYLNAVVGTALIKKYPKLESEFVYGDYKVYDVRKMIAKSEQEIGKATAKYFFYSNIMNFFKTEITLANGEIRKRPLIETNGETGEIVWDKGRDFATVRKVLSMPQVNIVKKTEVQTGGFSKESILPKRNSDKLIARKKDWDPKKYGGFDSPTVAYSVLVVAKVEKGKSKKLKSVKELLGITIMERSSFEKNPIDFLEAKGYKEVKKDLIIKLPKYSLFELENGRKRMLASAGELQKGNELALPSKYVNFLYLASHYEKLKGSPEDNEQKQLFVEQHKHYLDEIIEQISEFSKRVILADANLDKVLSAYNKHRDKPIREQAENIIHLFTLTNLGAPAAFKYFDTTIDRKRYTSTKEVLDATLIHQSITGLYETRIDLSQLGGDGGGGSPAPEAAAKGGVPWLMKKPLQLTVLVPLHEYQERLLQQTALPKEQKELLQKLFLKYDALWQHWENQVGHRRIKPHNIATGTLAPRPQKQYPINPKAKPSIQIVIDDLLKQGVLIQQNSTMNTPVYPVPKPDGKWRMVLDYREVNKTIPLIAAQNQHSAGILSSIYRGKYKTTLDLTNGFWAHPITPESYWLTAFTWQGKQYCWTRLPQGFLNSPALFNADVVDLLKEIPNVQAYVDDIYISHDDPQEHLEQLEKIFSILLNAGYVVSLKKSEIAQREVEFLGFNITKEGRGLTDTFKQKLLNITPPKDLKQLQSILGLLNFARNFIPNYSELVKPLYTIVAPANGKFISWTEDNSNQLQHIISVLNQADNLEERNPETRLIIKVNSSPSAGYIRYYNEGSKRPIMYVNYIFSKAEAKFTQTEKLLTTMHKGLIKAMDLAMGQEILVYSPIVSMTKIQRTPLPERKALPVRWITWMTYLEDPRIQFHYDKSLPELQQIPNVTEDVIAKTKHPSEFAMVFYTDGSAIKHPDVNKSHSAGMGIAQVQFIPEYKIVHQWSIPLGDHTAQLAEIAAVEFACKKALKISGPVLIVTDSFYVAESANKELPYWKSNGFLNNKKKPLRHVSKWKSIAECLQLKPDIIIMHEKGHQQPMTTLHTEGNNLADKLATQGSYVVHAGKRTADGSEFEKRTADGSEFESPKKKAKVE

SEQ ID NO: 443 - protein, 2084 aa, synthetic construct
MPAAKRVKLDGGDKKYSIGLDIGTNSVGWAVITDEYKVPSKKFKVLGNTDRHSIKKNLIGALLFDSGETAEATRLKRTARRRYTRRKNRICYLQEIFSNEMAKVDDSFFHRLEESFLVEEDKKHERHPIFGNIVDEVAYHEKYPTIYHLRKKLVDSTDKADLRLIYLALAHMIKFRGHFLIEGDLNPDNSDVDKLFIQLVQTYNQLFEENPINASGVDAKAILSARLSKSRRLENLIAQLPGEKKNGLFGNLIALSLGLTPNFKSNFDLAEDAKLQLSKDTYDDDLDNLLAQIGDQYADLFLAAKNLSDAILLSDILRVNTEITKAPLSASMIKRYDEHHQDLTLLKALVRQQLPEKYKEIFFDQSKNGYAGYIDGGASQEEFYKFIKPILEKMDGTEELLVKLNREDLLRKQRTFDNGSIPHQIHLGELHAILRRQEDFYPFLKDNREKIEKILTFRIPYYVGPLARGNSRFAWMTRKSEETITPWNFEEVVDKGASAQSFIERMTNFDKNLPNEKVLPKHSLLYEYFTVYNELTKVKYVTEGMRKPAFLSGEQKKAIVDLLFKTNRKVTVKQLKEDYFKKIECFDSVEISGVEDRFNASLGTYHDLLKIIKDKDFLDNEENEDILEDIVLTLTLFEDREMIEERLKTYAHLFDDKVMKQLKRRRYTGWGRLSRKLINGIRDKQSGKTILDFLKSDGFANRNFMQLIHDDSLTFKEDIQKAQVSGQGDSLHEHIANLAGSPAIKKGILQTVKVVDELVKVMGRHKPENIVIEMARENQTTQKGQKNSRERMKRIEEGIKELGSQILKEHPVENTQLQNEKLYLYYLQNGRDMYVDQELDINRLSDYDVDHIVPQSFLKDDSIDNKVLTRSDKARGKSDNVPSEEVVKKMKNYWRQLLNAKLITQRKFDNLTKAERGGLSELDKAGFIKRQLVETRQITKHVAQILDSRMNTKYDENDKLIREVKVITLKSKLVSDFRKDFQFYKVREINNYHHAHDAYLNAVVGTALIKKYPKLESEFVYGDYKVYDVRKMIAKSEQEIGKATAKYFFYSNIMNFFKTEITLANGEIRKRPLIETNGETGEIVWDKGRDFATVRKVLSMPQVNIVKKTEVQTGGFSKESILPKRNSDKLIARKKDWDPKKYGGFDSPTVAYSVLVVAKVEKGKSKKLKSVKELLGITIMERSSFEKNPIDFLEAKGYKEVKKDLIIKLPKYSLFELENGRKRMLASAGELQKGNELALPSKYVNFLYLASHYEKLKGSPEDNEQKQLFVEQHKHYLDEIIEQISEFSKRVILADANLDKVLSAYNKHRDKPIREQAENIIHLFTLTNLGAPAAFKYFDTTIDRKRYTSTKEVLDATLIHQSITGLYETRIDLSQLGGDGGEAAAKGGGGGVPWLMKKPLQLTVLVPLHEYQERLLQQTALPKEQKELLQKLFLKYDALWQHWENQVGHRRIKPHNIATGTLAPRPQKQYPINPKAKPSIQIVIDDLLKQGVLIQQNSTMNTPVYPVPKPDGKWRMVLDYREVNKTIPLIAAQNQHSAGILSSIYRGKYKTTLDLTNGFWAHPITPESYWLTAFTWQGKQYCWTRLPQGFLNSPALFNADVVDLLKEIPNVQAYVDDIYISHDDPQEHLEQLEKIFSILLNAGYVVSLKKSEIAQREVEFLGFNITKEGRGLTDTFKQKLLNITPPKDLKQLQSILGLLNFARNFIPNYSELVKPLYTIVAPANGKFISWTEDNSNQLQHIISVLNQADNLEERNPETRLIIKVNSSPSAGYIRYYNEGSKRPIMYVNYIFSKAEAKFTQTEKLLTTMHKGLIKAMDLAMGQEILVYSPIVSMTKIQRTPLPERKALPVRWITWMTYLEDPRIQFHYDKSLPELQQIPNVTEDVIAKTKHPSEFAMVFYTDGSAIKHPDVNKSHSAGMGIAQVQFIPEYKIVHQWSIPLGDHTAQLAEIAAVEFACKKALKISGPVLIVTDSFYVAESANKELPYWKSNGFLNNKKKPLRHVSKWKSIAECLQLKPDIIIMHEKGHQQPMTTLHTEGNNLADKLATQGSYVVHAGKRTADGSEFEKRTADGSEFESPKKKAKVE

SEQ ID NO: 444 - protein, 2087 aa, synthetic construct
MPAAKRVKLDGGDKKYSIGLDIGTNSVGWAVITDEYKVPSKKFKVLGNTDRHSIKKNLIGALLFDSGETAEATRLKRTARRRYTRRKNRICYLQEIFSNEMAKVDDSFFHRLEESFLVEEDKKHERHPIFGNIVDEVAYHEKYPTIYHLRKKLVDSTDKADLRLIYLALAHMIKFRGHFLIEGDLNPDNSDVDKLFIQLVQTYNQLFEENPINASGVDAKAILSARLSKSRRLENLIAQLPGEKKNGLFGNLIALSLGLTPNFKSNFDLAEDAKLQLSKDTYDDDLDNLLAQIGDQYADLFLAAKNLSDAILLSDILRVNTEITKAPLSASMIKRYDEHHQDLTLLKALVRQQLPEKYKEIFFDQSKNGYAGYIDGGASQEEFYKFIKPILEKMDGTEELLVKLNREDLLRKQRTFDNGSIPHQIHLGELHAILRRQEDFYPFLKDNREKIEKILTFRIPYYVGPLARGNSRFAWMTRKSEETITPWNFEEVVDKGASAQSFIERMTNFDKNLPNEKVLPKHSLLYEYFTVYNELTKVKYVTEGMRKPAFLSGEQKKAIVDLLFKTNRKVTVKQLKEDYFKKIECFDSVEISGVEDRFNASLGTYHDLLKIIKDKDFLDNEENEDILEDIVLTLTLFEDREMIEERLKTYAHLFDDKVMKQLKRRRYTGWGRLSRKLINGIRDKQSGKTILDFLKSDGFANRNFMQLIHDDSLTFKEDIQKAQVSGQGDSLHEHIANLAGSPAIKKGILQTVKVVDELVKVMGRHKPENIVIEMARENQTTQKGQKNSRERMKRIEEGIKELGSQILKEHPVENTQLQNEKLYLYYLQNGRDMYVDQELDINRLSDYDVDHIVPQSFLKDDSIDNKVLTRSDKARGKSDNVPSEEVVKKMKNYWRQLLNAKLITQRKFDNLTKAERGGLSELDKAGFIKRQLVETRQITKHVAQILDSRMNTKYDENDKLIREVKVITLKSKLVSDFRKDFQFYKVREINNYHHAHDAYLNAVVGTALIKKYPKLESEFVYGDYKVYDVRKMIAKSEQEIGKATAKYFFYSNIMNFFKTEITLANGEIRKRPLIETNGETGEIVWDKGRDFATVRKVLSMPQVNIVKKTEVQTGGFSKESILPKRNSDKLIARKKDWDPKKYGGFDSPTVAYSVLVVAKVEKGKSKKLKSVKELLGITIMERSSFEKNPIDFLEAKGYKEVKKDLIIKLPKYSLFELENGRKRMLASAGELQKGNELALPSKYVNFLYLASHYEKLKGSPEDNEQKQLFVEQHKHYLDEIIEQISEFSKRVILADANLDKVLSAYNKHRDKPIREQAENIIHLFTLTNLGAPAAFKYFDTTIDRKRYTSTKEVLDATLIHQSITGLYETRIDLSQLGGDGGPAPGGSEAAAKGGVPWLMKKPLQLTVLVPLHEYQERLLQQTALPKEQKELLQKLFLKYDALWQHWENQVGHRRIKPHNIATGTLAPRPQKQYPINPKAKPSIQIVIDDLLKQGVLIQQNSTMNTPVYPVPKPDGKWRMVLDYREVNKTIPLIAAQNQHSAGILSSIYRGKYKTTLDLTNGFWAHPITPESYWLTAFTWQGKQYCWTRLPQGFLNSPALFNADVVDLLKEIPNVQAYVDDIYISHDDPQEHLEQLEKIFSILLNAGYVVSLKKSEIAQREVEFLGFNITKEGRGLTDTFKQKLLNITPPKDLKQLQSILGLLNFARNFIPNYSELVKPLYTIVAPANGKFISWTEDNSNQLQHIISVLNQADNLEERNPETRLIIKVNSSPSAGYIRYYNEGSKRPIMYVNYIFSKAEAKFTQTEKLLTTMHKGLIKAMDLAMGQEILVYSPIVSMTKIQRTPLPERKALPVRWITWMTYLEDPRIQFHYDKSLPELQQIPNVTEDVIAKTKHPSEFAMVFYTDGSAIKHPDVNKSHSAGMGIAQVQFIPEYKIVHQWSIPLGDHTAQLAEIAAVEFACKKALKISGPVLIVTDSFYVAESANKELPYWKSNGFLNNKKKPLRHVSKWKSIAECLQLKPDIIIMHEKGHQQPMTTLHTEGNNLADKLATQGSYVVHAGKRTADGSEFEKRTADGSEFESPKKKAKVE

SEQ ID NO: 445 - protein, 2091 aa, synthetic construct
MPAAKRVKLDGGDKKYSIGLDIGTNSVGWAVITDEYKVPSKKFKVLGNTDRHSIKKNLIGALLFDSGETAEATRLKRTARRRYTRRKNRICYLQEIFSNEMAKVDDSFFHRLEESFLVEEDKKHERHPIFGNIVDEVAYHEKYPTIYHLRKKLVDSTDKADLRLIYLALAHMIKFRGHFLIEGDLNPDNSDVDKLFIQLVQTYNQLFEENPINASGVDAKAILSARLSKSRRLENLIAQLPGEKKNGLFGNLIALSLGLTPNFKSNFDLAEDAKLQLSKDTYDDDLDNLLAQIGDQYADLFLAAKNLSDAILLSDILRVNTEITKAPLSASMIKRYDEHHQDLTLLKALVRQQLPEKYKEIFFDQSKNGYAGYIDGGASQEEFYKFIKPILEKMDGTEELLVKLNREDLLRKQRTFDNGSIPHQIHLGELHAILRRQEDFYPFLKDNREKIEKILTFRIPYYVGPLARGNSRFAWMTRKSEETITPWNFEEVVDKGASAQSFIERMTNFDKNLPNEKVLPKHSLLYEYFTVYNELTKVKYVTEGMRKPAFLSGEQKKAIVDLLFKTNRKVTVKQLKEDYFKKIECFDSVEISGVEDRFNASLGTYHDLLKIIKDKDFLDNEENEDILEDIVLTLTLFEDREMIEERLKTYAHLFDDKVMKQLKRRRYTGWGRLSRKLINGIRDKQSGKTILDFLKSDGFANRNFMQLIHDDSLTFKEDIQKAQVSGQGDSLHEHIANLAGSPAIKKGILQTVKVVDELVKVMGRHKPENIVIEMARENQTTQKGQKNSRERMKRIEEGIKELGSQILKEHPVENTQLQNEKLYLYYLQNGRDMYVDQELDINRLSDYDVDHIVPQSFLKDDSIDNKVLTRSDKARGKSDNVPSEEVVKKMKNYWRQLLNAKLITQRKFDNLTKAERGGLSELDKAGFIKRQLVETRQITKHVAQILDSRMNTKYDENDKLIREVKVITLKSKLVSDFRKDFQFYKVREINNYHHAHDAYLNAVVGTALIKKYPKLESEFVYGDYKVYDVRKMIAKSEQEIGKATAKYFFYSNIMNFFKTEITLANGEIRKRPLIETNGETGEIVWDKGRDFATVRKVLSMPQVNIVKKTEVQTGGFSKESILPKRNSDKLIARKKDWDPKKYGGFDSPTVAYSVLVVAKVEKGKSKKLKSVKELLGITIMERSSFEKNPIDFLEAKGYKEVKKDLIIKLPKYSLFELENGRKRMLASAGELQKGNELALPSKYVNFLYLASHYEKLKGSPEDNEQKQLFVEQHKHYLDEIIEQISEFSKRVILADANLDKVLSAYNKHRDKPIREQAENIIHLFTLTNLGAPAAFKYFDTTIDRKRYTSTKEVLDATLIHQSITGLYETRIDLSQLGGDGGGGGGSEAAAKGGGGSGGVPWLMKKPLQLTVLVPLHEYQERLLQQTALPKEQKELLQKLFLKYDALWQHWENQVGHRRIKPHNIATGTLAPRPQKQYPINPKAKPSIQIVIDDLLKQGVLIQQNSTMNTPVYPVPKPDGKWRMVLDYREVNKTIPLIAAQNQHSAGILSSIYRGKYKTTLDLTNGFWAHPITPESYWLTAFTWQGKQYCWTRLPQGFLNSPALFNADVVDLLKEIPNVQAYVDDIYISHDDPQEHLEQLEKIFSILLNAGYVVSLKKSEIAQREVEFLGFNITKEGRGLTDTFKQKLLNITPPKDLKQLQSILGKLNFARNFIPNYSELVKPLYTIVAPANGKFISWTEDNSNQLQHIISVLNQADNLEERNPETRLIIKVNSSPSAGYIRYYNEGSKRPIMYVNYIFSKAEAKFTQTEKLLTTMHKGLIKAMDLAMGQEILVYSPIVSMTKIQRTPLPERKALPVRWITWMTYLEDPRIQFHYDKSLPELQQIPNVTEDVIAKTKHPSEFAMVFYTDGSAIKHPDVNKSHSAGMGIAQVQFIPEYKIVHQWSIPLGDHTAQLAEIAAVEFACKKALKISGPVLIVTDSFYVAESANKELPYWKSNGFLNNKKKPLRHVSKWKSIAECLQLKPDIIIMHEKGHQQPMTTLHTEGNNLADKLATQGSYVVHAGKRTADGSEFEKRTADGSEFESPKKKAKVE

SEQ ID NO: 446 - protein, 2082 aa, synthetic construct
MPAAKRVKLDGGDKKYSIGLDIGTNSVGWAVITDEYKVPSKKFKVLGNTDRHSIKKNLIGALLFDSGETAEATRLKRTARRRYTRRKNRICYLQEIFSNEMAKVDDSFFHRLEESFLVEEDKKHERHPIFGNIVDEVAYHEKYPTIYHLRKKLVDSTDKADLRLIYLALAHMIKFRGHFLIEGDLNPDNSDVDKLFIQLVQTYNQLFEENPINASGVDAKAILSARLSKSRRLENLIAQLPGEKKNGLFGNLIALSLGLTPNFKSNFDLAEDAKLQLSKDTYDDDLDNLLAQIGDQYADLFLAAKNLSDAILLSDILRVNTEITKAPLSASMIKRYDEHHQDLTLLKALVRQQLPEKYKEIFFDQSKNGYAGYIDGGASQEEFYKFIKPILEKMDGTEELLVKLNREDLLRKQRTFDNGSIPHQIHLGELHAILRRQEDFYPFLKDNREKIEKILTFRIPYYVGPLARGNSRFAWMTRKSEETITPWNFEEVVDKGASAQSFIERMTNFDKNLPNEKVLPKHSLLYEYFTVYNELTKVKYVTEGMRKPAFLSGEQKKAIVDLLFKTNRKVTVKQLKEDYFKKIECFDSVEISGVEDRFNASLGTYHDLLKIIKDKDFLDNEENEDILEDIVLTLTLFEDREMIEERLKTYAHLFDDKVMKQLKRRRYTGWGRLSRKLINGIRDKQSGKTILDFLKSDGFANRNFMQLIHDDSLTFKEDIQKAQVSGQGDSLHEHIANLAGSPAIKKGILQTVKVVDELVKVMGRHKPENIVIEMARENQTTQKGQKNSRERMKRIEEGIKELGSQILKEHPVENTQLQNEKLYLYYLQNGRDMYVDQELDINRLSDYDVDHIVPQSFLKDDSIDNKVLTRSDKARGKSDNVPSEEVVKKMKNYWRQLLNAKLITQRKFDNLTKAERGGLSELDKAGFIKRQLVETRQITKHVAQILDSRMNTKYDENDKLIREVKVITLKSKLVSDFRKDFQFYKVREINNYHHAHDAYLNAVVGTALIKKYPKLESEFVYGDYKVYDVRKMIAKSEQEIGKATAKYFFYSNIMNFFKTEITLANGEIRKRPLIETNGETGEIVWDKGRDFATVRKVLSMPQVNIVKKTEVQTGGFSKESILPKRNSDKLIARKKDWDPKKYGGFDSPTVAYSVLVVAKVEKGKSKKLKSVKELLGITIMERSSFEKNPIDFLEAKGYKEVKKDLIIKLPKYSLFELENGRKRMLASAGELQKGNELALPSKYVNFLYLASHYEKLKGSPEDNEQKQLFVEQHKHYLDEIIEQISEFSKRVILADANLDKVLSAYNKHRDKPIREQAENIIHLFTLTNLGAPAAFKYFDTTIDRKRYTSTKEVLDATLIHQSITGLYETRIDLSQLGGDGGGGGGSSGGVPWLMKKPLQLTVLVPLHEYQERLLQQTALPKEQKELLQKLFLKYDALWQHWENQVGHRRIKPHNIATGTLAPRPQKQYPINPKAKPSIQIVIDDLLKQGVLIQQNSTMNTPVYPVPKPDGKWRMVLDYREVNKTIPLIAAQNQHSAGILSSIYRGKYKTTLDLTNGFWAHPITPESYWLTAFTWQGKQYCWTRLPQGFLNSPALFNADVVDLLKEIPNVQAYVDDIYISHDDPQEHLEQLEKIFSILLNAGYVVSLKKSEIAQREVEFLGFNITKEGRGLTDTFKQKLLNITPPKDLKQLQSILGKLNFARNFIPNYSELVKPLYTIVAPANGKFISWTEDNSNQLQHIISVLNQADNLEERNPETRLIIKVNSSPSAGYIRYYNEGSKRPIMYVNYIFSKAEAKFTQTEKLLTTMHKGLIKAMDLAMGQEILVYSPIVSMTKIQRTPLPERKALPVRWITWMTYLEDPRIQFHYDKSLPELQQIPNVTEDVIAKTKHPSEFAMVFYTDGSAIKHPDVNKSHSAGMGIAQVQFIPEYKIVHQWSIPLGDHTAQLAEIAAVEFACKKALKISGPVLIVTDSFYVAESANKELPYWKSNGFLNNKKKPLRHVSKWKSIAECLQLKPDIIIMHEKGHQQPMTTLHTEGNNLADKLATQGSYVVHAGKRTADGSEFEKRTADGSEFESPKKKAKVE

SEQ ID NO: 447 - protein, 2101 aa, synthetic construct
MPAAKRVKLDGGDKKYSIGLDIGTNSVGWAVITDEYKVPSKKFKVLGNTDRHSIKKNLIGALLFDSGETAEATRLKRTARRRYTRRKNRICYLQEIFSNEMAKVDDSFFHRLEESFLVEEDKKHERHPIFGNIVDEVAYHEKYPTIYHLRKKLVDSTDKADLRLIYLALAHMIKFRGHFLIEGDLNPDNSDVDKLFIQLVQTYNQLFEENPINASGVDAKAILSARLSKSRRLENLIAQLPGEKKNGLFGNLIALSLGLTPNFKSNFDLAEDAKLQLSKDTYDDDLDNLLAQIGDQYADLFLAAKNLSDAILLSDILRVNTEITKAPLSASMIKRYDEHHQDLTLLKALVRQQLPEKYKEIFFDQSKNGYAGYIDGGASQEEFYKFIKPILEKMDGTEELLVKLNREDLLRKQRTFDNGSIPHQIHLGELHAILRRQEDFYPFLKDNREKIEKILTFRIPYYVGPLARGNSRFAWMTRKSEETITPWNFEEVVDKGASAQSFIERMTNFDKNLPNEKVLPKHSLLYEYFTVYNELTKVKYVTEGMRKPAFLSGEQKKAIVDLLFKTNRKVTVKQLKEDYFKKIECFDSVEISGVEDRFNASLGTYHDLLKIIKDKDFLDNEENEDILEDIVLTLTLFEDREMIEERLKTYAHLFDDKVMKQLKRRRYTGWGRLSRKLINGIRDKQSGKTILDFLKSDGFANRNFMQLIHDDSLTFKEDIQKAQVSGQGDSLHEHIANLAGSPAIKKGILQTVKVVDELVKVMGRHKPENIVIEMARENQTTQKGQKNSRERMKRIEEGIKELGSQILKEHPVENTQLQNEKLYLYYLQNGRDMYVDQELDINRLSDYDVDHIVPQSFLKDDSIDNKVLTRSDKARGKSDNVPSEEVVKKMKNYWRQLLNAKLITQRKFDNLTKAERGGLSELDKAGFIKRQLVETRQITKHVAQILDSRMNTKYDENDKLIREVKVITLKSKLVSDFRKDFQFYKVREINNYHHAHDAYLNAVVGTALIKKYPKLESEFVYGDYKVYDVRKMIAKSEQEIGKATAKYFFYSNIMNFFKTEITLANGEIRKRPLIETNGETGEIVWDKGRDFATVRKVLSMPQVNIVKKTEVQTGGFSKESILPKRNSDKLIARKKDWDPKKYGGFDSPTVAYSVLVVAKVEKGKSKKLKSVKELLGITIMERSSFEKNPIDFLEAKGYKEVKKDLIIKLPKYSLFELENGRKRMLASAGELQKGNELALPSKYVNFLYLASHYEKLKGSPEDNEQKQLFVEQHKHYLDEIIEQISEFSKRVILADANLDKVLSAYNKHRDKPIREQAENIIHLFTLTNLGAPAAFKYFDTTIDRKRYTSTKEVLDATLIHQSITGLYETRIDLSQLGGDGGEAAAKEAAAKEAAAKEAAAKEAAAKGGVPWLMKKPLQLTVLVPLHEYQERLLQQTALPKEQKELLQKLFLKYDALWQHWENQVGHRRIKPHNIATGTLAPRPQKQYPINPKAKPSIQIVIDDLLKQGVLIQQNSTMNTPVYPVPKPDGKWRMVLDYREVNKTIPLIAAQNQHSAGILSSIYRGKYKTTLDLTNGFWAHPITPESYWLTAFTWQGKQYCWTRLPQGFLNSPALFNADVVDLLKEIPNVQAYVDDIYISHDDPQEHLEQLEKIFSILLNAGYVVSLKKSEIAQREVEFLGFNITKEGRGLTDTFKQKLLNITPPKDLKQLQSILGKLNFARNFIPNYSELVKPLYTIVAPANGKFISWTEDNSNQLQHIISVLNQADNLEERNPETRLIIKVNSSPSAGYIRYYNEGSKRPIMYVNYIFSKAEAKFTQTEKLLTTMHKGLIKAMDLAMGQEILVYSPIVSMTKIQRTPLPERKALPVRWITWMTYLEDPRIQFHYDKSLPELQQIPNVTEDVIAKTKHPSEFAMVFYTDGSAIKHPDVNKSHSAGMGIAQVQFIPEYKIVHQWSIPLGDHTAQLAEIAAVEFACKKALKISGPVLIVTDSFYVAESANKELPYWKSNGFLNNKKKPLRHVSKWKSIAECLQLKPDIIIMHEKGHQQPMTTLHTEGNNLADKLATQGSYVVHAGKRTADGSEFEKRTADGSEFESPKKKAKVE

SEQ ID NO: 448 - protein, 2085 aa, synthetic construct
MPAAKRVKLDGGDKKYSIGLDIGTNSVGWAVITDEYKVPSKKFKVLGNTDRHSIKKNLIGALLFDSGETAEATRLKRTARRRYTRRKNRICYLQEIFSNEMAKVDDSFFHRLEESFLVEEDKKHERHPIFGNIVDEVAYHEKYPTIYHLRKKLVDSTDKADLRLIYLALAHMIKFRGHFLIEGDLNPDNSDVDKLFIQLVQTYNQLFEENPINASGVDAKAILSARLSKSRRLENLIAQLPGEKKNGLFGNLIALSLGLTPNFKSNFDLAEDAKLQLSKDTYDDDLDNLLAQIGDQYADLFLAAKNLSDAILLSDILRVNTEITKAPLSASMIKRYDEHHQDLTLLKALVRQQLPEKYKEIFFDQSKNGYAGYIDGGASQEEFYKFIKPILEKMDGTEELLVKLNREDLLRKQRTFDNGSIPHQIHLGELHAILRRQEDFYPFLKDNREKIEKILTFRIPYYVGPLARGNSRFAWMTRKSEETITPWNFEEVVDKGASAQSFIERMTNFDKNLPNEKVLPKHSLLYEYFTVYNELTKVKYVTEGMRKPAFLSGEQKKAIVDLLFKTNRKVTVKQLKEDYFKKIECFDSVEISGVEDRFNASLGTYHDLLKIIKDKDFLDNEENEDILEDIVLTLTLFEDREMIEERLKTYAHLFDDKVMKQLKRRRYTGWGRLSRKLINGIRDKQSGKTILDFLKSDGFANRNFMQLIHDDSLTFKEDIQKAQVSGQGDSLHEHIANLAGSPAIKKGILQTVKVVDELVKVMGRHKPENIVIEMARENQTTQKGQKNSRERMKRIEEGIKELGSQILKEHPVENTQLQNEKLYLYYLQNGRDMYVDQELDINRLSDYDVDHIVPQSFLKDDSIDNKVLTRSDKARGKSDNVPSEEVVKKMKNYWRQLLNAKLITQRKFDNLTKAERGGLSELDKAGFIKRQLVETRQITKHVAQILDSRMNTKYDENDKLIREVKVITLKSKLVSDFRKDFQFYKVREINNYHHAHDAYLNAVVGTALIKKYPKLESEFVYGDYKVYDVRKMIAKSEQEIGKATAKYFFYSNIMNFFKTEITLANGEIRKRPLIETNGETGEIVWDKGRDFATVRKVLSMPQVNIVKKTEVQTGGFSKESILPKRNSDKLIARKKDWDPKKYGGFDSPTVAYSVLVVAKVEKGKSKKLKSVKELLGITIMERSSFEKNPIDFLEAKGYKEVKKDLIIKLPKYSLFELENGRKRMLASAGELQKGNELALPSKYVNFLYLASHYEKLKGSPEDNEQKQLFVEQHKHYLDEIIEQISEFSKRVILADANLDKVLSAYNKHRDKPIREQAENIIHLFTLTNLGAPAAFKYFDTTIDRKRYTSTKEVLDATLIHQSITGLYETRIDLSQLGGDGGGGGPAPGGSGGVPWLMKKPLQLTVLVPLHEYQERLLQQTALPKEQKELLQKLFLKYDALWQHWENQVGHRRIKPHNIATGTLAPRPQKQYPINPKAKPSIQIVIDDLLKQGVLIQQNSTMNTPVYPVPKPDGKWRMVLDYREVNKTIPLIAAQNQHSAGILSSIYRGKYKTTLDLTNGFWAHPITPESYWLTAFTWQGKQYCWTRLPQGFLNSPALFNADVVDLLKEIPNVQAYVDDIYISHDDPQEHLEQLEKIFSILLNAGYVVSLKKSEIAQREVEFLGFNITKEGRGLTDTFKQKLLNITPPKDLKQLQSILGKLNFARNFIPNYSELVKPLYTIVAPANGKFISWTEDNSNQLQHIISVLNQADNLEERNPETRLIIKVNSSPSAGYIRYYNEGSKRPIMYVNYIFSKAEAKFTQTEKLLTTMHKGLIKAMDLAMGQEILVYSPIVSMTKIQRTPLPERKALPVRWITWMTYLEDPRIQFHYDKSLPELQQIPNVTEDVIAKTKHPSEFAMVFYTDGSAIKHPDVNKSHSAGMGIAQVQFIPEYKIVHQWSIPLGDHTAQLAEIAAVEFACKKALKISGPVLIVTDSFYVAESANKELPYWKSNGFLNNKKKPLRHVSKWKSIAECLQLKPDIIIMHEKGHQQPMTTLHTEGNNLADKLATQGSYVVHAGKRTADGSEFEKRTADGSEFESPKKKAKVE

SEQ ID NO: 449 - protein, 2088 aa, synthetic construct
MPAAKRVKLDGGDKKYSIGLDIGTNSVGWAVITDEYKVPSKKFKVLGNTDRHSIKKNLIGALLFDSGETAEATRLKRTARRRYTRRKNRICYLQEIFSNEMAKVDDSFFHRLEESFLVEEDKKHERHPIFGNIVDEVAYHEKYPTIYHLRKKLVDSTDKADLRLIYLALAHMIKFRGHFLIEGDLNPDNSDVDKLFIQLVQTYNQLFEENPINASGVDAKAILSARLSKSRRLENLIAQLPGEKKNGLFGNLIALSLGLTPNFKSNFDLAEDAKLQLSKDTYDDDLDNLLAQIGDQYADLFLAAKNLSDAILLSDILRVNTEITKAPLSASMIKRYDEHHQDLTLLKALVRQQLPEKYKEIFFDQSKNGYAGYIDGGASQEEFYKFIKPILEKMDGTEELLVKLNREDLLRKQRTFDNGSIPHQIHLGELHAILRRQEDFYPFLKDNREKIEKILTFRIPYYVGPLARGNSRFAWMTRKSEETITPWNFEEVVDKGASAQSFIERMTNFDKNLPNEKVLPKHSLLYEYFTVYNELTKVKYVTEGMRKPAFLSGEQKKAIVDLLFKTNRKVTVKQLKEDYFKKIECFDSVEISGVEDRFNASLGTYHDLLKIIKDKDFLDNEENEDILEDIVLTLTLFEDREMIEERLKTYAHLFDDKVMKQLKRRRYTGWGRLSRKLINGIRDKQSGKTILDFLKSDGFANRNFMQLIHDDSLTFKEDIQKAQVSGQGDSLHEHIANLAGSPAIKKGILQTVKVVDELVKVMGRHKPENIVIEMARENQTTQKGQKNSRERMKRIEEGIKELGSQILKEHPVENTQLQNEKLYLYYLQNGRDMYVDQELDINRLSDYDVDHIVPQSFLKDDSIDNKVLTRSDKARGKSDNVPSEEVVKKMKNYWRQLLNAKLITQRKFDNLTKAERGGLSELDKAGFIKRQLVETRQITKHVAQILDSRMNTKYDENDKLIREVKVITLKSKLVSDFRKDFQFYKVREINNYHHAHDAYLNAVVGTALIKKYPKLESEFVYGDYKVYDVRKMIAKSEQEIGKATAKYFFYSNIMNFFKTEITLANGEIRKRPLIETNGETGEIVWDKGRDFATVRKVLSMPQVNIVKKTEVQTGGFSKESILPKRNSDKLIARKKDWDPKKYGGFDSPTVAYSVLVVAKVEKGKSKKLKSVKELLGITIMERSSFEKNPIDFLEAKGYKEVKKDLIIKLPKYSLFELENGRKRMLASAGELQKGNELALPSKYVNFLYLASHYEKLKGSPEDNEQKQLFVEQHKHYLDEIIEQISEFSKRVILADANLDKVLSAYNKHRDKPIREQAENIIHLFTLTNLGAPAAFKYFDTTIDRKRYTSTKEVLDATLIHQSITGLYETRIDLSQLGGDGGGSSGSSGSSGSSGGVPWLMKKPLQLTVLVPLHEYQERLLQQTALPKEQKELLQKLFLKYDALWQHWENQVGHRRIKPHNIATGTLAPRPQKQYPINPKAKPSIQIVIDDLLKQGVLIQQNSTMNTPVYPVPKPDGKWRMVLDYREVNKTIPLIAAQNQHSAGILSSIYRGKYKTTLDLTNGFWAHPITPESYWLTAFTWQGKQYCWTRLPQGFLNSPALFNADVVDLLKEIPNVQAYVDDIYISHDDPQEHLEQLEKIFSILLNAGYVVSLKKSEIAQREVEFLGFNITKEGRGLTDTFKQKLLNITPPKDLKQLQSILGKLNFARNFIPNYSELVKPLYTIVAPANGKFISWTEDNSNQLQHIISVLNQADNLEERNPETRLIIKVNSSPSAGYIRYYNEGSKRPIMYVNYIFSKAEAKFTQTEKLLTTMHKGLIKAMDLAMGQEILVYSPIVSMTKIQRTPLPERKALPVRWITWMTYLEDPRIQFHYDKSLPELQQIPNVTEDVIAKTKHPSEFAMVFYTDGSAIKHPDVNKSHSAGMGIAQVQFIPEYKIVHQWSIPLGDHTAQLAEIAAVEFACKKALKISGPVLIVTDSFYVAESANKELPYWKSNGFLNNKKKPLRHVSKWKSIAECLQLKPDIIIMHEKGHQQPMTTLHTEGNNLADKLATQGSYVVHAGKRTADGSEFEKRTADGSEFESPKKKAKVE

SEQ ID NO: 450 - protein, 2094 aa, synthetic construct
MPAAKRVKLDGGDKKYSIGLDIGTNSVGWAVITDEYKVPSKKFKVLGNTDRHSIKKNLIGALLFDSGETAEATRLKRTARRRYTRRKNRICYLQEIFSNEMAKVDDSFFHRLEESFLVEEDKKHERHPIFGNIVDEVAYHEKYPTIYHLRKKLVDSTDKADLRLIYLALAHMIKFRGHFLIEGDLNPDNSDVDKLFIQLVQTYNQLFEENPINASGVDAKAILSARLSKSRRLENLIAQLPGEKKNGLFGNLIALSLGLTPNFKSNFDLAEDAKLQLSKDTYDDDLDNLLAQIGDQYADLFLAAKNLSDAILLSDILRVNTEITKAPLSASMIKRYDEHHQDLTLLKALVRQQLPEKYKEIFFDQSKNGYAGYIDGGASQEEFYKFIKPILEKMDGTEELLVKLNREDLLRKQRTFDNGSIPHQIHLGELHAILRRQEDFYPFLKDNREKIEKILTFRIPYYVGPLARGNSRFAWMTRKSEETITPWNFEEVVDKGASAQSFIERMTNFDKNLPNEKVLPKHSLLYEYFTVYNELTKVKYVTEGMRKPAFLSGEQKKAIVDLLFKTNRKVTVKQLKEDYFKKIECFDSVEISGVEDRFNASLGTYHDLLKIIKDKDFLDNEENEDILEDIVLTLTLFEDREMIEERLKTYAHLFDDKVMKQLKRRRYTGWGRLSRKLINGIRDKQSGKTILDFLKSDGFANRNFMQLIHDDSLTFKEDIQKAQVSGQGDSLHEHIANLAGSPAIKKGILQTVKVVDELVKVMGRHKPENIVIEMARENQTTQKGQKNSRERMKRIEEGIKELGSQILKEHPVENTQLQNEKLYLYYLQNGRDMYVDQELDINRLSDYDVDHIVPQSFLKDDSIDNKVLTRSDKARGKSDNVPSEEVVKKMKNYWRQLLNAKLITQRKFDNLTKAERGGLSELDKAGFIKRQLVETRQITKHVAQILDSRMNTKYDENDKLIREVKVITLKSKLVSDFRKDFQFYKVREINNYHHAHDAYLNAVVGTALIKKYPKLESEFVYGDYKVYDVRKMIAKSEQEIGKATAKYFFYSNIMNFFKTEITLANGEIRKRPLIETNGETGEIVWDKGRDFATVRKVLSMPQVNIVKKTEVQTGGFSKESILPKRNSDKLIARKKDWDPKKYGGFDSPTVAYSVLVVAKVEKGKSKKLKSVKELLGITIMERSSFEKNPIDFLEAKGYKEVKKDLIIKLPKYSLFELENGRKRMLASAGELQKGNELALPSKYVNFLYLASHYEKLKGSPEDNEQKQLFVEQHKHYLDEIIEQISEFSKRVILADANLDKVLSAYNKHRDKPIREQAENIIHLFTLTNLGAPAAFKYFDTTIDRKRYTSTKEVLDATLIHQSITGLYETRIDLSQLGGDGGGSSGSSGSSGSSGSSGSSGGVPWLMKKPLQLTVLVPLHEYQERLLQQTALPKEQKELLQKLFLKYDALWQHWENQVGHRRIKPHNIATGTLAPRPQKQYPINPKAKPSIQIVIDDLLKQGVLIQQNSTMNTPVYPVPKPDGKWRMVLDYREVNKTIPLIAAQNQHSAGILSSIYRGKYKTTLDLTNGFWAHPITPESYWLTAFTWQGKQYCWTRLPQGFLNSPALFNADVVDLLKEIPNVQAYVDDIYISHDDPQEHLEQLEKIFSILLNAGYVVSLKKSEIAQREVEFLGFNITKEGRGLTDTFKQKLLNITPPKDLKQLQSILGKLNFARNFIPNYSELVKPLYTIVAPANGKFISWTEDNSNQLQHIISVLNQADNLEERNPETRLIIKVNSSPSAGYIRYYNEGSKRPIMYVNYIFSKAEAKFTQTEKLLTTMHKGLIKAMDLAMGQEILVYSPIVSMTKIQRTPLPERKALPVRWITWMTYLEDPRIQFHYDKSLPELQQIPNVTEDVIAKTKHPSEFAMVFYTDGSAIKHPDVNKSHSAGMGIAQVQFIPEYKIVHQWSIPLGDHTAQLAEIAAVEFACKKALKISGPVLIVTDSFYVAESANKELPYWKSNGFLNNKKKPLRHVSKWKSIAECLQLKPDIIIMHEKGHQQPMTTLHTEGNNLADKLATQGSYVVHAGKRTADGSEFEKRTADGSEFESPKKKAKVE

SEQ ID NO: 451 - protein, 2087 aa, synthetic construct
MPAAKRVKLDGGDKKYSIGLDIGTNSVGWAVITDEYKVPSKKFKVLGNTDRHSIKKNLIGALLFDSGETAEATRLKRTARRRYTRRKNRICYLQEIFSNEMAKVDDSFFHRLEESFLVEEDKKHERHPIFGNIVDEVAYHEKYPTIYHLRKKLVDSTDKADLRLIYLALAHMIKFRGHFLIEGDLNPDNSDVDKLFIQLVQTYNQLFEENPINASGVDAKAILSARLSKSRRLENLIAQLPGEKKNGLFGNLIALSLGLTPNFKSNFDLAEDAKLQLSKDTYDDDLDNLLAQIGDQYADLFLAAKNLSDAILLSDILRVNTEITKAPLSASMIKRYDEHHQDLTLLKALVRQQLPEKYKEIFFDQSKNGYAGYIDGGASQEEFYKFIKPILEKMDGTEELLVKLNREDLLRKQRTFDNGSIPHQIHLGELHAILRRQEDFYPFLKDNREKIEKILTFRIPYYVGPLARGNSRFAWMTRKSEETITPWNFEEVVDKGASAQSFIERMTNFDKNLPNEKVLPKHSLLYEYFTVYNELTKVKYVTEGMRKPAFLSGEQKKAIVDLLFKTNRKVTVKQLKEDYFKKIECFDSVEISGVEDRFNASLGTYHDLLKIIKDKDFLDNEENEDILEDIVLTLTLFEDREMIEERLKTYAHLFDDKVMKQLKRRRYTGWGRLSRKLINGIRDKQSGKTILDFLKSDGFANRNFMQLIHDDSLTFKEDIQKAQVSGQGDSLHEHIANLAGSPAIKKGILQTVKVVDELVKVMGRHKPENIVIEMARENQTTQKGQKNSRERMKRIEEGIKELGSQILKEHPVENTQLQNEKLYLYYLQNGRDMYVDQELDINRLSDYDVDHIVPQSFLKDDSIDNKVLTRSDKARGKSDNVPSEEVVKKMKNYWRQLLNAKLITQRKFDNLTKAERGGLSELDKAGFIKRQLVETRQITKHVAQILDSRMNTKYDENDKLIREVKVITLKSKLVSDFRKDFQFYKVREINNYHHAHDAYLNAVVGTALIKKYPKLESEFVYGDYKVYDVRKMIAKSEQEIGKATAKYFFYSNIMNFFKTEITLANGEIRKRPLIETNGETGEIVWDKGRDFATVRKVLSMPQVNIVKKTEVQTGGFSKESILPKRNSDKLIARKKDWDPKKYGGFDSPTVAYSVLVVAKVEKGKSKKLKSVKELLGITIMERSSFEKNPIDFLEAKGYKEVKKDLIIKLPKYSLFELENGRKRMLASAGELQKGNELALPSKYVNFLYLASHYEKLKGSPEDNEQKQLFVEQHKHYLDEIIEQISEFSKRVILADANLDKVLSAYNKHRDKPIREQAENIIHLFTLTNLGAPAAFKYFDTTIDRKRYTSTKEVLDATLIHQSITGLYETRIDLSQLGGDGGPAPGGGEAAAKGGVPWLMKKPLQLTVLVPLHEYQERLLQQTALPKEQKELLQKLFLKYDALWQHWENQVGHRRIKPHNIATGTLAPRPQKQYPINPKAKPSIQIVIDDLLKQGVLIQQNSTMNTPVYPVPKPDGKWRMVLDYREVNKTIPLIAAQNQHSAGILSSIYRGKYKTTLDLTNGFWAHPITPESYWLTAFTWQGKQYCWTRLPQGFLNSPALFNADVVDLLKEIPNVQAYVDDIYISHDDPQEHLEQLEKIFSILLNAGYVVSLKKSEIAQREVEFLGFNITKEGRGLTDTFKQKLLNITPPKDLKQLQSILGKLNFARNFIPNYSELVKPLYTIVAPANGKFISWTEDNSNQLQHIISVLNQADNLEERNPETRLIIKVNSSPSAGYIRYYNEGSKRPIMYVNYIFSKAEAKFTQTEKLLTTMHKGLIKAMDLAMGQEILVYSPIVSMTKIQRTPLPERKALPVRWITWMTYLEDPRIQFHYDKSLPELQQIPNVTEDVIAKTKHPSEFAMVFYTDGSAIKHPDVNKSHSAGMGIAQVQFIPEYKIVHQWSIPLGDHTAQLAEIAAVEFACKKALKISGPVLIVTDSFYVAESANKELPYWKSNGFLNNKKKPLRHVSKWKSIAECLQLKPDIIIMHEKGHQQPMTTLHTEGNNLADKLATQGSYVVHAGKRTADGSEFEKRTADGSEFESPKKKAKVE

SEQ ID NO: 452 - protein, 2081 aa, synthetic construct
MPAAKRVKLDGGDKKYSIGLDIGTNSVGWAVITDEYKVPSKKFKVLGNTDRHSIKKNLIGALLFDSGETAEATRLKRTARRRYTRRKNRICYLQEIFSNEMAKVDDSFFHRLEESFLVEEDKKHERHPIFGNIVDEVAYHEKYPTIYHLRKKLVDSTDKADLRLIYLALAHMIKFRGHFLIEGDLNPDNSDVDKLFIQLVQTYNQLFEENPINASGVDAKAILSARLSKSRRLENLIAQLPGEKKNGLFGNLIALSLGLTPNFKSNFDLAEDAKLQLSKDTYDDDLDNLLAQIGDQYADLFLAAKNLSDAILLSDILRVNTEITKAPLSASMIKRYDEHHQDLTLLKALVRQQLPEKYKEIFFDQSKNGYAGYIDGGASQEEFYKFIKPILEKMDGTEELLVKLNREDLLRKQRTFDNGSIPHQIHLGELHAILRRQEDFYPFLKDNREKIEKILTFRIPYYVGPLARGNSRFAWMTRKSEETITPWNFEEVVDKGASAQSFIERMTNFDKNLPNEKVLPKHSLLYEYFTVYNELTKVKYVTEGMRKPAFLSGEQKKAIVDLLFKTNRKVTVKQLKEDYFKKIECFDSVEISGVEDRFNASLGTYHDLLKIIKDKDFLDNEENEDILEDIVLTLTLFEDREMIEERLKTYAHLFDDKVMKQLKRRRYTGWGRLSRKLINGIRDKQSGKTILDFLKSDGFANRNFMQLIHDDSLTFKEDIQKAQVSGQGDSLHEHIANLAGSPAIKKGILQTVKVVDELVKVMGRHKPENIVIEMARENQTTQKGQKNSRERMKRIEEGIKELGSQILKEHPVENTQLQNEKLYLYYLQNGRDMYVDQELDINRLSDYDVDHIVPQSFLKDDSIDNKVLTRSDKARGKSDNVPSEEVVKKMKNYWRQLLNAKLITQRKFDNLTKAERGGLSELDKAGFIKRQLVETRQITKHVAQILDSRMNTKYDENDKLIREVKVITLKSKLVSDFRKDFQFYKVREINNYHHAHDAYLNAVVGTALIKKYPKLESEFVYGDYKVYDVRKMIAKSEQEIGKATAKYFFYSNIMNFFKTEITLANGEIRKRPLIETNGETGEIVWDKGRDFATVRKVLSMPQVNIVKKTEVQTGGFSKESILPKRNSDKLIARKKDWDPKKYGGFDSPTVAYSVLVVAKVEKGKSKKLKSVKELLGITIMERSSFEKNPIDFLEAKGYKEVKKDLIIKLPKYSLFELENGRKRMLASAGELQKGNELALPSKYVNFLYLASHYEKLKGSPEDNEQKQLFVEQHKHYLDEIIEQISEFSKRVILADANLDKVLSAYNKHRDKPIREQAENIIHLFTLTNLGAPAAFKYFDTTIDRKRYTSTKEVLDATLIHQSITGLYETRIDLSQLGGDGGGGGGSGGVPWLMKKPLQLTVLVPLHEYQERLLQQTALPKEQKELLQKLFLKYDALWQHWENQVGHRRIKPHNIATGTLAPRPQKQYPINPKAKPSIQIVIDDLLKQGVLIQQNSTMNTPVYPVPKPDGKWRMVLDYREVNKTIPLIAAQNQHSAGILSSIYRGKYKTTLDLTNGFWAHPITPESYWLTAFTWQGKQYCWTRLPQGFLNSPALFNADVVDLLKEIPNVQAYVDDIYISHDDPQEHLEQLEKIFSILLNAGYVVSLKKSEIAQREVEFLGFNITKEGRGLTDTFKQKLLNITPPKDLKQLQSILGKLNFARNFIPNYSELVKPLYTIVAPANGKFISWTEDNSNQLQHIISVLNQADNLEERNPETRLIIKVNSSPSAGYIRYYNEGSKRPIMYVNYIFSKAEAKFTQTEKLLTTMHKGLIKAMDLAMGQEILVYSPIVSMTKIQRTPLPERKALPVRWITWMTYLEDPRIQFHYDKSLPELQQIPNVTEDVIAKTKHPSEFAMVFYTDGSAIKHPDVNKSHSAGMGIAQVQFIPEYKIVHQWSIPLGDHTAQLAEIAAVEFACKKALKISGPVLIVTDSFYVAESANKELPYWKSNGFLNNKKKPLRHVSKWKSIAECLQLKPDIIIMHEKGHQQPMTTLHTEGNNLADKLATQGSYVVHAGKRTADGSEFEKRTADGSEFESPKKKAKVE

SEQ ID NO: 453 - protein, 2084 aa, synthetic construct
MPAAKRVKLDGGDKKYSIGLDIGTNSVGWAVITDEYKVPSKKFKVLGNTDRHSIKKNLIGALLFDSGETAEATRLKRTARRRYTRRKNRICYLQEIFSNEMAKVDDSFFHRLEESFLVEEDKKHERHPIFGNIVDEVAYHEKYPTIYHLRKKLVDSTDKADLRLIYLALAHMIKFRGHFLIEGDLNPDNSDVDKLFIQLVQTYNQLFEENPINASGVDAKAILSARLSKSRRLENLIAQLPGEKKNGLFGNLIALSLGLTPNFKSNFDLAEDAKLQLSKDTYDDDLDNLLAQIGDQYADLFLAAKNLSDAILLSDILRVNTEITKAPLSASMIKRYDEHHQDLTLLKALVRQQLPEKYKEIFFDQSKNGYAGYIDGGASQEEFYKFIKPILEKMDGTEELLVKLNREDLLRKQRTFDNGSIPHQIHLGELHAILRRQEDFYPFLKDNREKIEKILTFRIPYYVGPLARGNSRFAWMTRKSEETITPWNFEEVVDKGASAQSFIERMTNFDKNLPNEKVLPKHSLLYEYFTVYNELTKVKYVTEGMRKPAFLSGEQKKAIVDLLFKTNRKVTVKQLKEDYFKKIECFDSVEISGVEDRFNASLGTYHDLLKIIKDKDFLDNEENEDILEDIVLTLTLFEDREMIEERLKTYAHLFDDKVMKQLKRRRYTGWGRLSRKLINGIRDKQSGKTILDFLKSDGFANRNFMQLIHDDSLTFKEDIQKAQVSGQGDSLHEHIANLAGSPAIKKGILQTVKVVDELVKVMGRHKPENIVIEMARENQTTQKGQKNSRERMKRIEEGIKELGSQILKEHPVENTQLQNEKLYLYYLQNGRDMYVDQELDINRLSDYDVDHIVPQSFLKDDSIDNKVLTRSDKARGKSDNVPSEEVVKKMKNYWRQLLNAKLITQRKFDNLTKAERGGLSELDKAGFIKRQLVETRQITKHVAQILDSRMNTKYDENDKLIREVKVITLKSKLVSDFRKDFQFYKVREINNYHHAHDAYLNAVVGTALIKKYPKLESEFVYGDYKVYDVRKMIAKSEQEIGKATAKYFFYSNIMNFFKTEITLANGEIRKRPLIETNGETGEIVWDKGRDFATVRKVLSMPQVNIVKKTEVQTGGFSKESILPKRNSDKLIARKKDWDPKKYGGFDSPTVAYSVLVVAKVEKGKSKKLKSVKELLGITIMERSSFEKNPIDFLEAKGYKEVKKDLIIKLPKYSLFELENGRKRMLASAGELQKGNELALPSKYVNFLYLASHYEKLKGSPEDNEQKQLFVEQHKHYLDEIIEQISEFSKRVILADANLDKVLSAYNKHRDKPIREQAENIIHLFTLTNLGAPAAFKYFDTTIDRKRYTSTKEVLDATLIHQSITGLYETRIDLSQLGGDGGEAAAKPAPGGVPWLMKKPLQLTVLVPLHEYQERLLQQTALPKEQKELLQKLFLKYDALWQHWENQVGHRRIKPHNIATGTLAPRPQKQYPINPKAKPSIQIVIDDLLKQGVLIQQNSTMNTPVYPVPKPDGKWRMVLDYREVNKTIPLIAAQNQHSAGILSSIYRGKYKTTLDLTNGFWAHPITPESYWLTAFTWQGKQYCWTRLPQGFLNSPALFNADVVDLLKEIPNVQAYVDDIYISHDDPQEHLEQLEKIFSILLNAGYVVSLKKSEIAQREVEFLGFNITKEGRGLTDTFKQKLLNITPPKDLKQLQSILGKLNFARNFIPNYSELVKPLYTIVAPANGKFISWTEDNSNQLQHIISVLNQADNLEERNPETRLIIKVNSSPSAGYIRYYNEGSKRPIMYVNYIFSKAEAKFTQTEKLLTTMHKGLIKAMDLAMGQEILVYSPIVSMTKIQRTPLPERKALPVRWITWMTYLEDPRIQFHYDKSLPELQQIPNVTEDVIAKTKHPSEFAMVFYTDGSAIKHPDVNKSHSAGMGIAQVQFIPEYKIVHQWSIPLGDHTAQLAEIAAVEFACKKALKISGPVLIVTDSFYVAESANKELPYWKSNGFLNNKKKPLRHVSKWKSIAECLQLKPDIIIMHEKGHQQPMTTLHTEGNNLADKLATQGSYVVHAGKRTADGSEFEKRTADGSEFESPKKKAKVE

SEQ ID NO: 454 - protein, 2085 aa, synthetic construct
MPAAKRVKLDGGDKKYSIGLDIGTNSVGWAVITDEYKVPSKKFKVLGNTDRHSIKKNLIGALLFDSGETAEATRLKRTARRRYTRRKNRICYLQEIFSNEMAKVDDSFFHRLEESFLVEEDKKHERHPIFGNIVDEVAYHEKYPTIYHLRKKLVDSTDKADLRLIYLALAHMIKFRGHFLIEGDLNPDNSDVDKLFIQLVQTYNQLFEENPINASGVDAKAILSARLSKSRRLENLIAQLPGEKKNGLFGNLIALSLGLTPNFKSNFDLAEDAKLQLSKDTYDDDLDNLLAQIGDQYADLFLAAKNLSDAILLSDILRVNTEITKAPLSASMIKRYDEHHQDLTLLKALVRQQLPEKYKEIFFDQSKNGYAGYIDGGASQEEFYKFIKPILEKMDGTEELLVKLNREDLLRKQRTFDNGSIPHQIHLGELHAILRRQEDFYPFLKDNREKIEKILTFRIPYYVGPLARGNSRFAWMTRKSEETITPWNFEEVVDKGASAQSFIERMTNFDKNLPNEKVLPKHSLLYEYFTVYNELTKVKYVTEGMRKPAFLSGEQKKAIVDLLFKTNRKVTVKQLKEDYFKKIECFDSVEISGVEDRFNASLGTYHDLLKIIKDKDFLDNEENEDILEDIVLTLTLFEDREMIEERLKTYAHLFDDKVMKQLKRRRYTGWGRLSRKLINGIRDKQSGKTILDFLKSDGFANRNFMQLIHDDSLTFKEDIQKAQVSGQGDSLHEHIANLAGSPAIKKGILQTVKVVDELVKVMGRHKPENIVIEMARENQTTQKGQKNSRERMKRIEEGIKELGSQILKEHPVENTQLQNEKLYLYYLQNGRDMYVDQELDINRLSDYDVDHIVPQSFLKDDSIDNKVLTRSDKARGKSDNVPSEEVVKKMKNYWRQLLNAKLITQRKFDNLTKAERGGLSELDKAGFIKRQLVETRQITKHVAQILDSRMNTKYDENDKLIREVKVITLKSKLVSDFRKDFQFYKVREINNYHHAHDAYLNAVVGTALIKKYPKLESEFVYGDYKVYDVRKMIAKSEQEIGKATAKYFFYSNIMNFFKTEITLANGEIRKRPLIETNGETGEIVWDKGRDFATVRKVLSMPQVNIVKKTEVQTGGFSKESILPKRNSDKLIARKKDWDPKKYGGFDSPTVAYSVLVVAKVEKGKSKKLKSVKELLGITIMERSSFEKNPIDFLEAKGYKEVKKDLIIKLPKYSLFELENGRKRMLASAGELQKGNELALPSKYVNFLYLASHYEKLKGSPEDNEQKQLFVEQHKHYLDEIIEQISEFSKRVILADANLDKVLSAYNKHRDKPIREQAENIIHLFTLTNLGAPAAFKYFDTTIDRKRYTSTKEVLDATLIHQSITGLYETRIDLSQLGGDGGGGGGSSGGSGGVPWLMKKPLQLTVLVPLHEYQERLLQQTALPKEQKELLQKLFLKYDALWQHWENQVGHRRIKPHNIATGTLAPRPQKQYPINPKAKPSIQIVIDDLLKQGVLIQQNSTMNTPVYPVPKPDGKWRMVLDYREVNKTIPLIAAQNQHSAGILSSIYRGKYKTTLDLTNGFWAHPITPESYWLTAFTWQGKQYCWTRLPQGFLNSPALFNADVVDLLKEIPNVQAYVDDIYISHDDPQEHLEQLEKIFSILLNAGYVVSLKKSEIAQREVEFLGFNITKEGRGLTDTFKQKLLNITPPKDLKQLQSILGKLNFARNFIPNYSELVKPLYTIVAPANGKFISWTEDNSNQLQHIISVLNQADNLEERNPETRLIIKVNSSPSAGYIRYYNEGSKRPIMYVNYIFSKAEAKFTQTEKLLTTMHKGLIKAMDLAMGQEILVYSPIVSMTKIQRTPLPERKALPVRWITWMTYLEDPRIQFHYDKSLPELQQIPNVTEDVIAKTKHPSEFAMVFYTDGSAIKHPDVNKSHSAGMGIAQVQFIPEYKIVHQWSIPLGDHTAQLAEIAAVEFACKKALKISGPVLIVTDSFYVAESANKELPYWKSNGFLNNKKKPLRHVSKWKSIAECLQLKPDIIIMHEKGHQQPMTTLHTEGNNLADKLATQGSYVVHAGKRTADGSEFEKRTADGSEFESPKKKAKVE

SEQ ID NO: 455 - protein, 2085 aa, synthetic construct
MPAAKRVKLDGGDKKYSIGLDIGTNSVGWAVITDEYKVPSKKFKVLGNTDRHSIKKNLIGALLFDSGETAEATRLKRTARRRYTRRKNRICYLQEIFSNEMAKVDDSFFHRLEESFLVEEDKKHERHPIFGNIVDEVAYHEKYPTIYHLRKKLVDSTDKADLRLIYLALAHMIKFRGHFLIEGDLNPDNSDVDKLFIQLVQTYNQLFEENPINASGVDAKAILSARLSKSRRLENLIAQLPGEKKNGLFGNLIALSLGLTPNFKSNFDLAEDAKLQLSKDTYDDDLDNLLAQIGDQYADLFLAAKNLSDAILLSDILRVNTEITKAPLSASMIKRYDEHHQDLTLLKALVRQQLPEKYKEIFFDQSKNGYAGYIDGGASQEEFYKFIKPILEKMDGTEELLVKLNREDLLRKQRTFDNGSIPHQIHLGELHAILRRQEDFYPFLKDNREKIEKILTFRIPYYVGPLARGNSRFAWMTRKSEETITPWNFEEVVDKGASAQSFIERMTNFDKNLPNEKVLPKHSLLYEYFTVYNELTKVKYVTEGMRKPAFLSGEQKKAIVDLLFKTNRKVTVKQLKEDYFKKIECFDSVEISGVEDRFNASLGTYHDLLKIIKDKDFLDNEENEDILEDIVLTLTLFEDREMIEERLKTYAHLFDDKVMKQLKRRRYTGWGRLSRKLINGIRDKQSGKTILDFLKSDGFANRNFMQLIHDDSLTFKEDIQKAQVSGQGDSLHEHIANLAGSPAIKKGILQTVKVVDELVKVMGRHKPENIVIEMARENQTTQKGQKNSRERMKRIEEGIKELGSQILKEHPVENTQLQNEKLYLYYLQNGRDMYVDQELDINRLSDYDVDHIVPQSFLKDDSIDNKVLTRSDKARGKSDNVPSEEVVKKMKNYWRQLLNAKLITQRKFDNLTKAERGGLSELDKAGFIKRQLVETRQITKHVAQILDSRMNTKYDENDKLIREVKVITLKSKLVSDFRKDFQFYKVREINNYHHAHDAYLNAVVGTALIKKYPKLESEFVYGDYKVYDVRKMIAKSEQEIGKATAKYFFYSNIMNFFKTEITLANGEIRKRPLIETNGETGEIVWDKGRDFATVRKVLSMPQVNIVKKTEVQTGGFSKESILPKRNSDKLIARKKDWDPKKYGGFDSPTVAYSVLVVAKVEKGKSKKLKSVKELLGITIMERSSFEKNPIDFLEAKGYKEVKKDLIIKLPKYSLFELENGRKRMLASAGELQKGNELALPSKYVNFLYLASHYEKLKGSPEDNEQKQLFVEQHKHYLDEIIEQISEFSKRVILADANLDKVLSAYNKHRDKPIREQAENIIHLFTLTNLGAPAAFKYFDTTIDRKRYTSTKEVLDATLIHQSITGLYETRIDLSQLGGDGGGSSPAPGGSGGVPWLMKKPLQLTVLVPLHEYQERLLQQTALPKEQKELLQKLFLKYDALWQHWENQVGHRRIKPHNIATGTLAPRPQKQYPINPKAKPSIQIVIDDLLKQGVLIQQNSTMNTPVYPVPKPDGKWRMVLDYREVNKTIPLIAAQNQHSAGILSSIYRGKYKTTLDLTNGFWAHPITPESYWLTAFTWQGKQYCWTRLPQGFLNSPALFNADVVDLLKEIPNVQAYVDDIYISHDDPQEHLEQLEKIFSILLNAGYVVSLKKSEIAQREVEFLGFNITKEGRGLTDTFKQKLLNITPPKDLKQLQSILGKLNFARNFIPNYSELVKPLYTIVAPANGKFISWTEDNSNQLQHIISVLNQADNLEERNPETRLIIKVNSSPSAGYIRYYNEGSKRPIMYVNYIFSKAEAKFTQTEKLLTTMHKGLIKAMDLAMGQEILVYSPIVSMTKIQRTPLPERKALPVRWITWMTYLEDPRIQFHYDKSLPELQQIPNVTEDVIAKTKHPSEFAMVFYTDGSAIKHPDVNKSHSAGMGIAQVQFIPEYKIVHQWSIPLGDHTAQLAEIAAVEFACKKALKISGPVLIVTDSFYVAESANKELPYWKSNGFLNNKKKPLRHVSKWKSIAECLQLKPDIIIMHEKGHQQPMTTLHTEGNNLADKLATQGSYVVHAGKRTADGSEFEKRTADGSEFESPKKKAKVE

SEQ ID NO: 456 - protein, 2085 aa, synthetic construct
MPAAKRVKLDGGDKKYSIGLDIGTNSVGWAVITDEYKVPSKKFKVLGNTDRHSIKKNLIGALLFDSGETAEATRLKRTARRRYTRRKNRICYLQEIFSNEMAKVDDSFFHRLEESFLVEEDKKHERHPIFGNIVDEVAYHEKYPTIYHLRKKLVDSTDKADLRLIYLALAHMIKFRGHFLIEGDLNPDNSDVDKLFIQLVQTYNQLFEENPINASGVDAKAILSARLSKSRRLENLIAQLPGEKKNGLFGNLIALSLGLTPNFKSNFDLAEDAKLQLSKDTYDDDLDNLLAQIGDQYADLFLAAKNLSDAILLSDILRVNTEITKAPLSASMIKRYDEHHQDLTLLKALVRQQLPEKYKEIFFDQSKNGYAGYIDGGASQEEFYKFIKPILEKMDGTEELLVKLNREDLLRKQRTFDNGSIPHQIHLGELHAILRRQEDFYPFLKDNREKIEKILTFRIPYYVGPLARGNSRFAWMTRKSEETITPWNFEEVVDKGASAQSFIERMTNFDKNLPNEKVLPKHSLLYEYFTVYNELTKVKYVTEGMRKPAFLSGEQKKAIVDLLFKTNRKVTVKQLKEDYFKKIECFDSVEISGVEDRFNASLGTYHDLLKIIKDKDFLDNEENEDILEDIVLTLTLFEDREMIEERLKTYAHLFDDKVMKQLKRRRYTGWGRLSRKLINGIRDKQSGKTILDFLKSDGFANRNFMQLIHDDSLTFKEDIQKAQVSGQGDSLHEHIANLAGSPAIKKGILQTVKVVDELVKVMGRHKPENIVIEMARENQTTQKGQKNSRERMKRIEEGIKELGSQILKEHPVENTQLQNEKLYLYYLQNGRDMYVDQELDINRLSDYDVDHIVPQSFLKDDSIDNKVLTRSDKARGKSDNVPSEEVVKKMKNYWRQLLNAKLITQRKFDNLTKAERGGLSELDKAGFIKRQLVETRQITKHVAQILDSRMNTKYDENDKLIREVKVITLKSKLVSDFRKDFQFYKVREINNYHHAHDAYLNAVVGTALIKKYPKLESEFVYGDYKVYDVRKMIAKSEQEIGKATAKYFFYSNIMNFFKTEITLANGEIRKRPLIETNGETGEIVWDKGRDFATVRKVLSMPQVNIVKKTEVQTGGFSKESILPKRNSDKLIARKKDWDPKKYGGFDSPTVAYSVLVVAKVEKGKSKKLKSVKELLGITIMERSSFEKNPIDFLEAKGYKEVKKDLIIKLPKYSLFELENGRKRMLASAGELQKGNELALPSKYVNFLYLASHYEKLKGSPEDNEQKQLFVEQHKHYLDEIIEQISEFSKRVILADANLDKVLSAYNKHRDKPIREQAENIIHLFTLTNLGAPAAFKYFDTTIDRKRYTSTKEVLDATLIHQSITGLYETRIDLSQLGGDGGPAPGSSGGGGGVPWLMKKPLQLTVLVPLHEYQERLLQQTALPKEQKELLQKLFLKYDALWQHWENQVGHRRIKPHNIATGTLAPRPQKQYPINPKAKPSIQIVIDDLLKQGVLIQQNSTMNTPVYPVPKPDGKWRMVLDYREVNKTIPLIAAQNQHSAGILSSIYRGKYKTTLDLTNGFWAHPITPESYWLTAFTWQGKQYCWTRLPQGFLNSPALFNADVVDLLKEIPNVQAYVDDIYISHDDPQEHLEQLEKIFSILLNAGYVVSLKKSEIAQREVEFLGFNITKEGRGLTDTFKQKLLNITPPKDLKQLQSILGKLNFARNFIPNYSELVKPLYTIVAPANGKFISWTEDNSNQLQHIISVLNQADNLEERNPETRLIIKVNSSPSAGYIRYYNEGSKRPIMYVNYIFSKAEAKFTQTEKLLTTMHKGLIKAMDLAMGQEILVYSPIVSMTKIQRTPLPERKALPVRWITWMTYLEDPRIQFHYDKSLPELQQIPNVTEDVIAKTKHPSEFAMVFYTDGSAIKHPDVNKSHSAGMGIAQVQFIPEYKIVHQWSIPLGDHTAQLAEIAAVEFACKKALKISGPVLIVTDSFYVAESANKELPYWKSNGFLNNKKKPLRHVSKWKSIAECLQLKPDIIIMHEKGHQQPMTTLHTEGNNLADKLATQGSYVVHAGKRTADGSEFEKRTADGSEFESPKKKAKVE

SEQ ID NO: 457 - protein, 2082 aa, synthetic construct
MPAAKRVKLDGGDKKYSIGLDIGTNSVGWAVITDEYKVPSKKFKVLGNTDRHSIKKNLIGALLFDSGETAEATRLKRTARRRYTRRKNRICYLQEIFSNEMAKVDDSFFHRLEESFLVEEDKKHERHPIFGNIVDEVAYHEKYPTIYHLRKKLVDSTDKADLRLIYLALAHMIKFRGHFLIEGDLNPDNSDVDKLFIQLVQTYNQLFEENPINASGVDAKAILSARLSKSRRLENLIAQLPGEKKNGLFGNLIALSLGLTPNFKSNFDLAEDAKLQLSKDTYDDDLDNLLAQIGDQYADLFLAAKNLSDAILLSDILRVNTEITKAPLSASMIKRYDEHHQDLTLLKALVRQQLPEKYKEIFFDQSKNGYAGYIDGGASQEEFYKFIKPILEKMDGTEELLVKLNREDLLRKQRTFDNGSIPHQIHLGELHAILRRQEDFYPFLKDNREKIEKILTFRIPYYVGPLARGNSRFAWMTRKSEETITPWNFEEVVDKGASAQSFIERMTNFDKNLPNEKVLPKHSLLYEYFTVYNELTKVKYVTEGMRKPAFLSGEQKKAIVDLLFKTNRKVTVKQLKEDYFKKIECFDSVEISGVEDRFNASLGTYHDLLKIIKDKDFLDNEENEDILEDIVLTLTLFEDREMIEERLKTYAHLFDDKVMKQLKRRRYTGWGRLSRKLINGIRDKQSGKTILDFLKSDGFANRNFMQLIHDDSLTFKEDIQKAQVSGQGDSLHEHIANLAGSPAIKKGILQTVKVVDELVKVMGRHKPENIVIEMARENQTTQKGQKNSRERMKRIEEGIKELGSQILKEHPVENTQLQNEKLYLYYLQNGRDMYVDQELDINRLSDYDVDHIVPQSFLKDDSIDNKVLTRSDKARGKSDNVPSEEVVKKMKNYWRQLLNAKLITQRKFDNLTKAERGGLSELDKAGFIKRQLVETRQITKHVAQILDSRMNTKYDENDKLIREVKVITLKSKLVSDFRKDFQFYKVREINNYHHAHDAYLNAVVGTALIKKYPKLESEFVYGDYKVYDVRKMIAKSEQEIGKATAKYFFYSNIMNFFKTEITLANGEIRKRPLIETNGETGEIVWDKGRDFATVRKVLSMPQVNIVKKTEVQTGGFSKESILPKRNSDKLIARKKDWDPKKYGGFDSPTVAYSVLVVAKVEKGKSKKLKSVKELLGITIMERSSFEKNPIDFLEAKGYKEVKKDLIIKLPKYSLFELENGRKRMLASAGELQKGNELALPSKYVNFLYLASHYEKLKGSPEDNEQKQLFVEQHKHYLDEIIEQISEFSKRVILADANLDKVLSAYNKHRDKPIREQAENIIHLFTLTNLGAPAAFKYFDTTIDRKRYTSTKEVLDATLIHQSITGLYETRIDLSQLGGDGGGGSGGSGGVPWLMKKPLQLTVLVPLHEYQERLLQQTALPKEQKELLQKLFLKYDALWQHWENQVGHRRIKPHNIATGTLAPRPQKQYPINPKAKPSIQIVIDDLLKQGVLIQQNSTMNTPVYPVPKPDGKWRMVLDYREVNKTIPLIAAQNQHSAGILSSIYRGKYKTTLDLTNGFWAHPITPESYWLTAFTWQGKQYCWTRLPQGFLNSPALFNADVVDLLKEIPNVQAYVDDIYISHDDPQEHLEQLEKIFSILLNAGYVVSLKKSEIAQREVEFLGFNITKEGRGLTDTFKQKLLNITPPKDLKQLQSILGKLNFARNFIPNYSELVKPLYTIVAPANGKFISWTEDNSNQLQHIISVLNQADNLEERNPETRLIIKVNSSPSAGYIRYYNEGSKRPIMYVNYIFSKAEAKFTQTEKLLTTMHKGLIKAMDLAMGQEILVYSPIVSMTKIQRTPLPERKALPVRWITWMTYLEDPRIQFHYDKSLPELQQIPNVTEDVIAKTKHPSEFAMVFYTDGSAIKHPDVNKSHSAGMGIAQVQFIPEYKIVHQWSIPLGDHTAQLAEIAAVEFACKKALKISGPVLIVTDSFYVAESANKELPYWKSNGFLNNKKKPLRHVSKWKSIAECLQLKPDIIIMHEKGHQQPMTTLHTEGNNLADKLATQGSYVVHAGKRTADGSEFEKRTADGSEFESPKKKAKVE

SEQ ID NO: 458 - protein, 2087 aa, synthetic construct
MPAAKRVKLDGGDKKYSIGLDIGTNSVGWAVITDEYKVPSKKFKVLGNTDRHSIKKNLIGALLFDSGETAEATRLKRTARRRYTRRKNRICYLQEIFSNEMAKVDDSFFHRLEESFLVEEDKKHERHPIFGNIVDEVAYHEKYPTIYHLRKKLVDSTDKADLRLIYLALAHMIKFRGHFLIEGDLNPDNSDVDKLFIQLVQTYNQLFEENPINASGVDAKAILSARLSKSRRLENLIAQLPGEKKNGLFGNLIALSLGLTPNFKSNFDLAEDAKLQLSKDTYDDDLDNLLAQIGDQYADLFLAAKNLSDAILLSDILRVNTEITKAPLSASMIKRYDEHHQDLTLLKALVRQQLPEKYKEIFFDQSKNGYAGYIDGGASQEEFYKFIKPILEKMDGTEELLVKLNREDLLRKQRTFDNGSIPHQIHLGELHAILRRQEDFYPFLKDNREKIEKILTFRIPYYVGPLARGNSRFAWMTRKSEETITPWNFEEVVDKGASAQSFIERMTNFDKNLPNEKVLPKHSLLYEYFTVYNELTKVKYVTEGMRKPAFLSGEQKKAIVDLLFKTNRKVTVKQLKEDYFKKIECFDSVEISGVEDRFNASLGTYHDLLKIIKDKDFLDNEENEDILEDIVLTLTLFEDREMIEERLKTYAHLFDDKVMKQLKRRRYTGWGRLSRKLINGIRDKQSGKTILDFLKSDGFANRNFMQLIHDDSLTFKEDIQKAQVSGQGDSLHEHIANLAGSPAIKKGILQTVKVVDELVKVMGRHKPENIVIEMARENQTTQKGQKNSRERMKRIEEGIKELGSQILKEHPVENTQLQNEKLYLYYLQNGRDMYVDQELDINRLSDYDVDHIVPQSFLKDDSIDNKVLTRSDKARGKSDNVPSEEVVKKMKNYWRQLLNAKLITQRKFDNLTKAERGGLSELDKAGFIKRQLVETRQITKHVAQILDSRMNTKYDENDKLIREVKVITLKSKLVSDFRKDFQFYKVREINNYHHAHDAYLNAVVGTALIKKYPKLESEFVYGDYKVYDVRKMIAKSEQEIGKATAKYFFYSNIMNFFKTEITLANGEIRKRPLIETNGETGEIVWDKGRDFATVRKVLSMPQVNIVKKTEVQTGGFSKESILPKRNSDKLIARKKDWDPKKYGGFDSPTVAYSVLVVAKVEKGKSKKLKSVKELLGITIMERSSFEKNPIDFLEAKGYKEVKKDLIIKLPKYSLFELENGRKRMLASAGELQKGNELALPSKYVNFLYLASHYEKLKGSPEDNEQKQLFVEQHKHYLDEIIEQISEFSKRVILADANLDKVLSAYNKHRDKPIREQAENIIHLFTLTNLGAPAAFKYFDTTIDRKRYTSTKEVLDATLIHQSITGLYETRIDLSQLGGDGGGGGEAAAKGSSGGVPWLMKKPLQLTVLVPLHEYQERLLQQTALPKEQKELLQKLFLKYDALWQHWENQVGHRRIKPHNIATGTLAPRPQKQYPINPKAKPSIQIVIDDLLKQGVLIQQNSTMNTPVYPVPKPDGKWRMVLDYREVNKTIPLIAAQNQHSAGILSSIYRGKYKTTLDLTNGFWAHPITPESYWLTAFTWQGKQYCWTRLPQGFLNSPALFNADVVDLLKEIPNVQAYVDDIYISHDDPQEHLEQLEKIFSILLNAGYVVSLKKSEIAQREVEFLGFNITKEGRGLTDTFKQKLLNITPPKDLKQLQSILGKLNFARNFIPNYSELVKPLYTIVAPANGKFISWTEDNSNQLQHIISVLNQADNLEERNPETRLIIKVNSSPSAGYIRYYNEGSKRPIMYVNYIFSKAEAKFTQTEKLLTTMHKGLIKAMDLAMGQEILVYSPIVSMTKIQRTPLPERKALPVRWITWMTYLEDPRIQFHYDKSLPELQQIPNVTEDVIAKTKHPSEFAMVFYTDGSAIKHPDVNKSHSAGMGIAQVQFIPEYKIVHQWSIPLGDHTAQLAEIAAVEFACKKALKISGPVLIVTDSFYVAESANKELPYWKSNGFLNNKKKPLRHVSKWKSIAECLQLKPDIIIMHEKGHQQPMTTLHTEGNNLADKLATQGSYVVHAGKRTADGSEFEKRTADGSEFESPKKKAKVE

SEQ ID NO: 459 - protein, 2087 aa, synthetic construct
MPAAKRVKLDGGDKKYSIGLDIGTNSVGWAVITDEYKVPSKKFKVLGNTDRHSIKKNLIGALLFDSGETAEATRLKRTARRRYTRRKNRICYLQEIFSNEMAKVDDSFFHRLEESFLVEEDKKHERHPIFGNIVDEVAYHEKYPTIYHLRKKLVDSTDKADLRLIYLALAHMIKFRGHFLIEGDLNPDNSDVDKLFIQLVQTYNQLFEENPINASGVDAKAILSARLSKSRRLENLIAQLPGEKKNGLFGNLIALSLGLTPNFKSNFDLAEDAKLQLSKDTYDDDLDNLLAQIGDQYADLFLAAKNLSDAILLSDILRVNTEITKAPLSASMIKRYDEHHQDLTLLKALVRQQLPEKYKEIFFDQSKNGYAGYIDGGASQEEFYKFIKPILEKMDGTEELLVKLNREDLLRKQRTFDNGSIPHQIHLGELHAILRRQEDFYPFLKDNREKIEKILTFRIPYYVGPLARGNSRFAWMTRKSEETITPWNFEEVVDKGASAQSFIERMTNFDKNLPNEKVLPKHSLLYEYFTVYNELTKVKYVTEGMRKPAFLSGEQKKAIVDLLFKTNRKVTVKQLKEDYFKKIECFDSVEISGVEDRFNASLGTYHDLLKIIKDKDFLDNEENEDILEDIVLTLTLFEDREMIEERLKTYAHLFDDKVMKQLKRRRYTGWGRLSRKLINGIRDKQSGKTILDFLKSDGFANRNFMQLIHDDSLTFKEDIQKAQVSGQGDSLHEHIANLAGSPAIKKGILQTVKVVDELVKVMGRHKPENIVIEMARENQTTQKGQKNSRERMKRIEEGIKELGSQILKEHPVENTQLQNEKLYLYYLQNGRDMYVDQELDINRLSDYDVDHIVPQSFLKDDSIDNKVLTRSDKARGKSDNVPSEEVVKKMKNYWRQLLNAKLITQRKFDNLTKAERGGLSELDKAGFIKRQLVETRQITKHVAQILDSRMNTKYDENDKLIREVKVITLKSKLVSDFRKDFQFYKVREINNYHHAHDAYLNAVVGTALIKKYPKLESEFVYGDYKVYDVRKMIAKSEQEIGKATAKYFFYSNIMNFFKTEITLANGEIRKRPLIETNGETGEIVWDKGRDFATVRKVLSMPQVNIVKKTEVQTGGFSKESILPKRNSDKLIARKKDWDPKKYGGFDSPTVAYSVLVVAKVEKGKSKKLKSVKELLGITIMERSSFEKNPIDFLEAKGYKEVKKDLIIKLPKYSLFELENGRKRMLASAGELQKGNELALPSKYVNFLYLASHYEKLKGSPEDNEQKQLFVEQHKHYLDEIIEQISEFSKRVILADANLDKVLSAYNKHRDKPIREQAENIIHLFTLTNLGAPAAFKYFDTTIDRKRYTSTKEVLDATLIHQSITGLYETRIDLSQLGGDGGGGSGGGEAAAKGGVPWLMKKPLQLTVLVPLHEYQERLLQQTALPKEQKELLQKLFLKYDALWQHWENQVGHRRIKPHNIATGTLAPRPQKQYPINPKAKPSIQIVIDDLLKQGVLIQQNSTMNTPVYPVPKPDGKWRMVLDYREVNKTIPLIAAQNQHSAGILSSIYRGKYKTTLDLTNGFWAHPITPESYWLTAFTWQGKQYCWTRLPQGFLNSPALFNADVVDLLKEIPNVQAYVDDIYISHDDPQEHLEQLEKIFSILLNAGYVVSLKKSEIAQREVEFLGFNITKEGRGLTDTFKQKLLNITPPKDLKQLQSILGKLNFARNFIPNYSELVKPLYTIVAPANGKFISWTEDNSNQLQHIISVLNQADNLEERNPETRLIIKVNSSPSAGYIRYYNEGSKRPIMYVNYIFSKAEAKFTQTEKLLTTMHKGLIKAMDLAMGQEILVYSPIVSMTKIQRTPLPERKALPVRWITWMTYLEDPRIQFHYDKSLPELQQIPNVTEDVIAKTKHPSEFAMVFYTDGSAIKHPDVNKSHSAGMGIAQVQFIPEYKIVHQWSIPLGDHTAQLAEIAAVEFACKKALKISGPVLIVTDSFYVAESANKELPYWKSNGFLNNKKKPLRHVSKWKSIAECLQLKPDIIIMHEKGHQQPMTTLHTEGNNLADKLATQGSYVVHAGKRTADGSEFEKRTADGSEFESPKKKAKVE

SEQ ID NO: 460 - protein, 2185 aa, synthetic construct
MPAAKRVKLDGGDKKYSIGLDIGTNSVGWAVITDEYKVPSKKFKVLGNTDRHSIKKNLIGALLFDSGETAEATRLKRTARRRYTRRKNRICYLQEIFSNEMAKVDDSFFHRLEESFLVEEDKKHERHPIFGNIVDEVAYHEKYPTIYHLRKKLVDSTDKADLRLIYLALAHMIKFRGHFLIEGDLNPDNSDVDKLFIQLVQTYNQLFEENPINASGVDAKAILSARLSKSRRLENLIAQLPGEKKNGLFGNLIALSLGLTPNFKSNFDLAEDAKLQLSKDTYDDDLDNLLAQIGDQYADLFLAAKNLSDAILLSDILRVNTEITKAPLSASMIKRYDEHHQDLTLLKALVRQQLPEKYKEIFFDQSKNGYAGYIDGGASQEEFYKFIKPILEKMDGTEELLVKLNREDLLRKQRTFDNGSIPHQIHLGELHAILRRQEDFYPFLKDNREKIEKILTFRIPYYVGPLARGNSRFAWMTRKSEETITPWNFEEVVDKGASAQSFIERMTNFDKNLPNEKVLPKHSLLYEYFTVYNELTKVKYVTEGMRKPAFLSGEQKKAIVDLLFKTNRKVTVKQLKEDYFKKIECFDSVEISGVEDRFNASLGTYHDLLKIIKDKDFLDNEENEDILEDIVLTLTLFEDREMIEERLKTYAHLFDDKVMKQLKRRRYTGWGRLSRKLINGIRDKQSGKTILDFLKSDGFANRNFMQLIHDDSLTFKEDIQKAQVSGQGDSLHEHIANLAGSPAIKKGILQTVKVVDELVKVMGRHKPENIVIEMARENQTTQKGQKNSRERMKRIEEGIKELGSQILKEHPVENTQLQNEKLYLYYLQNGRDMYVDQELDINRLSDYDVDHIVPQSFLKDDSIDNKVLTRSDKARGKSDNVPSEEVVKKMKNYWRQLLNAKLITQRKFDNLTKAERGGLSELDKAGFIKRQLVETRQITKHVAQILDSRMNTKYDENDKLIREVKVITLKSKLVSDFRKDFQFYKVREINNYHHAHDAYLNAVVGTALIKKYPKLESEFVYGDYKVYDVRKMIAKSEQEIGKATAKYFFYSNIMNFFKTEITLANGEIRKRPLIETNGETGEIVWDKGRDFATVRKVLSMPQVNIVKKTEVQTGGFSKESILPKRNSDKLIARKKDWDPKKYGGFDSPTVAYSVLVVAKVEKGKSKKLKSVKELLGITIMERSSFEKNPIDFLEAKGYKEVKKDLIIKLPKYSLFELENGRKRMLASAGELQKGNELALPSKYVNFLYLASHYEKLKGSPEDNEQKQLFVEQHKHYLDEIIEQISEFSKRVILADANLDKVLSAYNKHRDKPIREQAENIIHLFTLTNLGAPAAFKYFDTTIDRKRYTSTKEVLDATLIHQSITGLYETRIDLSQLGGDGGGGGGSGGGGSGGGGSGGGGSGGMDPLQLLQPLEAEIKGTKLKAHWNSGATITCVPEAFLEDERPIQTMLIKTIHGEKQQDVYYLTFKVQGRKVEAEVLASPYDYILLNPSDVPWLMKKPLQLTVLVPLHEYQERLLQQTALPKEQKELLQKLFLKYDALWQHWENQVGHRRIKPHNIATGTLAPRPQKQYPINPKAKPSIQIVIDDLLKQGVLIQQNSTMNTPVYPVPKPDGKWRMVLDYREVNKTIPLIAAQNQHSAGILSSIYRGKYKTTLDLTNGFWAHPITPESYWLTAFTWQGKQYCWTRLPQGFLNSPALFNADVVDLLKEIPNVQAYVDDIYISHDDPQEHLEQLEKIFSILLNAGYVVSLKKSEIAQREVEFLGFNITKEGRGLTDTFKQKLLNITPPKDLKQLQSILGLLNFARNFIPNYSELVKPLYTIVAPANGKFISWTEDNSNQLQHIISVLNQADNLEERNPETRLIIKVNSSPSAGYIRYYNEGSKRPIMYVNYIFSKAEAKFTQTEKLLTTMHKGLIKAMDLAMGQEILVYSPIVSMTKIQRTPLPERKALPVRWITWMTYLEDPRIQFHYDKSLPELQQIPNVTEDVIAKTKHPSEFAMVFYTDGSAIKHPDVNKSHSAGMGIAQVQFIPEYKIVHQWSIPLGDHTAQLAEIAAVEFACKKALKISGPVLIVTDSFYVAESANKELPYWKSNGFLNNKKKPLRHVSKWKSIAECLQLKPDIIIMHEKGHQQPMTTLHTEGNNLADKLATQGSYVVHAGKRTADGSEFEKRTADGSEFESPKKKAKVE

SEQ ID NO: 461 - protein, 2180 aa, synthetic construct
MPAAKRVKLDGGDKKYSIGLDIGTNSVGWAVITDEYKVPSKKFKVLGNTDRHSIKKNLIGALLFDSGETAEATRLKRTARRRYTRRKNRICYLQEIFSNEMAKVDDSFFHRLEESFLVEEDKKHERHPIFGNIVDEVAYHEKYPTIYHLRKKLVDSTDKADLRLIYLALAHMIKFRGHFLIEGDLNPDNSDVDKLFIQLVQTYNQLFEENPINASGVDAKAILSARLSKSRRLENLIAQLPGEKKNGLFGNLIALSLGLTPNFKSNFDLAEDAKLQLSKDTYDDDLDNLLAQIGDQYADLFLAAKNLSDAILLSDILRVNTEITKAPLSASMIKRYDEHHQDLTLLKALVRQQLPEKYKEIFFDQSKNGYAGYIDGGASQEEFYKFIKPILEKMDGTEELLVKLNREDLLRKQRTFDNGSIPHQIHLGELHAILRRQEDFYPFLKDNREKIEKILTFRIPYYVGPLARGNSRFAWMTRKSEETITPWNFEEVVDKGASAQSFIERMTNFDKNLPNEKVLPKHSLLYEYFTVYNELTKVKYVTEGMRKPAFLSGEQKKAIVDLLFKTNRKVTVKQLKEDYFKKIECFDSVEISGVEDRFNASLGTYHDLLKIIKDKDFLDNEENEDILEDIVLTLTLFEDREMIEERLKTYAHLFDDKVMKQLKRRRYTGWGRLSRKLINGIRDKQSGKTILDFLKSDGFANRNFMQLIHDDSLTFKEDIQKAQVSGQGDSLHEHIANLAGSPAIKKGILQTVKVVDELVKVMGRHKPENIVIEMARENQTTQKGQKNSRERMKRIEEGIKELGSQILKEHPVENTQLQNEKLYLYYLQNGRDMYVDQELDINRLSDYDVDHIVPQSFLKDDSIDNKVLTRSDKARGKSDNVPSEEVVKKMKNYWRQLLNAKLITQRKFDNLTKAERGGLSELDKAGFIKRQLVETRQITKHVAQILDSRMNTKYDENDKLIREVKVITLKSKLVSDFRKDFQFYKVREINNYHHAHDAYLNAVVGTALIKKYPKLESEFVYGDYKVYDVRKMIAKSEQEIGKATAKYFFYSNIMNFFKTEITLANGEIRKRPLIETNGETGEIVWDKGRDFATVRKVLSMPQVNIVKKTEVQTGGFSKESILPKRNSDKLIARKKDWDPKKYGGFDSPTVAYSVLVVAKVEKGKSKKLKSVKELLGITIMERSSFEKNPIDFLEAKGYKEVKKDLIIKLPKYSLFELENGRKRMLASAGELQKGNELALPSKYVNFLYLASHYEKLKGSPEDNEQKQLFVEQHKHYLDEIIEQISEFSKRVILADANLDKVLSAYNKHRDKPIREQAENIIHLFTLTNLGAPAAFKYFDTTIDRKRYTSTKEVLDATLIHQSITGLYETRIDLSQLGGDGGGSSGSSGSSGSSGSSGGMDPLQLLQPLEAEIKGTKLKAHWNSGATITCVPEAFLEDERPIQTMLIKTIHGEKQQDVYYLTFKVQGRKVEAEVLASPYDYILLNPSDVPWLMKKPLQLTVLVPLHEYQERLLQQTALPKEQKELLQKLFLKYDALWQHWENQVGHRRIKPHNIATGTLAPRPQKQYPINPKAKPSIQIVIDDLLKQGVLIQQNSTMNTPVYPVPKPDGKWRMVLDYREVNKTIPLIAAQNQHSAGILSSIYRGKYKTTLDLTNGFWAHPITPESYWLTAFTWQGKQYCWTRLPQGFLNSPALFNADVVDLLKEIPNVQAYVDDIYISHDDPQEHLEQLEKIFSILLNAGYVVSLKKSEIAQREVEFLGFNITKEGRGLTDTFKQKLLNITPPKDLKQLQSILGLLNFARNFIPNYSELVKPLYTIVAPANGKFISWTEDNSNQLQHIISVLNQADNLEERNPETRLIIKVNSSPSAGYIRYYNEGSKRPIMYVNYIFSKAEAKFTQTEKLLTTMHKGLIKAMDLAMGQEILVYSPIVSMTKIQRTPLPERKALPVRWITWMTYLEDPRIQFHYDKSLPELQQIPNVTEDVIAKTKHPSEFAMVFYTDGSAIKHPDVNKSHSAGMGIAQVQFIPEYKIVHQWSIPLGDHTAQLAEIAAVEFACKKALKISGPVLIVTDSFYVAESANKELPYWKSNGFLNNKKKPLRHVSKWKSIAECLQLKPDIIIMHEKGHQQPMTTLHTEGNNLADKLATQGSYVVHAGKRTADGSEFEKRTADGSEFESPKKKAKVE

SEQ ID NO: 462 - protein, 2176 aa, synthetic construct
MPAAKRVKLDGGDKKYSIGLDIGTNSVGWAVITDEYKVPSKKFKVLGNTDRHSIKKNLIGALLFDSGETAEATRLKRTARRRYTRRKNRICYLQEIFSNEMAKVDDSFFHRLEESFLVEEDKKHERHPIFGNIVDEVAYHEKYPTIYHLRKKLVDSTDKADLRLIYLALAHMIKFRGHFLIEGDLNPDNSDVDKLFIQLVQTYNQLFEENPINASGVDAKAILSARLSKSRRLENLIAQLPGEKKNGLFGNLIALSLGLTPNFKSNFDLAEDAKLQLSKDTYDDDLDNLLAQIGDQYADLFLAAKNLSDAILLSDILRVNTEITKAPLSASMIKRYDEHHQDLTLLKALVRQQLPEKYKEIFFDQSKNGYAGYIDGGASQEEFYKFIKPILEKMDGTEELLVKLNREDLLRKQRTFDNGSIPHQIHLGELHAILRRQEDFYPFLKDNREKIEKILTFRIPYYVGPLARGNSRFAWMTRKSEETITPWNFEEVVDKGASAQSFIERMTNFDKNLPNEKVLPKHSLLYEYFTVYNELTKVKYVTEGMRKPAFLSGEQKKAIVDLLFKTNRKVTVKQLKEDYFKKIECFDSVEISGVEDRFNASLGTYHDLLKIIKDKDFLDNEENEDILEDIVLTLTLFEDREMIEERLKTYAHLFDDKVMKQLKRRRYTGWGRLSRKLINGIRDKQSGKTILDFLKSDGFANRNFMQLIHDDSLTFKEDIQKAQVSGQGDSLHEHIANLAGSPAIKKGILQTVKVVDELVKVMGRHKPENIVIEMARENQTTQKGQKNSRERMKRIEEGIKELGSQILKEHPVENTQLQNEKLYLYYLQNGRDMYVDQELDINRLSDYDVDHIVPQSFLKDDSIDNKVLTRSDKARGKSDNVPSEEVVKKMKNYWRQLLNAKLITQRKFDNLTKAERGGLSELDKAGFIKRQLVETRQITKHVAQILDSRMNTKYDENDKLIREVKVITLKSKLVSDFRKDFQFYKVREINNYHHAHDAYLNAVVGTALIKKYPKLESEFVYGDYKVYDVRKMIAKSEQEIGKATAKYFFYSNIMNFFKTEITLANGEIRKRPLIETNGETGEIVWDKGRDFATVRKVLSMPQVNIVKKTEVQTGGFSKESILPKRNSDKLIARKKDWDPKKYGGFDSPTVAYSVLVVAKVEKGKSKKLKSVKELLGITIMERSSFEKNPIDFLEAKGYKEVKKDLIIKLPKYSLFELENGRKRMLASAGELQKGNELALPSKYVNFLYLASHYEKLKGSPEDNEQKQLFVEQHKHYLDEIIEQISEFSKRVILADANLDKVLSAYNKHRDKPIREQAENIIHLFTLTNLGAPAAFKYFDTTIDRKRYTSTKEVLDATLIHQSITGLYETRIDLSQLGGDGGGGGEAAAKGSSGGMDPLQLLQPLEAEIKGTKLKAHWNSGATITCVPEAFLEDERPIQTMLIKTIHGEKQQDVYYLTFKVQGRKVEAEVLASPYDYILLNPSDVPWLMKKPLQLTVLVPLHEYQERLLQQTALPKEQKELLQKLFLKYDALWQHWENQVGHRRIKPHNIATGTLAPRPQKQYPINPKAKPSIQIVIDDLLKQGVLIQQNSTMNTPVYPVPKPDGKWRMVLDYREVNKTIPLIAAQNQHSAGILSSIYRGKYKTTLDLTNGFWAHPITPESYWLTAFTWQGKQYCWTRLPQGFLNSPALFNADVVDLLKEIPNVQAYVDDIYISHDDPQEHLEQLEKIFSILLNAGYVVSLKKSEIAQREVEFLGFNITKEGRGLTDTFKQKLLNITPPKDLKQLQSILGLLNFARNFIPNYSELVKPLYTIVAPANGKFISWTEDNSNQLQHIISVLNQADNLEERNPETRLIIKVNSSPSAGYIRYYNEGSKRPIMYVNYIFSKAEAKFTQTEKLLTTMHKGLIKAMDLAMGQEILVYSPIVSMTKIQRTPLPERKALPVRWITWMTYLEDPRIQFHYDKSLPELQQIPNVTEDVIAKTKHPSEFAMVFYTDGSAIKHPDVNKSHSAGMGIAQVQFIPEYKIVHQWSIPLGDHTAQLAEIAAVEFACKKALKISGPVLIVTDSFYVAESANKELPYWKSNGFLNNKKKPLRHVSKWKSIAECLQLKPDIIIMHEKGHQQPMTTLHTEGNNLADKLATQGSYVVHAGKRTADGSEFEKRTADGSEFESPKKKAKVE

SEQ ID NO: 463 - protein, 2176 aa, synthetic construct
MPAAKRVKLDGGDKKYSIGLDIGTNSVGWAVITDEYKVPSKKFKVLGNTDRHSIKKNLIGALLFDSGETAEATRLKRTARRRYTRRKNRICYLQEIFSNEMAKVDDSFFHRLEESFLVEEDKKHERHPIFGNIVDEVAYHEKYPTIYHLRKKLVDSTDKADLRLIYLALAHMIKFRGHFLIEGDLNPDNSDVDKLFIQLVQTYNQLFEENPINASGVDAKAILSARLSKSRRLENLIAQLPGEKKNGLFGNLIALSLGLTPNFKSNFDLAEDAKLQLSKDTYDDDLDNLLAQIGDQYADLFLAAKNLSDAILLSDILRVNTEITKAPLSASMIKRYDEHHQDLTLLKALVRQQLPEKYKEIFFDQSKNGYAGYIDGGASQEEFYKFIKPILEKMDGTEELLVKLNREDLLRKQRTFDNGSIPHQIHLGELHAILRRQEDFYPFLKDNREKIEKILTFRIPYYVGPLARGNSRFAWMTRKSEETITPWNFEEVVDKGASAQSFIERMTNFDKNLPNEKVLPKHSLLYEYFTVYNELTKVKYVTEGMRKPAFLSGEQKKAIVDLLFKTNRKVTVKQLKEDYFKKIECFDSVEISGVEDRFNASLGTYHDLLKIIKDKDFLDNEENEDILEDIVLTLTLFEDREMIEERLKTYAHLFDDKVMKQLKRRRYTGWGRLSRKLINGIRDKQSGKTILDFLKSDGFANRNFMQLIHDDSLTFKEDIQKAQVSGQGDSLHEHIANLAGSPAIKKGILQTVKVVDELVKVMGRHKPENIVIEMARENQTTQKGQKNSRERMKRIEEGIKELGSQILKEHPVENTQLQNEKLYLYYLQNGRDMYVDQELDINRLSDYDVDHIVPQSFLKDDSIDNKVLTRSDKARGKSDNVPSEEVVKKMKNYWRQLLNAKLITQRKFDNLTKAERGGLSELDKAGFIKRQLVETRQITKHVAQILDSRMNTKYDENDKLIREVKVITLKSKLVSDFRKDFQFYKVREINNYHHAHDAYLNAVVGTALIKKYPKLESEFVYGDYKVYDVRKMIAKSEQEIGKATAKYFFYSNIMNFFKTEITLANGEIRKRPLIETNGETGEIVWDKGRDFATVRKVLSMPQVNIVKKTEVQTGGFSKESILPKRNSDKLIARKKDWDPKKYGGFDSPTVAYSVLVVAKVEKGKSKKLKSVKELLGITIMERSSFEKNPIDFLEAKGYKEVKKDLIIKLPKYSLFELENGRKRMLASAGELQKGNELALPSKYVNFLYLASHYEKLKGSPEDNEQKQLFVEQHKHYLDEIIEQISEFSKRVILADANLDKVLSAYNKHRDKPIREQAENIIHLFTLTNLGAPAAFKYFDTTIDRKRYTSTKEVLDATLIHQSITGLYETRIDLSQLGGDGGGGGEAAAKPAPGGMDPLQLLQPLEAEIKGTKLKAHWNSGATITCVPEAFLEDERPIQTMLIKTIHGEKQQDVYYLTFKVQGRKVEAEVLASPYDYILLNPSDVPWLMKKPLQLTVLVPLHEYQERLLQQTALPKEQKELLQKLFLKYDALWQHWENQVGHRRIKPHNIATGTLAPRPQKQYPINPKAKPSIQIVIDDLLKQGVLIQQNSTMNTPVYPVPKPDGKWRMVLDYREVNKTIPLIAAQNQHSAGILSSIYRGKYKTTLDLTNGFWAHPITPESYWLTAFTWQGKQYCWTRLPQGFLNSPALFNADVVDLLKEIPNVQAYVDDIYISHDDPQEHLEQLEKIFSILLNAGYVVSLKKSEIAQREVEFLGFNITKEGRGLTDTFKQKLLNITPPKDLKQLQSILGLLNFARNFIPNYSELVKPLYTIVAPANGKFISWTEDNSNQLQHIISVLNQADNLEERNPETRLIIKVNSSPSAGYIRYYNEGSKRPIMYVNYIFSKAEAKFTQTEKLLTTMHKGLIKAMDLAMGQEILVYSPIVSMTKIQRTPLPERKALPVRWITWMTYLEDPRIQFHYDKSLPELQQIPNVTEDVIAKTKHPSEFAMVFYTDGSAIKHPDVNKSHSAGMGIAQVQFIPEYKIVHQWSIPLGDHTAQLAEIAAVEFACKKALKISGPVLIVTDSFYVAESANKELPYWKSNGFLNNKKKPLRHVSKWKSIAECLQLKPDIIIMHEKGHQQPMTTLHTEGNNLADKLATQGSYVVHAGKRTADGSEFEKRTADGSEFESPKKKAKVE

SEQ ID NO: 464 - protein, 2176 aa, synthetic construct
MPAAKRVKLDGGDKKYSIGLDIGTNSVGWAVITDEYKVPSKKFKVLGNTDRHSIKKNLIGALLFDSGETAEATRLKRTARRRYTRRKNRICYLQEIFSNEMAKVDDSFFHRLEESFLVEEDKKHERHPIFGNIVDEVAYHEKYPTIYHLRKKLVDSTDKADLRLIYLALAHMIKFRGHFLIEGDLNPDNSDVDKLFIQLVQTYNQLFEENPINASGVDAKAILSARLSKSRRLENLIAQLPGEKKNGLFGNLIALSLGLTPNFKSNFDLAEDAKLQLSKDTYDDDLDNLLAQIGDQYADLFLAAKNLSDAILLSDILRVNTEITKAPLSASMIKRYDEHHQDLTLLKALVRQQLPEKYKEIFFDQSKNGYAGYIDGGASQEEFYKFIKPILEKMDGTEELLVKLNREDLLRKQRTFDNGSIPHQIHLGELHAILRRQEDFYPFLKDNREKIEKILTFRIPYYVGPLARGNSRFAWMTRKSEETITPWNFEEVVDKGASAQSFIERMTNFDKNLPNEKVLPKHSLLYEYFTVYNELTKVKYVTEGMRKPAFLSGEQKKAIVDLLFKTNRKVTVKQLKEDYFKKIECFDSVEISGVEDRFNASLGTYHDLLKIIKDKDFLDNEENEDILEDIVLTLTLFEDREMIEERLKTYAHLFDDKVMKQLKRRRYTGWGRLSRKLINGIRDKQSGKTILDFLKSDGFANRNFMQLIHDDSLTFKEDIQKAQVSGQGDSLHEHIANLAGSPAIKKGILQTVKVVDELVKVMGRHKPENIVIEMARENQTTQKGQKNSRERMKRIEEGIKELGSQILKEHPVENTQLQNEKLYLYYLQNGRDMYVDQELDINRLSDYDVDHIVPQSFLKDDSIDNKVLTRSDKARGKSDNVPSEEVVKKMKNYWRQLLNAKLITQRKFDNLTKAERGGLSELDKAGFIKRQLVETRQITKHVAQILDSRMNTKYDENDKLIREVKVITLKSKLVSDFRKDFQFYKVREINNYHHAHDAYLNAVVGTALIKKYPKLESEFVYGDYKVYDVRKMIAKSEQEIGKATAKYFFYSNIMNFFKTEITLANGEIRKRPLIETNGETGEIVWDKGRDFATVRKVLSMPQVNIVKKTEVQTGGFSKESILPKRNSDKLIARKKDWDPKKYGGFDSPTVAYSVLVVAKVEKGKSKKLKSVKELLGITIMERSSFEKNPIDFLEAKGYKEVKKDLIIKLPKYSLFELENGRKRMLASAGELQKGNELALPSKYVNFLYLASHYEKLKGSPEDNEQKQLFVEQHKHYLDEIIEQISEFSKRVILADANLDKVLSAYNKHRDKPIREQAENIIHLFTLTNLGAPAAFKYFDTTIDRKRYTSTKEVLDATLIHQSITGLYETRIDLSQLGGDGGGGSEAAAKPAPGGMDPLQLLQPLEAEIKGTKLKAHWNSGATITCVPEAFLEDERPIQTMLIKTIHGEKQQDVYYLTFKVQGRKVEAEVLASPYDYILLNPSDVPWLMKKPLQLTVLVPLHEYQERLLQQTALPKEQKELLQKLFLKYDALWQHWENQVGHRRIKPHNIATGTLAPRPQKQYPINPKAKPSIQIVIDDLLKQGVLIQQNSTMNTPVYPVPKPDGKWRMVLDYREVNKTIPLIAAQNQHSAGILSSIYRGKYKTTLDLTNGFWAHPITPESYWLTAFTWQGKQYCWTRLPQGFLNSPALFNADVVDLLKEIPNVQAYVDDIYISHDDPQEHLEQLEKIFSILLNAGYVVSLKKSEIAQREVEFLGFNITKEGRGLTDTFKQKLLNITPPKDLKQLQSILGLLNFARNFIPNYSELVKPLYTIVAPANGKFISWTEDNSNQLQHIISVLNQADNLEERNPETRLIIKVNSSPSAGYIRYYNEGSKRPIMYVNYIFSKAEAKFTQTEKLLTTMHKGLIKAMDLAMGQEILVYSPIVSMTKIQRTPLPERKALPVRWITWMTYLEDPRIQFHYDKSLPELQQIPNVTEDVIAKTKHPSEFAMVFYTDGSAIKHPDVNKSHSAGMGIAQVQFIPEYKIVHQWSIPLGDHTAQLAEIAAVEFACKKALKISGPVLIVTDSFYVAESANKELPYWKSNGFLNNKKKPLRHVSKWKSIAECLQLKPDIIIMHEKGHQQPMTTLHTEGNNLADKLATQGSYVVHAGKRTADGSEFEKRTADGSEFESPKKKAKVE

SEQ ID NO: 465 - protein, 2170 aa, synthetic construct
MPAAKRVKLDGGDKKYSIGLDIGTNSVGWAVITDEYKVPSKKFKVLGNTDRHSIKKNLIGALLFDSGETAEATRLKRTARRRYTRRKNRICYLQEIFSNEMAKVDDSFFHRLEESFLVEEDKKHERHPIFGNIVDEVAYHEKYPTIYHLRKKLVDSTDKADLRLIYLALAHMIKFRGHFLIEGDLNPDNSDVDKLFIQLVQTYNQLFEENPINASGVDAKAILSARLSKSRRLENLIAQLPGEKKNGLFGNLIALSLGLTPNFKSNFDLAEDAKLQLSKDTYDDDLDNLLAQIGDQYADLFLAAKNLSDAILLSDILRVNTEITKAPLSASMIKRYDEHHQDLTLLKALVRQQLPEKYKEIFFDQSKNGYAGYIDGGASQEEFYKFIKPILEKMDGTEELLVKLNREDLLRKQRTFDNGSIPHQIHLGELHAILRRQEDFYPFLKDNREKIEKILTFRIPYYVGPLARGNSRFAWMTRKSEETITPWNFEEVVDKGASAQSFIERMTNFDKNLPNEKVLPKHSLLYEYFTVYNELTKVKYVTEGMRKPAFLSGEQKKAIVDLLFKTNRKVTVKQLKEDYFKKIECFDSVEISGVEDRFNASLGTYHDLLKIIKDKDFLDNEENEDILEDIVLTLTLFEDREMIEERLKTYAHLFDDKVMKQLKRRRYTGWGRLSRKLINGIRDKQSGKTILDFLKSDGFANRNFMQLIHDDSLTFKEDIQKAQVSGQGDSLHEHIANLAGSPAIKKGILQTVKVVDELVKVMGRHKPENIVIEMARENQTTQKGQKNSRERMKRIEEGIKELGSQILKEHPVENTQLQNEKLYLYYLQNGRDMYVDQELDINRLSDYDVDHIVPQSFLKDDSIDNKVLTRSDKARGKSDNVPSEEVVKKMKNYWRQLLNAKLITQRKFDNLTKAERGGLSELDKAGFIKRQLVETRQITKHVAQILDSRMNTKYDENDKLIREVKVITLKSKLVSDFRKDFQFYKVREINNYHHAHDAYLNAVVGTALIKKYPKLESEFVYGDYKVYDVRKMIAKSEQEIGKATAKYFFYSNIMNFFKTEITLANGEIRKRPLIETNGETGEIVWDKGRDFATVRKVLSMPQVNIVKKTEVQTGGFSKESILPKRNSDKLIARKKDWDPKKYGGFDSPTVAYSVLVVAKVEKGKSKKLKSVKELLGITIMERSSFEKNPIDFLEAKGYKEVKKDLIIKLPKYSLFELENGRKRMLASAGELQKGNELALPSKYVNFLYLASHYEKLKGSPEDNEQKQLFVEQHKHYLDEIIEQISEFSKRVILADANLDKVLSAYNKHRDKPIREQAENIIHLFTLTNLGAPAAFKYFDTTIDRKRYTSTKEVLDATLIHQSITGLYETRIDLSQLGGDGGEAAAKGGMDPLQLLQPLEAEIKGTKLKAHWNSGATITCVPEAFLEDERPIQTMLIKTIHGEKQQDVYYLTFKVQGRKVEAEVLASPYDYILLNPSDVPWLMKKPLQLTVLVPLHEYQERLLQQTALPKEQKELLQKLFLKYDALWQHWENQVGHRRIKPHNIATGTLAPRPQKQYPINPKAKPSIQIVIDDLLKQGVLIQQNSTMNTPVYPVPKPDGKWRMVLDYREVNKTIPLIAAQNQHSAGILSSIYRGKYKTTLDLTNGFWAHPITPESYWLTAFTWQGKQYCWTRLPQGFLNSPALFNADVVDLLKEIPNVQAYVDDIYISHDDPQEHLEQLEKIFSILLNAGYVVSLKKSEIAQREVEFLGFNITKEGRGLTDTFKQKLLNITPPKDLKQLQSILGLLNFARNFIPNYSELVKPLYTIVAPANGKFISWTEDNSNQLQHIISVLNQADNLEERNPETRLIIKVNSSPSAGYIRYYNEGSKRPIMYVNYIFSKAEAKFTQTEKLLTTMHKGLIKAMDLAMGQEILVYSPIVSMTKIQRTPLPERKALPVRWITWMTYLEDPRIQFHYDKSLPELQQIPNVTEDVIAKTKHPSEFAMVFYTDGSAIKHPDVNKSHSAGMGIAQVQFIPEYKIVHQWSIPLGDHTAQLAEIAAVEFACKKALKISGPVLIVTDSFYVAESANKELPYWKSNGFLNNKKKPLRHVSKWKSIAECLQLKPDIIIMHEKGHQQPMTTLHTEGNNLADKLATQGSYVVHAGKRTADGSEFEKRTADGSEFESPKKKAKVE

SEQ ID NO: 466 - protein, 2176 aa, synthetic construct
MPAAKRVKLDGGDKKYSIGLDIGTNSVGWAVITDEYKVPSKKFKVLGNTDRHSIKKNLIGALLFDSGETAEATRLKRTARRRYTRRKNRICYLQEIFSNEMAKVDDSFFHRLEESFLVEEDKKHERHPIFGNIVDEVAYHEKYPTIYHLRKKLVDSTDKADLRLIYLALAHMIKFRGHFLIEGDLNPDNSDVDKLFIQLVQTYNQLFEENPINASGVDAKAILSARLSKSRRLENLIAQLPGEKKNGLFGNLIALSLGLTPNFKSNFDLAEDAKLQLSKDTYDDDLDNLLAQIGDQYADLFLAAKNLSDAILLSDILRVNTEITKAPLSASMIKRYDEHHQDLTLLKALVRQQLPEKYKEIFFDQSKNGYAGYIDGGASQEEFYKFIKPILEKMDGTEELLVKLNREDLLRKQRTFDNGSIPHQIHLGELHAILRRQEDFYPFLKDNREKIEKILTFRIPYYVGPLARGNSRFAWMTRKSEETITPWNFEEVVDKGASAQSFIERMTNFDKNLPNEKVLPKHSLLYEYFTVYNELTKVKYVTEGMRKPAFLSGEQKKAIVDLLFKTNRKVTVKQLKEDYFKKIECFDSVEISGVEDRFNASLGTYHDLLKIIKDKDFLDNEENEDILEDIVLTLTLFEDREMIEERLKTYAHLFDDKVMKQLKRRRYTGWGRLSRKLINGIRDKQSGKTILDFLKSDGFANRNFMQLIHDDSLTFKEDIQKAQVSGQGDSLHEHIANLAGSPAIKKGILQTVKVVDELVKVMGRHKPENIVIEMARENQTTQKGQKNSRERMKRIEEGIKELGSQILKEHPVENTQLQNEKLYLYYLQNGRDMYVDQELDINRLSDYDVDHIVPQSFLKDDSIDNKVLTRSDKARGKSDNVPSEEVVKKMKNYWRQLLNAKLITQRKFDNLTKAERGGLSELDKAGFIKRQLVETRQITKHVAQILDSRMNTKYDENDKLIREVKVITLKSKLVSDFRKDFQFYKVREINNYHHAHDAYLNAVVGTALIKKYPKLESEFVYGDYKVYDVRKMIAKSEQEIGKATAKYFFYSNIMNFFKTEITLANGEIRKRPLIETNGETGEIVWDKGRDFATVRKVLSMPQVNIVKKTEVQTGGFSKESILPKRNSDKLIARKKDWDPKKYGGFDSPTVAYSVLVVAKVEKGKSKKLKSVKELLGITIMERSSFEKNPIDFLEAKGYKEVKKDLIIKLPKYSLFELENGRKRMLASAGELQKGNELALPSKYVNFLYLASHYEKLKGSPEDNEQKQLFVEQHKHYLDEIIEQISEFSKRVILADANLDKVLSAYNKHRDKPIREQAENIIHLFTLTNLGAPAAFKYFDTTIDRKRYTSTKEVLDATLIHQSITGLYETRIDLSQLGGDGGGGSGSSEAAAKGGMDPLQLLQPLEAEIKGTKLKAHWNSGATITCVPEAFLEDERPIQTMLIKTIHGEKQQDVYYLTFKVQGRKVEAEVLASPYDYILLNPSDVPWLMKKPLQLTVLVPLHEYQERLLQQTALPKEQKELLQKLFLKYDALWQHWENQVGHRRIKPHNIATGTLAPRPQKQYPINPKAKPSIQIVIDDLLKQGVLIQQNSTMNTPVYPVPKPDGKWRMVLDYREVNKTIPLIAAQNQHSAGILSSIYRGKYKTTLDLTNGFWAHPITPESYWLTAFTWQGKQYCWTRLPQGFLNSPALFNADVVDLLKEIPNVQAYVDDIYISHDDPQEHLEQLEKIFSILLNAGYVVSLKKSEIAQREVEFLGFNITKEGRGLTDTFKQKLLNITPPKDLKQLQSILGLLNFARNFIPNYSELVKPLYTIVAPANGKFISWTEDNSNQLQHIISVLNQADNLEERNPETRLIIKVNSSPSAGYIRYYNEGSKRPIMYVNYIFSKAEAKFTQTEKLLTTMHKGLIKAMDLAMGQEILVYSPIVSMTKIQRTPLPERKALPVRWITWMTYLEDPRIQFHYDKSLPELQQIPNVTEDVIAKTKHPSEFAMVFYTDGSAIKHPDVNKSHSAGMGIAQVQFIPEYKIVHQWSIPLGDHTAQLAEIAAVEFACKKALKISGPVLIVTDSFYVAESANKELPYWKSNGFLNNKKKPLRHVSKWKSIAECLQLKPDIIIMHEKGHQQPMTTLHTEGNNLADKLATQGSYVVHAGKRTADGSEFEKRTADGSEFESPKKKAKVE

SEQ ID NO: 467 - protein, 2177 aa, synthetic construct
MPAAKRVKLDGGDKKYSIGLDIGTNSVGWAVITDEYKVPSKKFKVLGNTDRHSIKKNLIGALLFDSGETAEATRLKRTARRRYTRRKNRICYLQEIFSNEMAKVDDSFFHRLEESFLVEEDKKHERHPIFGNIVDEVAYHEKYPTIYHLRKKLVDSTDKADLRLIYLALAHMIKFRGHFLIEGDLNPDNSDVDKLFIQLVQTYNQLFEENPINASGVDAKAILSARLSKSRRLENLIAQLPGEKKNGLFGNLIALSLGLTPNFKSNFDLAEDAKLQLSKDTYDDDLDNLLAQIGDQYADLFLAAKNLSDAILLSDILRVNTEITKAPLSASMIKRYDEHHQDLTLLKALVRQQLPEKYKEIFFDQSKNGYAGYIDGGASQEEFYKFIKPILEKMDGTEELLVKLNREDLLRKQRTFDNGSIPHQIHLGELHAILRRQEDFYPFLKDNREKIEKILTFRIPYYVGPLARGNSRFAWMTRKSEETITPWNFEEVVDKGASAQSFIERMTNFDKNLPNEKVLPKHSLLYEYFTVYNELTKVKYVTEGMRKPAFLSGEQKKAIVDLLFKTNRKVTVKQLKEDYFKKIECFDSVEISGVEDRFNASLGTYHDLLKIIKDKDFLDNEENEDILEDIVLTLTLFEDREMIEERLKTYAHLFDDKVMKQLKRRRYTGWGRLSRKLINGIRDKQSGKTILDFLKSDGFANRNFMQLIHDDSLTFKEDIQKAQVSGQGDSLHEHIANLAGSPAIKKGILQTVKVVDELVKVMGRHKPENIVIEMARENQTTQKGQKNSRERMKRIEEGIKELGSQILKEHPVENTQLQNEKLYLYYLQNGRDMYVDQELDINRLSDYDVDHIVPQSFLKDDSIDNKVLTRSDKARGKSDNVPSEEVVKKMKNYWRQLLNAKLITQRKFDNLTKAERGGLSELDKAGFIKRQLVETRQITKHVAQILDSRMNTKYDENDKLIREVKVITLKSKLVSDFRKDFQFYKVREINNYHHAHDAYLNAVVGTALIKKYPKLESEFVYGDYKVYDVRKMIAKSEQEIGKATAKYFFYSNIMNFFKTEITLANGEIRKRPLIETNGETGEIVWDKGRDFATVRKVLSMPQVNIVKKTEVQTGGFSKESILPKRNSDKLIARKKDWDPKKYGGFDSPTVAYSVLVVAKVEKGKSKKLKSVKELLGITIMERSSFEKNPIDFLEAKGYKEVKKDLIIKLPKYSLFELENGRKRMLASAGELQKGNELALPSKYVNFLYLASHYEKLKGSPEDNEQKQLFVEQHKHYLDEIIEQISEFSKRVILADANLDKVLSAYNKHRDKPIREQAENIIHLFTLTNLGAPAAFKYFDTTIDRKRYTSTKEVLDATLIHQSITGLYETRIDLSQLGGDGGGSSGSSGSSGSSGGMDPLQLLQPLEAEIKGTKLKAHWNSGATITCVPEAFLEDERPIQTMLIKTIHGEKQQDVYYLTFKVQGRKVEAEVLASPYDYILLNPSDVPWLMKKPLQLTVLVPLHEYQERLLQQTALPKEQKELLQKLFLKYDALWQHWENQVGHRRIKPHNIATGTLAPRPQKQYPINPKAKPSIQIVIDDLLKQGVLIQQNSTMNTPVYPVPKPDGKWRMVLDYREVNKTIPLIAAQNQHSAGILSSIYRGKYKTTLDLTNGFWAHPITPESYWLTAFTWQGKQYCWTRLPQGFLNSPALFNADVVDLLKEIPNVQAYVDDIYISHDDPQEHLEQLEKIFSILLNAGYVVSLKKSEIAQREVEFLGFNITKEGRGLTDTFKQKLLNITPPKDLKQLQSILGLLNFARNFIPNYSELVKPLYTIVAPANGKFISWTEDNSNQLQHIISVLNQADNLEERNPETRLIIKVNSSPSAGYIRYYNEGSKRPIMYVNYIFSKAEAKFTQTEKLLTTMHKGLIKAMDLAMGQEILVYSPIVSMTKIQRTPLPERKALPVRWITWMTYLEDPRIQFHYDKSLPELQQIPNVTEDVIAKTKHPSEFAMVFYTDGSAIKHPDVNKSHSAGMGIAQVQFIPEYKIVHQWSIPLGDHTAQLAEIAAVEFACKKALKISGPVLIVTDSFYVAESANKELPYWKSNGFLNNKKKPLRHVSKWKSIAECLQLKPDIIIMHEKGHQQPMTTLHTEGNNLADKLATQGSYVVHAGKRTADGSEFEKRTADGSEFESPKKKAKVE

SEQ ID NO: 468 - protein, 2177 aa, synthetic construct
MPAAKRVKLDGGDKKYSIGLDIGTNSVGWAVITDEYKVPSKKFKVLGNTDRHSIKKNLIGALLFDSGETAEATRLKRTARRRYTRRKNRICYLQEIFSNEMAKVDDSFFHRLEESFLVEEDKKHERHPIFGNIVDEVAYHEKYPTIYHLRKKLVDSTDKADLRLIYLALAHMIKFRGHFLIEGDLNPDNSDVDKLFIQLVQTYNQLFEENPINASGVDAKAILSARLSKSRRLENLIAQLPGEKKNGLFGNLIALSLGLTPNFKSNFDLAEDAKLQLSKDTYDDDLDNLLAQIGDQYADLFLAAKNLSDAILLSDILRVNTEITKAPLSASMIKRYDEHHQDLTLLKALVRQQLPEKYKEIFFDQSKNGYAGYIDGGASQEEFYKFIKPILEKMDGTEELLVKLNREDLLRKQRTFDNGSIPHQIHLGELHAILRRQEDFYPFLKDNREKIEKILTFRIPYYVGPLARGNSRFAWMTRKSEETITPWNFEEVVDKGASAQSFIERMTNFDKNLPNEKVLPKHSLLYEYFTVYNELTKVKYVTEGMRKPAFLSGEQKKAIVDLLFKTNRKVTVKQLKEDYFKKIECFDSVEISGVEDRFNASLGTYHDLLKIIKDKDFLDNEENEDILEDIVLTLTLFEDREMIEERLKTYAHLFDDKVMKQLKRRRYTGWGRLSRKLINGIRDKQSGKTILDFLKSDGFANRNFMQLIHDDSLTFKEDIQKAQVSGQGDSLHEHIANLAGSPAIKKGILQTVKVVDELVKVMGRHKPENIVIEMARENQTTQKGQKNSRERMKRIEEGIKELGSQILKEHPVENTQLQNEKLYLYYLQNGRDMYVDQELDINRLSDYDVDHIVPQSFLKDDSIDNKVLTRSDKARGKSDNVPSEEVVKKMKNYWRQLLNAKLITQRKFDNLTKAERGGLSELDKAGFIKRQLVETRQITKHVAQILDSRMNTKYDENDKLIREVKVITLKSKLVSDFRKDFQFYKVREINNYHHAHDAYLNAVVGTALIKKYPKLESEFVYGDYKVYDVRKMIAKSEQEIGKATAKYFFYSNIMNFFKTEITLANGEIRKRPLIETNGETGEIVWDKGRDFATVRKVLSMPQVNIVKKTEVQTGGFSKESILPKRNSDKLIARKKDWDPKKYGGFDSPTVAYSVLVVAKVEKGKSKKLKSVKELLGITIMERSSFEKNPIDFLEAKGYKEVKKDLIIKLPKYSLFELENGRKRMLASAGELQKGNELALPSKYVNFLYLASHYEKLKGSPEDNEQKQLFVEQHKHYLDEIIEQISEFSKRVILADANLDKVLSAYNKHRDKPIREQAENIIHLFTLTNLGAPAAFKYFDTTIDRKRYTSTKEVLDATLIHQSITGLYETRIDLSQLGGDGGGSAGSAAGSGEFGGMDPLQLLQPLEAEIKGTKLKAHWNSGATITCVPEAFLEDERPIQTMLIKTIHGEKQQDVYYLTFKVQGRKVEAEVLASPYDYILLNPSDVPWLMKKPLQLTVLVPLHEYQERLLQQTALPKEQKELLQKLFLKYDALWQHWENQVGHRRIKPHNIATGTLAPRPQKQYPINPKAKPSIQIVIDDLLKQGVLIQQNSTMNTPVYPVPKPDGKWRMVLDYREVNKTIPLIAAQNQHSAGILSSIYRGKYKTTLDLTNGFWAHPITPESYWLTAFTWQGKQYCWTRLPQGFLNSPALFNADVVDLLKEIPNVQAYVDDIYISHDDPQEHLEQLEKIFSILLNAGYVVSLKKSEIAQREVEFLGFNITKEGRGLTDTFKQKLLNITPPKDLKQLQSILGLLNFARNFIPNYSELVKPLYTIVAPANGKFISWTEDNSNQLQHIISVLNQADNLEERNPETRLIIKVNSSPSAGYIRYYNEGSKRPIMYVNYIFSKAEAKFTQTEKLLTTMHKGLIKAMDLAMGQEILVYSPIVSMTKIQRTPLPERKALPVRWITWMTYLEDPRIQFHYDKSLPELQQIPNVTEDVIAKTKHPSEFAMVFYTDGSAIKHPDVNKSHSAGMGIAQVQFIPEYKIVHQWSIPLGDHTAQLAEIAAVEFACKKALKISGPVLIVTDSFYVAESANKELPYWKSNGFLNNKKKPLRHVSKWKSIAECLQLKPDIIIMHEKGHQQPMTTLHTEGNNLADKLATQGSYVVHAGKRTADGSEFEKRTADGSEFESPKKKAKVE

SEQ ID NO: 469 - protein, 2171 aa, synthetic construct
MPAAKRVKLDGGDKKYSIGLDIGTNSVGWAVITDEYKVPSKKFKVLGNTDRHSIKKNLIGALLFDSGETAEATRLKRTARRRYTRRKNRICYLQEIFSNEMAKVDDSFFHRLEESFLVEEDKKHERHPIFGNIVDEVAYHEKYPTIYHLRKKLVDSTDKADLRLIYLALAHMIKFRGHFLIEGDLNPDNSDVDKLFIQLVQTYNQLFEENPINASGVDAKAILSARLSKSRRLENLIAQLPGEKKNGLFGNLIALSLGLTPNFKSNFDLAEDAKLQLSKDTYDDDLDNLLAQIGDQYADLFLAAKNLSDAILLSDILRVNTEITKAPLSASMIKRYDEHHQDLTLLKALVRQQLPEKYKEIFFDQSKNGYAGYIDGGASQEEFYKFIKPILEKMDGTEELLVKLNREDLLRKQRTFDNGSIPHQIHLGELHAILRRQEDFYPFLKDNREKIEKILTFRIPYYVGPLARGNSRFAWMTRKSEETITPWNFEEVVDKGASAQSFIERMTNFDKNLPNEKVLPKHSLLYEYFTVYNELTKVKYVTEGMRKPAFLSGEQKKAIVDLLFKTNRKVTVKQLKEDYFKKIECFDSVEISGVEDRFNASLGTYHDLLKIIKDKDFLDNEENEDILEDIVLTLTLFEDREMIEERLKTYAHLFDDKVMKQLKRRRYTGWGRLSRKLINGIRDKQSGKTILDFLKSDGFANRNFMQLIHDDSLTFKEDIQKAQVSGQGDSLHEHIANLAGSPAIKKGILQTVKVVDELVKVMGRHKPENIVIEMARENQTTQKGQKNSRERMKRIEEGIKELGSQILKEHPVENTQLQNEKLYLYYLQNGRDMYVDQELDINRLSDYDVDHIVPQSFLKDDSIDNKVLTRSDKARGKSDNVPSEEVVKKMKNYWRQLLNAKLITQRKFDNLTKAERGGLSELDKAGFIKRQLVETRQITKHVAQILDSRMNTKYDENDKLIREVKVITLKSKLVSDFRKDFQFYKVREINNYHHAHDAYLNAVVGTALIKKYPKLESEFVYGDYKVYDVRKMIAKSEQEIGKATAKYFFYSNIMNFFKTEITLANGEIRKRPLIETNGETGEIVWDKGRDFATVRKVLSMPQVNIVKKTEVQTGGFSKESILPKRNSDKLIARKKDWDPKKYGGFDSPTVAYSVLVVAKVEKGKSKKLKSVKELLGITIMERSSFEKNPIDFLEAKGYKEVKKDLIIKLPKYSLFELENGRKRMLASAGELQKGNELALPSKYVNFLYLASHYEKLKGSPEDNEQKQLFVEQHKHYLDEIIEQISEFSKRVILADANLDKVLSAYNKHRDKPIREQAENIIHLFTLTNLGAPAAFKYFDTTIDRKRYTSTKEVLDATLIHQSITGLYETRIDLSQLGGDGGGGSGGSGGMDPLQLLQPLEAEIKGTKLKAHWNSGATITCVPEAFLEDERPIQTMLIKTIHGEKQQDVYYLTFKVQGRKVEAEVLASPYDYILLNPSDVPWLMKKPLQLTVLVPLHEYQERLLQQTALPKEQKELLQKLFLKYDALWQHWENQVGHRRIKPHNIATGTLAPRPQKQYPINPKAKPSIQIVIDDLLKQGVLIQQNSTMNTPVYPVPKPDGKWRMVLDYREVNKTIPLIAAQNQHSAGILSSIYRGKYKTTLDLTNGFWAHPITPESYWLTAFTWQGKQYCWTRLPQGFLNSPALFNADVVDLLKEIPNVQAYVDDIYISHDDPQEHLEQLEKIFSILLNAGYVVSLKKSEIAQREVEFLGFNITKEGRGLTDTFKQKLLNITPPKDLKQLQSILGLLNFARNFIPNYSELVKPLYTIVAPANGKFISWTEDNSNQLQHIISVLNQADNLEERNPETRLIIKVNSSPSAGYIRYYNEGSKRPIMYVNYIFSKAEAKFTQTEKLLTTMHKGLIKAMDLAMGQEILVYSPIVSMTKIQRTPLPERKALPVRWITWMTYLEDPRIQFHYDKSLPELQQIPNVTEDVIAKTKHPSEFAMVFYTDGSAIKHPDVNKSHSAGMGIAQVQFIPEYKIVHQWSIPLGDHTAQLAEIAAVEFACKKALKISGPVLIVTDSFYVAESANKELPYWKSNGFLNNKKKPLRHVSKWKSIAECLQLKPDIIIMHEKGHQQPMTTLHTEGNNLADKLATQGSYVVHAGKRTADGSEFEKRTADGSEFESPKKKAKVE

SEQ ID NO: 470 - protein, 2176 aa, synthetic construct
MPAAKRVKLDGGDKKYSIGLDIGTNSVGWAVITDEYKVPSKKFKVLGNTDRHSIKKNLIGALLFDSGETAEATRLKRTARRRYTRRKNRICYLQEIFSNEMAKVDDSFFHRLEESFLVEEDKKHERHPIFGNIVDEVAYHEKYPTIYHLRKKLVDSTDKADLRLIYLALAHMIKFRGHFLIEGDLNPDNSDVDKLFIQLVQTYNQLFEENPINASGVDAKAILSARLSKSRRLENLIAQLPGEKKNGLFGNLIALSLGLTPNFKSNFDLAEDAKLQLSKDTYDDDLDNLLAQIGDQYADLFLAAKNLSDAILLSDILRVNTEITKAPLSASMIKRYDEHHQDLTLLKALVRQQLPEKYKEIFFDQSKNGYAGYIDGGASQEEFYKFIKPILEKMDGTEELLVKLNREDLLRKQRTFDNGSIPHQIHLGELHAILRRQEDFYPFLKDNREKIEKILTFRIPYYVGPLARGNSRFAWMTRKSEETITPWNFEEVVDKGASAQSFIERMTNFDKNLPNEKVLPKHSLLYEYFTVYNELTKVKYVTEGMRKPAFLSGEQKKAIVDLLFKTNRKVTVKQLKEDYFKKIECFDSVEISGVEDRFNASLGTYHDLLKIIKDKDFLDNEENEDILEDIVLTLTLFEDREMIEERLKTYAHLFDDKVMKQLKRRRYTGWGRLSRKLINGIRDKQSGKTILDFLKSDGFANRNFMQLIHDDSLTFKEDIQKAQVSGQGDSLHEHIANLAGSPAIKKGILQTVKVVDELVKVMGRHKPENIVIEMARENQTTQKGQKNSRERMKRIEEGIKELGSQILKEHPVENTQLQNEKLYLYYLQNGRDMYVDQELDINRLSDYDVDHIVPQSFLKDDSIDNKVLTRSDKARGKSDNVPSEEVVKKMKNYWRQLLNAKLITQRKFDNLTKAERGGLSELDKAGFIKRQLVETRQITKHVAQILDSRMNTKYDENDKLIREVKVITLKSKLVSDFRKDFQFYKVREINNYHHAHDAYLNAVVGTALIKKYPKLESEFVYGDYKVYDVRKMIAKSEQEIGKATAKYFFYSNIMNFFKTEITLANGEIRKRPLIETNGETGEIVWDKGRDFATVRKVLSMPQVNIVKKTEVQTGGFSKESILPKRNSDKLIARKKDWDPKKYGGFDSPTVAYSVLVVAKVEKGKSKKLKSVKELLGITIMERSSFEKNPIDFLEAKGYKEVKKDLIIKLPKYSLFELENGRKRMLASAGELQKGNELALPSKYVNFLYLASHYEKLKGSPEDNEQKQLFVEQHKHYLDEIIEQISEFSKRVILADANLDKVLSAYNKHRDKPIREQAENIIHLFTLTNLGAPAAFKYFDTTIDRKRYTSTKEVLDATLIHQSITGLYETRIDLSQLGGDGGGGGEAAAKGGSGGMDPLQLLQPLEAEIKGTKLKAHWNSGATITCVPEAFLEDERPIQTMLIKTIHGEKQQDVYYLTFKVQGRKVEAEVLASPYDYILLNPSDVPWLMKKPLQLTVLVPLHEYQERLLQQTALPKEQKELLQKLFLKYDALWQHWENQVGHRRIKPHNIATGTLAPRPQKQYPINPKAKPSIQIVIDDLLKQGVLIQQNSTMNTPVYPVPKPDGKWRMVLDYREVNKTIPLIAAQNQHSAGILSSIYRGKYKTTLDLTNGFWAHPITPESYWLTAFTWQGKQYCWTRLPQGFLNSPALFNADVVDLLKEIPNVQAYVDDIYISHDDPQEHLEQLEKIFSILLNAGYVVSLKKSEIAQREVEFLGFNITKEGRGLTDTFKQKLLNITPPKDLKQLQSILGLLNFARNFIPNYSELVKPLYTIVAPANGKFISWTEDNSNQLQHIISVLNQADNLEERNPETRLIIKVNSSPSAGYIRYYNEGSKRPIMYVNYIFSKAEAKFTQTEKLLTTMHKGLIKAMDLAMGQEILVYSPIVSMTKIQRTPLPERKALPVRWITWMTYLEDPRIQFHYDKSLPELQQIPNVTEDVIAKTKHPSEFAMVFYTDGSAIKHPDVNKSHSAGMGIAQVQFIPEYKIVHQWSIPLGDHTAQLAEIAAVEFACKKALKISGPVLIVTDSFYVAESANKELPYWKSNGFLNNKKKPLRHVSKWKSIAECLQLKPDIIIMHEKGHQQPMTTLHTEGNNLADKLATQGSYVVHAGKRTADGSEFEKRTADGSEFESPKKKAKVE

SEQ ID NO: 471 - protein, 2174 aa, synthetic construct
MPAAKRVKLDGGDKKYSIGLDIGTNSVGWAVITDEYKVPSKKFKVLGNTDRHSIKKNLIGALLFDSGETAEATRLKRTARRRYTRRKNRICYLQEIFSNEMAKVDDSFFHRLEESFLVEEDKKHERHPIFGNIVDEVAYHEKYPTIYHLRKKLVDSTDKADLRLIYLALAHMIKFRGHFLIEGDLNPDNSDVDKLFIQLVQTYNQLFEENPINASGVDAKAILSARLSKSRRLENLIAQLPGEKKNGLFGNLIALSLGLTPNFKSNFDLAEDAKLQLSKDTYDDDLDNLLAQIGDQYADLFLAAKNLSDAILLSDILRVNTEITKAPLSASMIKRYDEHHQDLTLLKALVRQQLPEKYKEIFFDQSKNGYAGYIDGGASQEEFYKFIKPILEKMDGTEELLVKLNREDLLRKQRTFDNGSIPHQIHLGELHAILRRQEDFYPFLKDNREKIEKILTFRIPYYVGPLARGNSRFAWMTRKSEETITPWNFEEVVDKGASAQSFIERMTNFDKNLPNEKVLPKHSLLYEYFTVYNELTKVKYVTEGMRKPAFLSGEQKKAIVDLLFKTNRKVTVKQLKEDYFKKIECFDSVEISGVEDRFNASLGTYHDLLKIIKDKDFLDNEENEDILEDIVLTLTLFEDREMIEERLKTYAHLFDDKVMKQLKRRRYTGWGRLSRKLINGIRDKQSGKTILDFLKSDGFANRNFMQLIHDDSLTFKEDIQKAQVSGQGDSLHEHIANLAGSPAIKKGILQTVKVVDELVKVMGRHKPENIVIEMARENQTTQKGQKNSRERMKRIEEGIKELGSQILKEHPVENTQLQNEKLYLYYLQNGRDMYVDQELDINRLSDYDVDHIVPQSFLKDDSIDNKVLTRSDKARGKSDNVPSEEVVKKMKNYWRQLLNAKLITQRKFDNLTKAERGGLSELDKAGFIKRQLVETRQITKHVAQILDSRMNTKYDENDKLIREVKVITLKSKLVSDFRKDFQFYKVREINNYHHAHDAYLNAVVGTALIKKYPKLESEFVYGDYKVYDVRKMIAKSEQEIGKATAKYFFYSNIMNFFKTEITLANGEIRKRPLIETNGETGEIVWDKGRDFATVRKVLSMPQVNIVKKTEVQTGGFSKESILPKRNSDKLIARKKDWDPKKYGGFDSPTVAYSVLVVAKVEKGKSKKLKSVKELLGITIMERSSFEKNPIDFLEAKGYKEVKKDLIIKLPKYSLFELENGRKRMLASAGELQKGNELALPSKYVNFLYLASHYEKLKGSPEDNEQKQLFVEQHKHYLDEIIEQISEFSKRVILADANLDKVLSAYNKHRDKPIREQAENIIHLFTLTNLGAPAAFKYFDTTIDRKRYTSTKEVLDATLIHQSITGLYETRIDLSQLGGDGGPAPAPAPAPGGMDPLQLLQPLEAEIKGTKLKAHWNSGATITCVPEAFLEDERPIQTMLIKTIHGEKQQDVYYLTFKVQGRKVEAEVLASPYDYILLNPSDVPWLMKKPLQLTVLVPLHEYQERLLQQTALPKEQKELLQKLFLKYDALWQHWENQVGHRRIKPHNIATGTLAPRPQKQYPINPKAKPSIQIVIDDLLKQGVLIQQNSTMNTPVYPVPKPDGKWRMVLDYREVNKTIPLIAAQNQHSAGILSSIYRGKYKTTLDLTNGFWAHPITPESYWLTAFTWQGKQYCWTRLPQGFLNSPALFNADVVDLLKEIPNVQAYVDDIYISHDDPQEHLEQLEKIFSILLNAGYVVSLKKSEIAQREVEFLGFNITKEGRGLTDTFKQKLLNITPPKDLKQLQSILGLLNFARNFIPNYSELVKPLYTIVAPANGKFISWTEDNSNQLQHIISVLNQADNLEERNPETRLIIKVNSSPSAGYIRYYNEGSKRPIMYVNYIFSKAEAKFTQTEKLLTTMHKGLIKAMDLAMGQEILVYSPIVSMTKIQRTPLPERKALPVRWITWMTYLEDPRIQFHYDKSLPELQQIPNVTEDVIAKTKHPSEFAMVFYTDGSAIKHPDVNKSHSAGMGIAQVQFIPEYKIVHQWSIPLGDHTAQLAEIAAVEFACKKALKISGPVLIVTDSFYVAESANKELPYWKSNGFLNNKKKPLRHVSKWKSIAECLQLKPDIIIMHEKGHQQPMTTLHTEGNNLADKLATQGSYVVHAGKRTADGSEFEKRTADGSEFESPKKKAKVE

SEQ ID NO: 472 - protein, 2174 aa, synthetic construct
MPAAKRVKLDGGDKKYSIGLDIGTNSVGWAVITDEYKVPSKKFKVLGNTDRHSIKKNLIGALLFDSGETAEATRLKRTARRRYTRRKNRICYLQEIFSNEMAKVDDSFFHRLEESFLVEEDKKHERHPIFGNIVDEVAYHEKYPTIYHLRKKLVDSTDKADLRLIYLALAHMIKFRGHFLIEGDLNPDNSDVDKLFIQLVQTYNQLFEENPINASGVDAKAILSARLSKSRRLENLIAQLPGEKKNGLFGNLIALSLGLTPNFKSNFDLAEDAKLQLSKDTYDDDLDNLLAQIGDQYADLFLAAKNLSDAILLSDILRVNTEITKAPLSASMIKRYDEHHQDLTLLKALVRQQLPEKYKEIFFDQSKNGYAGYIDGGASQEEFYKFIKPILEKMDGTEELLVKLNREDLLRKQRTFDNGSIPHQIHLGELHAILRRQEDFYPFLKDNREKIEKILTFRIPYYVGPLARGNSRFAWMTRKSEETITPWNFEEVVDKGASAQSFIERMTNFDKNLPNEKVLPKHSLLYEYFTVYNELTKVKYVTEGMRKPAFLSGEQKKAIVDLLFKTNRKVTVKQLKEDYFKKIECFDSVEISGVEDRFNASLGTYHDLLKIIKDKDFLDNEENEDILEDIVLTLTLFEDREMIEERLKTYAHLFDDKVMKQLKRRRYTGWGRLSRKLINGIRDKQSGKTILDFLKSDGFANRNFMQLIHDDSLTFKEDIQKAQVSGQGDSLHEHIANLAGSPAIKKGILQTVKVVDELVKVMGRHKPENIVIEMARENQTTQKGQKNSRERMKRIEEGIKELGSQILKEHPVENTQLQNEKLYLYYLQNGRDMYVDQELDINRLSDYDVDHIVPQSFLKDDSIDNKVLTRSDKARGKSDNVPSEEVVKKMKNYWRQLLNAKLITQRKFDNLTKAERGGLSELDKAGFIKRQLVETRQITKHVAQILDSRMNTKYDENDKLIREVKVITLKSKLVSDFRKDFQFYKVREINNYHHAHDAYLNAVVGTALIKKYPKLESEFVYGDYKVYDVRKMIAKSEQEIGKATAKYFFYSNIMNFFKTEITLANGEIRKRPLIETNGETGEIVWDKGRDFATVRKVLSMPQVNIVKKTEVQTGGFSKESILPKRNSDKLIARKKDWDPKKYGGFDSPTVAYSVLVVAKVEKGKSKKLKSVKELLGITIMERSSFEKNPIDFLEAKGYKEVKKDLIIKLPKYSLFELENGRKRMLASAGELQKGNELALPSKYVNFLYLASHYEKLKGSPEDNEQKQLFVEQHKHYLDEIIEQISEFSKRVILADANLDKVLSAYNKHRDKPIREQAENIIHLFTLTNLGAPAAFKYFDTTIDRKRYTSTKEVLDATLIHQSITGLYETRIDLSQLGGDGGGSSGGSGGGGGMDPLQLLQPLEAEIKGTKLKAHWNSGATITCVPEAFLEDERPIQTMLIKTIHGEKQQDVYYLTFKVQGRKVEAEVLASPYDYILLNPSDVPWLMKKPLQLTVLVPLHEYQERLLQQTALPKEQKELLQKLFLKYDALWQHWENQVGHRRIKPHNIATGTLAPRPQKQYPINPKAKPSIQIVIDDLLKQGVLIQQNSTMNTPVYPVPKPDGKWRMVLDYREVNKTIPLIAAQNQHSAGILSSIYRGKYKTTLDLTNGFWAHPITPESYWLTAFTWQGKQYCWTRLPQGFLNSPALFNADVVDLLKEIPNVQAYVDDIYISHDDPQEHLEQLEKIFSILLNAGYVVSLKKSEIAQREVEFLGFNITKEGRGLTDTFKQKLLNITPPKDLKQLQSILGLLNFARNFIPNYSELVKPLYTIVAPANGKFISWTEDNSNQLQHIISVLNQADNLEERNPETRLIIKVNSSPSAGYIRYYNEGSKRPIMYVNYIFSKAEAKFTQTEKLLTTMHKGLIKAMDLAMGQEILVYSPIVSMTKIQRTPLPERKALPVRWITWMTYLEDPRIQFHYDKSLPELQQIPNVTEDVIAKTKHPSEFAMVFYTDGSAIKHPDVNKSHSAGMGIAQVQFIPEYKIVHQWSIPLGDHTAQLAEIAAVEFACKKALKISGPVLIVTDSFYVAESANKELPYWKSNGFLNNKKKPLRHVSKWKSIAECLQLKPDIIIMHEKGHQQPMTTLHTEGNNLADKLATQGSYVVHAGKRTADGSEFEKRTADGSEFESPKKKAKVE

SEQ ID NO: 473 - protein, 2174 aa, synthetic construct
MPAAKRVKLDGGDKKYSIGLDIGTNSVGWAVITDEYKVPSKKFKVLGNTDRHSIKKNLIGALLFDSGETAEATRLKRTARRRYTRRKNRICYLQEIFSNEMAKVDDSFFHRLEESFLVEEDKKHERHPIFGNIVDEVAYHEKYPTIYHLRKKLVDSTDKADLRLIYLALAHMIKFRGHFLIEGDLNPDNSDVDKLFIQLVQTYNQLFEENPINASGVDAKAILSARLSKSRRLENLIAQLPGEKKNGLFGNLIALSLGLTPNFKSNFDLAEDAKLQLSKDTYDDDLDNLLAQIGDQYADLFLAAKNLSDAILLSDILRVNTEITKAPLSASMIKRYDEHHQDLTLLKALVRQQLPEKYKEIFFDQSKNGYAGYIDGGASQEEFYKFIKPILEKMDGTEELLVKLNREDLLRKQRTFDNGSIPHQIHLGELHAILRRQEDFYPFLKDNREKIEKILTFRIPYYVGPLARGNSRFAWMTRKSEETITPWNFEEVVDKGASAQSFIERMTNFDKNLPNEKVLPKHSLLYEYFTVYNELTKVKYVTEGMRKPAFLSGEQKKAIVDLLFKTNRKVTVKQLKEDYFKKIECFDSVEISGVEDRFNASLGTYHDLLKIIKDKDFLDNEENEDILEDIVLTLTLFEDREMIEERLKTYAHLFDDKVMKQLKRRRYTGWGRLSRKLINGIRDKQSGKTILDFLKSDGFANRNFMQLIHDDSLTFKEDIQKAQVSGQGDSLHEHIANLAGSPAIKKGILQTVKVVDELVKVMGRHKPENIVIEMARENQTTQKGQKNSRERMKRIEEGIKELGSQILKEHPVENTQLQNEKLYLYYLQNGRDMYVDQELDINRLSDYDVDHIVPQSFLKDDSIDNKVLTRSDKARGKSDNVPSEEVVKKMKNYWRQLLNAKLITQRKFDNLTKAERGGLSELDKAGFIKRQLVETRQITKHVAQILDSRMNTKYDENDKLIREVKVITLKSKLVSDFRKDFQFYKVREINNYHHAHDAYLNAVVGTALIKKYPKLESEFVYGDYKVYDVRKMIAKSEQEIGKATAKYFFYSNIMNFFKTEITLANGEIRKRPLIETNGETGEIVWDKGRDFATVRKVLSMPQVNIVKKTEVQTGGFSKESILPKRNSDKLIARKKDWDPKKYGGFDSPTVAYSVLVVAKVEKGKSKKLKSVKELLGITIMERSSFEKNPIDFLEAKGYKEVKKDLIIKLPKYSLFELENGRKRMLASAGELQKGNELALPSKYVNFLYLASHYEKLKGSPEDNEQKQLFVEQHKHYLDEIIEQISEFSKRVILADANLDKVLSAYNKHRDKPIREQAENIIHLFTLTNLGAPAAFKYFDTTIDRKRYTSTKEVLDATLIHQSITGLYETRIDLSQLGGDGGPAPGSSGGSGGMDPLQLLQPLEAEIKGTKLKAHWNSGATITCVPEAFLEDERPIQTMLIKTIHGEKQQDVYYLTFKVQGRKVEAEVLASPYDYILLNPSDVPWLMKKPLQLTVLVPLHEYQERLLQQTALPKEQKELLQKLFLKYDALWQHWENQVGHRRIKPHNIATGTLAPRPQKQYPINPKAKPSIQIVIDDLLKQGVLIQQNSTMNTPVYPVPKPDGKWRMVLDYREVNKTIPLIAAQNQHSAGILSSIYRGKYKTTLDLTNGFWAHPITPESYWLTAFTWQGKQYCWTRLPQGFLNSPALFNADVVDLLKEIPNVQAYVDDIYISHDDPQEHLEQLEKIFSILLNAGYVVSLKKSEIAQREVEFLGFNITKEGRGLTDTFKQKLLNITPPKDLKQLQSILGLLNFARNFIPNYSELVKPLYTIVAPANGKFISWTEDNSNQLQHIISVLNQADNLEERNPETRLIIKVNSSPSAGYIRYYNEGSKRPIMYVNYIFSKAEAKFTQTEKLLTTMHKGLIKAMDLAMGQEILVYSPIVSMTKIQRTPLPERKALPVRWITWMTYLEDPRIQFHYDKSLPELQQIPNVTEDVIAKTKHPSEFAMVFYTDGSAIKHPDVNKSHSAGMGIAQVQFIPEYKIVHQWSIPLGDHTAQLAEIAAVEFACKKALKISGPVLIVTDSFYVAESANKELPYWKSNGFLNNKKKPLRHVSKWKSIAECLQLKPDIIIMHEKGHQQPMTTLHTEGNNLADKLATQGSYVVHAGKRTADGSEFEKRTADGSEFESPKKKAKVE

SEQ ID NO: 474 - protein, 2176 aa, synthetic construct
MPAAKRVKLDGGDKKYSIGLDIGTNSVGWAVITDEYKVPSKKFKVLGNTDRHSIKKNLIGALLFDSGETAEATRLKRTARRRYTRRKNRICYLQEIFSNEMAKVDDSFFHRLEESFLVEEDKKHERHPIFGNIVDEVAYHEKYPTIYHLRKKLVDSTDKADLRLIYLALAHMIKFRGHFLIEGDLNPDNSDVDKLFIQLVQTYNQLFEENPINASGVDAKAILSARLSKSRRLENLIAQLPGEKKNGLFGNLIALSLGLTPNFKSNFDLAEDAKLQLSKDTYDDDLDNLLAQIGDQYADLFLAAKNLSDAILLSDILRVNTEITKAPLSASMIKRYDEHHQDLTLLKALVRQQLPEKYKEIFFDQSKNGYAGYIDGGASQEEFYKFIKPILEKMDGTEELLVKLNREDLLRKQRTFDNGSIPHQIHLGELHAILRRQEDFYPFLKDNREKIEKILTFRIPYYVGPLARGNSRFAWMTRKSEETITPWNFEEVVDKGASAQSFIERMTNFDKNLPNEKVLPKHSLLYEYFTVYNELTKVKYVTEGMRKPAFLSGEQKKAIVDLLFKTNRKVTVKQLKEDYFKKIECFDSVEISGVEDRFNASLGTYHDLLKIIKDKDFLDNEENEDILEDIVLTLTLFEDREMIEERLKTYAHLFDDKVMKQLKRRRYTGWGRLSRKLINGIRDKQSGKTILDFLKSDGFANRNFMQLIHDDSLTFKEDIQKAQVSGQGDSLHEHIANLAGSPAIKKGILQTVKVVDELVKVMGRHKPENIVIEMARENQTTQKGQKNSRERMKRIEEGIKELGSQILKEHPVENTQLQNEKLYLYYLQNGRDMYVDQELDINRLSDYDVDHIVPQSFLKDDSIDNKVLTRSDKARGKSDNVPSEEVVKKMKNYWRQLLNAKLITQRKFDNLTKAERGGLSELDKAGFIKRQLVETRQITKHVAQILDSRMNTKYDENDKLIREVKVITLKSKLVSDFRKDFQFYKVREINNYHHAHDAYLNAVVGTALIKKYPKLESEFVYGDYKVYDVRKMIAKSEQEIGKATAKYFFYSNIMNFFKTEITLANGEIRKRPLIETNGETGEIVWDKGRDFATVRKVLSMPQVNIVKKTEVQTGGFSKESILPKRNSDKLIARKKDWDPKKYGGFDSPTVAYSVLVVAKVEKGKSKKLKSVKELLGITIMERSSFEKNPIDFLEAKGYKEVKKDLIIKLPKYSLFELENGRKRMLASAGELQKGNELALPSKYVNFLYLASHYEKLKGSPEDNEQKQLFVEQHKHYLDEIIEQISEFSKRVILADANLDKVLSAYNKHRDKPIREQAENIIHLFTLTNLGAPAAFKYFDTTIDRKRYTSTKEVLDATLIHQSITGLYETRIDLSQLGGDGGPAPGGSEAAAKGGMDPLQLLQPLEAEIKGTKLKAHWNSGATITCVPEAFLEDERPIQTMLIKTIHGEKQQDVYYLTFKVQGRKVEAEVLASPYDYILLNPSDVPWLMKKPLQLTVLVPLHEYQERLLQQTALPKEQKELLQKLFLKYDALWQHWENQVGHRRIKPHNIATGTLAPRPQKQYPINPKAKPSIQIVIDDLLKQGVLIQQNSTMNTPVYPVPKPDGKWRMVLDYREVNKTIPLIAAQNQHSAGILSSIYRGKYKTTLDLTNGFWAHPITPESYWLTAFTWQGKQYCWTRLPQGFLNSPALFNADVVDLLKEIPNVQAYVDDIYISHDDPQEHLEQLEKIFSILLNAGYVVSLKKSEIAQREVEFLGFNITKEGRGLTDTFKQKLLNITPPKDLKQLQSILGLLNFARNFIPNYSELVKPLYTIVAPANGKFISWTEDNSNQLQHIISVLNQADNLEERNPETRLIIKVNSSPSAGYIRYYNEGSKRPIMYVNYIFSKAEAKFTQTEKLLTTMHKGLIKAMDLAMGQEILVYSPIVSMTKIQRTPLPERKALPVRWITWMTYLEDPRIQFHYDKSLPELQQIPNVTEDVIAKTKHPSEFAMVFYTDGSAIKHPDVNKSHSAGMGIAQVQFIPEYKIVHQWSIPLGDHTAQLAEIAAVEFACKKALKISGPVLIVTDSFYVAESANKELPYWKSNGFLNNKKKPLRHVSKWKSIAECLQLKPDIIIMHEKGHQQPMTTLHTEGNNLADKLATQGSYVVHAGKRTADGSEFEKRTADGSEFESPKKKAKVE

SEQ ID NO: 475 - protein, 2176 aa, synthetic construct
MPAAKRVKLDGGDKKYSIGLDIGTNSVGWAVITDEYKVPSKKFKVLGNTDRHSIKKNLIGALLFDSGETAEATRLKRTARRRYTRRKNRICYLQEIFSNEMAKVDDSFFHRLEESFLVEEDKKHERHPIFGNIVDEVAYHEKYPTIYHLRKKLVDSTDKADLRLIYLALAHMIKFRGHFLIEGDLNPDNSDVDKLFIQLVQTYNQLFEENPINASGVDAKAILSARLSKSRRLENLIAQLPGEKKNGLFGNLIALSLGLTPNFKSNFDLAEDAKLQLSKDTYDDDLDNLLAQIGDQYADLFLAAKNLSDAILLSDILRVNTEITKAPLSASMIKRYDEHHQDLTLLKALVRQQLPEKYKEIFFDQSKNGYAGYIDGGASQEEFYKFIKPILEKMDGTEELLVKLNREDLLRKQRTFDNGSIPHQIHLGELHAILRRQEDFYPFLKDNREKIEKILTFRIPYYVGPLARGNSRFAWMTRKSEETITPWNFEEVVDKGASAQSFIERMTNFDKNLPNEKVLPKHSLLYEYFTVYNELTKVKYVTEGMRKPAFLSGEQKKAIVDLLFKTNRKVTVKQLKEDYFKKIECFDSVEISGVEDRFNASLGTYHDLLKIIKDKDFLDNEENEDILEDIVLTLTLFEDREMIEERLKTYAHLFDDKVMKQLKRRRYTGWGRLSRKLINGIRDKQSGKTILDFLKSDGFANRNFMQLIHDDSLTFKEDIQKAQVSGQGDSLHEHIANLAGSPAIKKGILQTVKVVDELVKVMGRHKPENIVIEMARENQTTQKGQKNSRERMKRIEEGIKELGSQILKEHPVENTQLQNEKLYLYYLQNGRDMYVDQELDINRLSDYDVDHIVPQSFLKDDSIDNKVLTRSDKARGKSDNVPSEEVVKKMKNYWRQLLNAKLITQRKFDNLTKAERGGLSELDKAGFIKRQLVETRQITKHVAQILDSRMNTKYDENDKLIREVKVITLKSKLVSDFRKDFQFYKVREINNYHHAHDAYLNAVVGTALIKKYPKLESEFVYGDYKVYDVRKMIAKSEQEIGKATAKYFFYSNIMNFFKTEITLANGEIRKRPLIETNGETGEIVWDKGRDFATVRKVLSMPQVNIVKKTEVQTGGFSKESILPKRNSDKLIARKKDWDPKKYGGFDSPTVAYSVLVVAKVEKGKSKKLKSVKELLGITIMERSSFEKNPIDFLEAKGYKEVKKDLIIKLPKYSLFELENGRKRMLASAGELQKGNELALPSKYVNFLYLASHYEKLKGSPEDNEQKQLFVEQHKHYLDEIIEQISEFSKRVILADANLDKVLSAYNKHRDKPIREQAENIIHLFTLTNLGAPAAFKYFDTTIDRKRYTSTKEVLDATLIHQSITGLYETRIDLSQLGGDGGEAAAKGGGGSSGGMDPLQLLQPLEAEIKGTKLKAHWNSGATITCVPEAFLEDERPIQTMLIKTIHGEKQQDVYYLTFKVQGRKVEAEVLASPYDYILLNPSDVPWLMKKPLQLTVLVPLHEYQERLLQQTALPKEQKELLQKLFLKYDALWQHWENQVGHRRIKPHNIATGTLAPRPQKQYPINPKAKPSIQIVIDDLLKQGVLIQQNSTMNTPVYPVPKPDGKWRMVLDYREVNKTIPLIAAQNQHSAGILSSIYRGKYKTTLDLTNGFWAHPITPESYWLTAFTWQGKQYCWTRLPQGFLNSPALFNADVVDLLKEIPNVQAYVDDIYISHDDPQEHLEQLEKIFSILLNAGYVVSLKKSEIAQREVEFLGFNITKEGRGLTDTFKQKLLNITPPKDLKQLQSILGLLNFARNFIPNYSELVKPLYTIVAPANGKFISWTEDNSNQLQHIISVLNQADNLEERNPETRLIIKVNSSPSAGYIRYYNEGSKRPIMYVNYIFSKAEAKFTQTEKLLTTMHKGLIKAMDLAMGQEILVYSPIVSMTKIQRTPLPERKALPVRWITWMTYLEDPRIQFHYDKSLPELQQIPNVTEDVIAKTKHPSEFAMVFYTDGSAIKHPDVNKSHSAGMGIAQVQFIPEYKIVHQWSIPLGDHTAQLAEIAAVEFACKKALKISGPVLIVTDSFYVAESANKELPYWKSNGFLNNKKKPLRHVSKWKSIAECLQLKPDIIIMHEKGHQQPMTTLHTEGNNLADKLATQGSYVVHAGKRTADGSEFEKRTADGSEFESPKKKAKVE

SEQ ID NO: 476 - protein, 2174 aa, synthetic construct
MPAAKRVKLDGGDKKYSIGLDIGTNSVGWAVITDEYKVPSKKFKVLGNTDRHSIKKNLIGALLFDSGETAEATRLKRTARRRYTRRKNRICYLQEIFSNEMAKVDDSFFHRLEESFLVEEDKKHERHPIFGNIVDEVAYHEKYPTIYHLRKKLVDSTDKADLRLIYLALAHMIKFRGHFLIEGDLNPDNSDVDKLFIQLVQTYNQLFEENPINASGVDAKAILSARLSKSRRLENLIAQLPGEKKNGLFGNLIALSLGLTPNFKSNFDLAEDAKLQLSKDTYDDDLDNLLAQIGDQYADLFLAAKNLSDAILLSDILRVNTEITKAPLSASMIKRYDEHHQDLTLLKALVRQQLPEKYKEIFFDQSKNGYAGYIDGGASQEEFYKFIKPILEKMDGTEELLVKLNREDLLRKQRTFDNGSIPHQIHLGELHAILRRQEDFYPFLKDNREKIEKILTFRIPYYVGPLARGNSRFAWMTRKSEETITPWNFEEVVDKGASAQSFIERMTNFDKNLPNEKVLPKHSLLYEYFTVYNELTKVKYVTEGMRKPAFLSGEQKKAIVDLLFKTNRKVTVKQLKEDYFKKIECFDSVEISGVEDRFNASLGTYHDLLKIIKDKDFLDNEENEDILEDIVLTLTLFEDREMIEERLKTYAHLFDDKVMKQLKRRRYTGWGRLSRKLINGIRDKQSGKTILDFLKSDGFANRNFMQLIHDDSLTFKEDIQKAQVSGQGDSLHEHIANLAGSPAIKKGILQTVKVVDELVKVMGRHKPENIVIEMARENQTTQKGQKNSRERMKRIEEGIKELGSQILKEHPVENTQLQNEKLYLYYLQNGRDMYVDQELDINRLSDYDVDHIVPQSFLKDDSIDNKVLTRSDKARGKSDNVPSEEVVKKMKNYWRQLLNAKLITQRKFDNLTKAERGGLSELDKAGFIKRQLVETRQITKHVAQILDSRMNTKYDENDKLIREVKVITLKSKLVSDFRKDFQFYKVREINNYHHAHDAYLNAVVGTALIKKYPKLESEFVYGDYKVYDVRKMIAKSEQEIGKATAKYFFYSNIMNFFKTEITLANGEIRKRPLIETNGETGEIVWDKGRDFATVRKVLSMPQVNIVKKTEVQTGGFSKESILPKRNSDKLIARKKDWDPKKYGGFDSPTVAYSVLVVAKVEKGKSKKLKSVKELLGITIMERSSFEKNPIDFLEAKGYKEVKKDLIIKLPKYSLFELENGRKRMLASAGELQKGNELALPSKYVNFLYLASHYEKLKGSPEDNEQKQLFVEQHKHYLDEIIEQISEFSKRVILADANLDKVLSAYNKHRDKPIREQAENIIHLFTLTNLGAPAAFKYFDTTIDRKRYTSTKEVLDATLIHQSITGLYETRIDLSQLGGDGGGSSGGGGGSGGMDPLQLLQPLEAEIKGTKLKAHWNSGATITCVPEAFLEDERPIQTMLIKTIHGEKQQDVYYLTFKVQGRKVEAEVLASPYDYILLNPSDVPWLMKKPLQLTVLVPLHEYQERLLQQTALPKEQKELLQKLFLKYDALWQHWENQVGHRRIKPHNIATGTLAPRPQKQYPINPKAKPSIQIVIDDLLKQGVLIQQNSTMNTPVYPVPKPDGKWRMVLDYREVNKTIPLIAAQNQHSAGILSSIYRGKYKTTLDLTNGFWAHPITPESYWLTAFTWQGKQYCWTRLPQGFLNSPALFNADVVDLLKEIPNVQAYVDDIYISHDDPQEHLEQLEKIFSILLNAGYVVSLKKSEIAQREVEFLGFNITKEGRGLTDTFKQKLLNITPPKDLKQLQSILGLLNFARNFIPNYSELVKPLYTIVAPANGKFISWTEDNSNQLQHIISVLNQADNLEERNPETRLIIKVNSSPSAGYIRYYNEGSKRPIMYVNYIFSKAEAKFTQTEKLLTTMHKGLIKAMDLAMGQEILVYSPIVSMTKIQRTPLPERKALPVRWITWMTYLEDPRIQFHYDKSLPELQQIPNVTEDVIAKTKHPSEFAMVFYTDGSAIKHPDVNKSHSAGMGIAQVQFIPEYKIVHQWSIPLGDHTAQLAEIAAVEFACKKALKISGPVLIVTDSFYVAESANKELPYWKSNGFLNNKKKPLRHVSKWKSIAECLQLKPDIIIMHEKGHQQPMTTLHTEGNNLADKLATQGSYVVHAGKRTADGSEFEKRTADGSEFESPKKKAKVE

SEQ ID NO: 477 - protein, 2171 aa, synthetic construct
MPAAKRVKLDGGDKKYSIGLDIGTNSVGWAVITDEYKVPSKKFKVLGNTDRHSIKKNLIGALLFDSGETAEATRLKRTARRRYTRRKNRICYLQEIFSNEMAKVDDSFFHRLEESFLVEEDKKHERHPIFGNIVDEVAYHEKYPTIYHLRKKLVDSTDKADLRLIYLALAHMIKFRGHFLIEGDLNPDNSDVDKLFIQLVQTYNQLFEENPINASGVDAKAILSARLSKSRRLENLIAQLPGEKKNGLFGNLIALSLGLTPNFKSNFDLAEDAKLQLSKDTYDDDLDNLLAQIGDQYADLFLAAKNLSDAILLSDILRVNTEITKAPLSASMIKRYDEHHQDLTLLKALVRQQLPEKYKEIFFDQSKNGYAGYIDGGASQEEFYKFIKPILEKMDGTEELLVKLNREDLLRKQRTFDNGSIPHQIHLGELHAILRRQEDFYPFLKDNREKIEKILTFRIPYYVGPLARGNSRFAWMTRKSEETITPWNFEEVVDKGASAQSFIERMTNFDKNLPNEKVLPKHSLLYEYFTVYNELTKVKYVTEGMRKPAFLSGEQKKAIVDLLFKTNRKVTVKQLKEDYFKKIECFDSVEISGVEDRFNASLGTYHDLLKIIKDKDFLDNEENEDILEDIVLTLTLFEDREMIEERLKTYAHLFDDKVMKQLKRRRYTGWGRLSRKLINGIRDKQSGKTILDFLKSDGFANRNFMQLIHDDSLTFKEDIQKAQVSGQGDSLHEHIANLAGSPAIKKGILQTVKVVDELVKVMGRHKPENIVIEMARENQTTQKGQKNSRERMKRIEEGIKELGSQILKEHPVENTQLQNEKLYLYYLQNGRDMYVDQELDINRLSDYDVDHIVPQSFLKDDSIDNKVLTRSDKARGKSDNVPSEEVVKKMKNYWRQLLNAKLITQRKFDNLTKAERGGLSELDKAGFIKRQLVETRQITKHVAQILDSRMNTKYDENDKLIREVKVITLKSKLVSDFRKDFQFYKVREINNYHHAHDAYLNAVVGTALIKKYPKLESEFVYGDYKVYDVRKMIAKSEQEIGKATAKYFFYSNIMNFFKTEITLANGEIRKRPLIETNGETGEIVWDKGRDFATVRKVLSMPQVNIVKKTEVQTGGFSKESILPKRNSDKLIARKKDWDPKKYGGFDSPTVAYSVLVVAKVEKGKSKKLKSVKELLGITIMERSSFEKNPIDFLEAKGYKEVKKDLIIKLPKYSLFELENGRKRMLASAGELQKGNELALPSKYVNFLYLASHYEKLKGSPEDNEQKQLFVEQHKHYLDEIIEQISEFSKRVILADANLDKVLSAYNKHRDKPIREQAENIIHLFTLTNLGAPAAFKYFDTTIDRKRYTSTKEVLDATLIHQSITGLYETRIDLSQLGGDGGGSSPAPGGMDPLQLLQPLEAEIKGTKLKAHWNSGATITCVPEAFLEDERPIQTMLIKTIHGEKQQDVYYLTFKVQGRKVEAEVLASPYDYILLNPSDVPWLMKKPLQLTVLVPLHEYQERLLQQTALPKEQKELLQKLFLKYDALWQHWENQVGHRRIKPHNIATGTLAPRPQKQYPINPKAKPSIQIVIDDLLKQGVLIQQNSTMNTPVYPVPKPDGKWRMVLDYREVNKTIPLIAAQNQHSAGILSSIYRGKYKTTLDLTNGFWAHPITPESYWLTAFTWQGKQYCWTRLPQGFLNSPALFNADVVDLLKEIPNVQAYVDDIYISHDDPQEHLEQLEKIFSILLNAGYVVSLKKSEIAQREVEFLGFNITKEGRGLTDTFKQKLLNITPPKDLKQLQSILGLLNFARNFIPNYSELVKPLYTIVAPANGKFISWTEDNSNQLQHIISVLNQADNLEERNPETRLIIKVNSSPSAGYIRYYNEGSKRPIMYVNYIFSKAEAKFTQTEKLLTTMHKGLIKAMDLAMGQEILVYSPIVSMTKIQRTPLPERKALPVRWITWMTYLEDPRIQFHYDKSLPELQQIPNVTEDVIAKTKHPSEFAMVFYTDGSAIKHPDVNKSHSAGMGIAQVQFIPEYKIVHQWSIPLGDHTAQLAEIAAVEFACKKALKISGPVLIVTDSFYVAESANKELPYWKSNGFLNNKKKPLRHVSKWKSIAECLQLKPDIIIMHEKGHQQPMTTLHTEGNNLADKLATQGSYVVHAGKRTADGSEFEKRTADGSEFESPKKKAKVE

SEQ ID NO: 478 - protein, 2178 aa, synthetic construct
MPAAKRVKLDGGDKKYSIGLDIGTNSVGWAVITDEYKVPSKKFKVLGNTDRHSIKKNLIGALLFDSGETAEATRLKRTARRRYTRRKNRICYLQEIFSNEMAKVDDSFFHRLEESFLVEEDKKHERHPIFGNIVDEVAYHEKYPTIYHLRKKLVDSTDKADLRLIYLALAHMIKFRGHFLIEGDLNPDNSDVDKLFIQLVQTYNQLFEENPINASGVDAKAILSARLSKSRRLENLIAQLPGEKKNGLFGNLIALSLGLTPNFKSNFDLAEDAKLQLSKDTYDDDLDNLLAQIGDQYADLFLAAKNLSDAILLSDILRVNTEITKAPLSASMIKRYDEHHQDLTLLKALVRQQLPEKYKEIFFDQSKNGYAGYIDGGASQEEFYKFIKPILEKMDGTEELLVKLNREDLLRKQRTFDNGSIPHQIHLGELHAILRRQEDFYPFLKDNREKIEKILTFRIPYYVGPLARGNSRFAWMTRKSEETITPWNFEEVVDKGASAQSFIERMTNFDKNLPNEKVLPKHSLLYEYFTVYNELTKVKYVTEGMRKPAFLSGEQKKAIVDLLFKTNRKVTVKQLKEDYFKKIECFDSVEISGVEDRFNASLGTYHDLLKIIKDKDFLDNEENEDILEDIVLTLTLFEDREMIEERLKTYAHLFDDKVMKQLKRRRYTGWGRLSRKLINGIRDKQSGKTILDFLKSDGFANRNFMQLIHDDSLTFKEDIQKAQVSGQGDSLHEHIANLAGSPAIKKGILQTVKVVDELVKVMGRHKPENIVIEMARENQTTQKGQKNSRERMKRIEEGIKELGSQILKEHPVENTQLQNEKLYLYYLQNGRDMYVDQELDINRLSDYDVDHIVPQSFLKDDSIDNKVLTRSDKARGKSDNVPSEEVVKKMKNYWRQLLNAKLITQRKFDNLTKAERGGLSELDKAGFIKRQLVETRQITKHVAQILDSRMNTKYDENDKLIREVKVITLKSKLVSDFRKDFQFYKVREINNYHHAHDAYLNAVVGTALIKKYPKLESEFVYGDYKVYDVRKMIAKSEQEIGKATAKYFFYSNIMNFFKTEITLANGEIRKRPLIETNGETGEIVWDKGRDFATVRKVLSMPQVNIVKKTEVQTGGFSKESILPKRNSDKLIARKKDWDPKKYGGFDSPTVAYSVLVVAKVEKGKSKKLKSVKELLGITIMERSSFEKNPIDFLEAKGYKEVKKDLIIKLPKYSLFELENGRKRMLASAGELQKGNELALPSKYVNFLYLASHYEKLKGSPEDNEQKQLFVEQHKHYLDEIIEQISEFSKRVILADANLDKVLSAYNKHRDKPIREQAENIIHLFTLTNLGAPAAFKYFDTTIDRKRYTSTKEVLDATLIHQSITGLYETRIDLSQLGGDGGPAPAPAPAPAPAPGGMDPLQLLQPLEAEIKGTKLKAHWNSGATITCVPEAFLEDERPIQTMLIKTIHGEKQQDVYYLTFKVQGRKVEAEVLASPYDYILLNPSDVPWLMKKPLQLTVLVPLHEYQERLLQQTALPKEQKELLQKLFLKYDALWQHWENQVGHRRIKPHNIATGTLAPRPQKQYPINPKAKPSIQIVIDDLLKQGVLIQQNSTMNTPVYPVPKPDGKWRMVLDYREVNKTIPLIAAQNQHSAGILSSIYRGKYKTTLDLTNGFWAHPITPESYWLTAFTWQGKQYCWTRLPQGFLNSPALFNADVVDLLKEIPNVQAYVDDIYISHDDPQEHLEQLEKIFSILLNAGYVVSLKKSEIAQREVEFLGFNITKEGRGLTDTFKQKLLNITPPKDLKQLQSILGLLNFARNFIPNYSELVKPLYTIVAPANGKFISWTEDNSNQLQHIISVLNQADNLEERNPETRLIIKVNSSPSAGYIRYYNEGSKRPIMYVNYIFSKAEAKFTQTEKLLTTMHKGLIKAMDLAMGQEILVYSPIVSMTKIQRTPLPERKALPVRWITWMTYLEDPRIQFHYDKSLPELQQIPNVTEDVIAKTKHPSEFAMVFYTDGSAIKHPDVNKSHSAGMGIAQVQFIPEYKIVHQWSIPLGDHTAQLAEIAAVEFACKKALKISGPVLIVTDSFYVAESANKELPYWKSNGFLNNKKKPLRHVSKWKSIAECLQLKPDIIIMHEKGHQQPMTTLHTEGNNLADKLATQGSYVVHAGKRTADGSEFEKRTADGSEFESPKKKAKVE

SEQ ID NO: 479 - protein, 2170 aa, synthetic construct
MPAAKRVKLDGGDKKYSIGLDIGTNSVGWAVITDEYKVPSKKFKVLGNTDRHSIKKNLIGALLFDSGETAEATRLKRTARRRYTRRKNRICYLQEIFSNEMAKVDDSFFHRLEESFLVEEDKKHERHPIFGNIVDEVAYHEKYPTIYHLRKKLVDSTDKADLRLIYLALAHMIKFRGHFLIEGDLNPDNSDVDKLFIQLVQTYNQLFEENPINASGVDAKAILSARLSKSRRLENLIAQLPGEKKNGLFGNLIALSLGLTPNFKSNFDLAEDAKLQLSKDTYDDDLDNLLAQIGDQYADLFLAAKNLSDAILLSDILRVNTEITKAPLSASMIKRYDEHHQDLTLLKALVRQQLPEKYKEIFFDQSKNGYAGYIDGGASQEEFYKFIKPILEKMDGTEELLVKLNREDLLRKQRTFDNGSIPHQIHLGELHAILRRQEDFYPFLKDNREKIEKILTFRIPYYVGPLARGNSRFAWMTRKSEETITPWNFEEVVDKGASAQSFIERMTNFDKNLPNEKVLPKHSLLYEYFTVYNELTKVKYVTEGMRKPAFLSGEQKKAIVDLLFKTNRKVTVKQLKEDYFKKIECFDSVEISGVEDRFNASLGTYHDLLKIIKDKDFLDNEENEDILEDIVLTLTLFEDREMIEERLKTYAHLFDDKVMKQLKRRRYTGWGRLSRKLINGIRDKQSGKTILDFLKSDGFANRNFMQLIHDDSLTFKEDIQKAQVSGQGDSLHEHIANLAGSPAIKKGILQTVKVVDELVKVMGRHKPENIVIEMARENQTTQKGQKNSRERMKRIEEGIKELGSQILKEHPVENTQLQNEKLYLYYLQNGRDMYVDQELDINRLSDYDVDHIVPQSFLKDDSIDNKVLTRSDKARGKSDNVPSEEVVKKMKNYWRQLLNAKLITQRKFDNLTKAERGGLSELDKAGFIKRQLVETRQITKHVAQILDSRMNTKYDENDKLIREVKVITLKSKLVSDFRKDFQFYKVREINNYHHAHDAYLNAVVGTALIKKYPKLESEFVYGDYKVYDVRKMIAKSEQEIGKATAKYFFYSNIMNFFKTEITLANGEIRKRPLIETNGETGEIVWDKGRDFATVRKVLSMPQVNIVKKTEVQTGGFSKESILPKRNSDKLIARKKDWDPKKYGGFDSPTVAYSVLVVAKVEKGKSKKLKSVKELLGITIMERSSFEKNPIDFLEAKGYKEVKKDLIIKLPKYSLFELENGRKRMLASAGELQKGNELALPSKYVNFLYLASHYEKLKGSPEDNEQKQLFVEQHKHYLDEIIEQISEFSKRVILADANLDKVLSAYNKHRDKPIREQAENIIHLFTLTNLGAPAAFKYFDTTIDRKRYTSTKEVLDATLIHQSITGLYETRIDLSQLGGDGGGGGGGGGMDPLQLLQPLEAEIKGTKLKAHWNSGATITCVPEAFLEDERPIQTMLIKTIHGEKQQDVYYLTFKVQGRKVEAEVLASPYDYILLNPSDVPWLMKKPLQLTVLVPLHEYQERLLQQTALPKEQKELLQKLFLKYDALWQHWENQVGHRRIKPHNIATGTLAPRPQKQYPINPKAKPSIQIVIDDLLKQGVLIQQNSTMNTPVYPVPKPDGKWRMVLDYREVNKTIPLIAAQNQHSAGILSSIYRGKYKTTLDLTNGFWAHPITPESYWLTAFTWQGKQYCWTRLPQGFLNSPALFNADVVDLLKEIPNVQAYVDDIYISHDDPQEHLEQLEKIFSILLNAGYVVSLKKSEIAQREVEFLGFNITKEGRGLTDTFKQKLLNITPPKDLKQLQSILGLLNFARNFIPNYSELVKPLYTIVAPANGKFISWTEDNSNQLQHIISVLNQADNLEERNPETRLIIKVNSSPSAGYIRYYNEGSKRPIMYVNYIFSKAEAKFTQTEKLLTTMHKGLIKAMDLAMGQEILVYSPIVSMTKIQRTPLPERKALPVRWITWMTYLEDPRIQFHYDKSLPELQQIPNVTEDVIAKTKHPSEFAMVFYTDGSAIKHPDVNKSHSAGMGIAQVQFIPEYKIVHQWSIPLGDHTAQLAEIAAVEFACKKALKISGPVLIVTDSFYVAESANKELPYWKSNGFLNNKKKPLRHVSKWKSIAECLQLKPDIIIMHEKGHQQPMTTLHTEGNNLADKLATQGSYVVHAGKRTADGSEFEKRTADGSEFESPKKKAKVE

SEQ ID NO: 480 - protein, 2211 aa, synthetic construct
MPAAKRVKLDGGDKKYSIGLDIGTNSVGWAVITDEYKVPSKKFKVLGNTDRHSIKKNLIGALLFDSGETAEATRLKRTARRRYTRRKNRICYLQEIFSNEMAKVDDSFFHRLEESFLVEEDKKHERHPIFGNIVDEVAYHEKYPTIYHLRKKLVDSTDKADLRLIYLALAHMIKFRGHFLIEGDLNPDNSDVDKLFIQLVQTYNQLFEENPINASGVDAKAILSARLSKSRRLENLIAQLPGEKKNGLFGNLIALSLGLTPNFKSNFDLAEDAKLQLSKDTYDDDLDNLLAQIGDQYADLFLAAKNLSDAILLSDILRVNTEITKAPLSASMIKRYDEHHQDLTLLKALVRQQLPEKYKEIFFDQSKNGYAGYIDGGASQEEFYKFIKPILEKMDGTEELLVKLNREDLLRKQRTFDNGSIPHQIHLGELHAILRRQEDFYPFLKDNREKIEKILTFRIPYYVGPLARGNSRFAWMTRKSEETITPWNFEEVVDKGASAQSFIERMTNFDKNLPNEKVLPKHSLLYEYFTVYNELTKVKYVTEGMRKPAFLSGEQKKAIVDLLFKTNRKVTVKQLKEDYFKKIECFDSVEISGVEDRFNASLGTYHDLLKIIKDKDFLDNEENEDILEDIVLTLTLFEDREMIEERLKTYAHLFDDKVMKQLKRRRYTGWGRLSRKLINGIRDKQSGKTILDFLKSDGFANRNFMQLIHDDSLTFKEDIQKAQVSGQGDSLHEHIANLAGSPAIKKGILQTVKVVDELVKVMGRHKPENIVIEMARENQTTQKGQKNSRERMKRIEEGIKELGSQILKEHPVENTQLQNEKLYLYYLQNGRDMYVDQELDINRLSDYDVDHIVPQSFLKDDSIDNKVLTRSDKARGKSDNVPSEEVVKKMKNYWRQLLNAKLITQRKFDNLTKAERGGLSELDKAGFIKRQLVETRQITKHVAQILDSRMNTKYDENDKLIREVKVITLKSKLVSDFRKDFQFYKVREINNYHHAHDAYLNAVVGTALIKKYPKLESEFVYGDYKVYDVRKMIAKSEQEIGKATAKYFFYSNIMNFFKTEITLANGEIRKRPLIETNGETGEIVWDKGRDFATVRKVLSMPQVNIVKKTEVQTGGFSKESILPKRNSDKLIARKKDWDPKKYGGFDSPTVAYSVLVVAKVEKGKSKKLKSVKELLGITIMERSSFEKNPIDFLEAKGYKEVKKDLIIKLPKYSLFELENGRKRMLASAGELQKGNELALPSKYVNFLYLASHYEKLKGSPEDNEQKQLFVEQHKHYLDEIIEQISEFSKRVILADANLDKVLSAYNKHRDKPIREQAENIIHLFTLTNLGAPAAFKYFDTTIDRKRYTSTKEVLDATLIHQSITGLYETRIDLSQLGGDGGAEAAAKEAAAKEAAAKEAAAKALEAEAAAKEAAAKEAAAKEAAAKAGGMDPLQLLQPLEAEIKGTKLKAHWNSGATITCVPEAFLEDERPIQTMLIKTIHGEKQQDVYYLTFKVQGRKVEAEVLASPYDYILLNPSDVPWLMKKPLQLTVLVPLHEYQERLLQQTALPKEQKELLQKLFLKYDALWQHWENQVGHRRIKPHNIATGTLAPRPQKQYPINPKAKPSIQIVIDDLLKQGVLIQQNSTMNTPVYPVPKPDGKWRMVLDYREVNKTIPLIAAQNQHSAGILSSIYRGKYKTTLDLTNGFWAHPITPESYWLTAFTWQGKQYCWTRLPQGFLNSPALFNADVVDLLKEIPNVQAYVDDIYISHDDPQEHLEQLEKIFSILLNAGYVVSLKKSEIAQREVEFLGFNITKEGRGLTDTFKQKLLNITPPKDLKQLQSILGKLNFARNFIPNYSELVKPLYTIVAPANGKFISWTEDNSNQLQHIISVLNQADNLEERNPETRLIIKVNSSPSAGYIRYYNEGSKRPIMYVNYIFSKAEAKFTQTEKLLTTMHKGLIKAMDLAMGQEILVYSPIVSMTKIQRTPLPERKALPVRWITWMTYLEDPRIQFHYDKSLPELQQIPNVTEDVIAKTKHPSEFAMVFYTDGSAIKHPDVNKSHSAGMGIAQVQFIPEYKIVHQWSIPLGDHTAQLAEIAAVEFACKKALKISGPVLIVTDSFYVAESANKELPYWKSNGFLNNKKKPLRHVSKWKSIAECLQLKPDIIIMHEKGHQQPMTTLHTEGNNLADKLATQGSYVVHAGKRTADGSEFEKRTADGSEFESPKKKAKVE

SEQ ID NO: 481 - protein, 2195 aa, synthetic construct
MPAAKRVKLDGGDKKYSIGLDIGTNSVGWAVITDEYKVPSKKFKVLGNTDRHSIKKNLIGALLFDSGETAEATRLKRTARRRYTRRKNRICYLQEIFSNEMAKVDDSFFHRLEESFLVEEDKKHERHPIFGNIVDEVAYHEKYPTIYHLRKKLVDSTDKADLRLIYLALAHMIKFRGHFLIEGDLNPDNSDVDKLFIQLVQTYNQLFEENPINASGVDAKAILSARLSKSRRLENLIAQLPGEKKNGLFGNLIALSLGLTPNFKSNFDLAEDAKLQLSKDTYDDDLDNLLAQIGDQYADLFLAAKNLSDAILLSDILRVNTEITKAPLSASMIKRYDEHHQDLTLLKALVRQQLPEKYKEIFFDQSKNGYAGYIDGGASQEEFYKFIKPILEKMDGTEELLVKLNREDLLRKQRTFDNGSIPHQIHLGELHAILRRQEDFYPFLKDNREKIEKILTFRIPYYVGPLARGNSRFAWMTRKSEETITPWNFEEVVDKGASAQSFIERMTNFDKNLPNEKVLPKHSLLYEYFTVYNELTKVKYVTEGMRKPAFLSGEQKKAIVDLLFKTNRKVTVKQLKEDYFKKIECFDSVEISGVEDRFNASLGTYHDLLKIIKDKDFLDNEENEDILEDIVLTLTLFEDREMIEERLKTYAHLFDDKVMKQLKRRRYTGWGRLSRKLINGIRDKQSGKTILDFLKSDGFANRNFMQLIHDDSLTFKEDIQKAQVSGQGDSLHEHIANLAGSPAIKKGILQTVKVVDELVKVMGRHKPENIVIEMARENQTTQKGQKNSRERMKRIEEGIKELGSQILKEHPVENTQLQNEKLYLYYLQNGRDMYVDQELDINRLSDYDVDHIVPQSFLKDDSIDNKVLTRSDKARGKSDNVPSEEVVKKMKNYWRQLLNAKLITQRKFDNLTKAERGGLSELDKAGFIKRQLVETRQITKHVAQILDSRMNTKYDENDKLIREVKVITLKSKLVSDFRKDFQFYKVREINNYHHAHDAYLNAVVGTALIKKYPKLESEFVYGDYKVYDVRKMIAKSEQEIGKATAKYFFYSNIMNFFKTEITLANGEIRKRPLIETNGETGEIVWDKGRDFATVRKVLSMPQVNIVKKTEVQTGGFSKESILPKRNSDKLIARKKDWDPKKYGGFDSPTVAYSVLVVAKVEKGKSKKLKSVKELLGITIMERSSFEKNPIDFLEAKGYKEVKKDLIIKLPKYSLFELENGRKRMLASAGELQKGNELALPSKYVNFLYLASHYEKLKGSPEDNEQKQLFVEQHKHYLDEIIEQISEFSKRVILADANLDKVLSAYNKHRDKPIREQAENIIHLFTLTNLGAPAAFKYFDTTIDRKRYTSTKEVLDATLIHQSITGLYETRIDLSQLGGDGGEAAAKEAAAKEAAAKEAAAKEAAAKEAAAKGGMDPLQLLQPLEAEIKGTKLKAHWNSGATITCVPEAFLEDERPIQTMLIKTIHGEKQQDVYYLTFKVQGRKVEAEVLASPYDYILLNPSDVPWLMKKPLQLTVLVPLHEYQERLLQQTALPKEQKELLQKLFLKYDALWQHWENQVGHRRIKPHNIATGTLAPRPQKQYPINPKAKPSIQIVIDDLLKQGVLIQQNSTMNTPVYPVPKPDGKWRMVLDYREVNKTIPLIAAQNQHSAGILSSIYRGKYKTTLDLTNGFWAHPITPESYWLTAFTWQGKQYCWTRLPQGFLNSPALFNADVVDLLKEIPNVQAYVDDIYISHDDPQEHLEQLEKIFSILLNAGYVVSLKKSEIAQREVEFLGFNITKEGRGLTDTFKQKLLNITPPKDLKQLQSILGKLNFARNFIPNYSELVKPLYTIVAPANGKFISWTEDNSNQLQHIISVLNQADNLEERNPETRLIIKVNSSPSAGYIRYYNEGSKRPIMYVNYIFSKAEAKFTQTEKLLTTMHKGLIKAMDLAMGQEILVYSPIVSMTKIQRTPLPERKALPVRWITWMTYLEDPRIQFHYDKSLPELQQIPNVTEDVIAKTKHPSEFAMVFYTDGSAIKHPDVNKSHSAGMGIAQVQFIPEYKIVHQWSIPLGDHTAQLAEIAAVEFACKKALKISGPVLIVTDSFYVAESANKELPYWKSNGFLNNKKKPLRHVSKWKSIAECLQLKPDIIIMHEKGHQQPMTTLHTEGNNLADKLATQGSYVVHAGKRTADGSEFEKRTADGSEFESPKKKAKVE

SEQ ID NO: 482 - protein, 2176 aa, synthetic construct
MPAAKRVKLDGGDKKYSIGLDIGTNSVGWAVITDEYKVPSKKFKVLGNTDRHSIKKNLIGALLFDSGETAEATRLKRTARRRYTRRKNRICYLQEIFSNEMAKVDDSFFHRLEESFLVEEDKKHERHPIFGNIVDEVAYHEKYPTIYHLRKKLVDSTDKADLRLIYLALAHMIKFRGHFLIEGDLNPDNSDVDKLFIQLVQTYNQLFEENPINASGVDAKAILSARLSKSRRLENLIAQLPGEKKNGLFGNLIALSLGLTPNFKSNFDLAEDAKLQLSKDTYDDDLDNLLAQIGDQYADLFLAAKNLSDAILLSDILRVNTEITKAPLSASMIKRYDEHHQDLTLLKALVRQQLPEKYKEIFFDQSKNGYAGYIDGGASQEEFYKFIKPILEKMDGTEELLVKLNREDLLRKQRTFDNGSIPHQIHLGELHAILRRQEDFYPFLKDNREKIEKILTFRIPYYVGPLARGNSRFAWMTRKSEETITPWNFEEVVDKGASAQSFIERMTNFDKNLPNEKVLPKHSLLYEYFTVYNELTKVKYVTEGMRKPAFLSGEQKKAIVDLLFKTNRKVTVKQLKEDYFKKIECFDSVEISGVEDRFNASLGTYHDLLKIIKDKDFLDNEENEDILEDIVLTLTLFEDREMIEERLKTYAHLFDDKVMKQLKRRRYTGWGRLSRKLINGIRDKQSGKTILDFLKSDGFANRNFMQLIHDDSLTFKEDIQKAQVSGQGDSLHEHIANLAGSPAIKKGILQTVKVVDELVKVMGRHKPENIVIEMARENQTTQKGQKNSRERMKRIEEGIKELGSQILKEHPVENTQLQNEKLYLYYLQNGRDMYVDQELDINRLSDYDVDHIVPQSFLKDDSIDNKVLTRSDKARGKSDNVPSEEVVKKMKNYWRQLLNAKLITQRKFDNLTKAERGGLSELDKAGFIKRQLVETRQITKHVAQILDSRMNTKYDENDKLIREVKVITLKSKLVSDFRKDFQFYKVREINNYHHAHDAYLNAVVGTALIKKYPKLESEFVYGDYKVYDVRKMIAKSEQEIGKATAKYFFYSNIMNFFKTEITLANGEIRKRPLIETNGETGEIVWDKGRDFATVRKVLSMPQVNIVKKTEVQTGGFSKESILPKRNSDKLIARKKDWDPKKYGGFDSPTVAYSVLVVAKVEKGKSKKLKSVKELLGITIMERSSFEKNPIDFLEAKGYKEVKKDLIIKLPKYSLFELENGRKRMLASAGELQKGNELALPSKYVNFLYLASHYEKLKGSPEDNEQKQLFVEQHKHYLDEIIEQISEFSKRVILADANLDKVLSAYNKHRDKPIREQAENIIHLFTLTNLGAPAAFKYFDTTIDRKRYTSTKEVLDATLIHQSITGLYETRIDLSQLGGDGGEAAAKGGSPAPGGMDPLQLLQPLEAEIKGTKLKAHWNSGATITCVPEAFLEDERPIQTMLIKTIHGEKQQDVYYLTFKVQGRKVEAEVLASPYDYILLNPSDVPWLMKKPLQLTVLVPLHEYQERLLQQTALPKEQKELLQKLFLKYDALWQHWENQVGHRRIKPHNIATGTLAPRPQKQYPINPKAKPSIQIVIDDLLKQGVLIQQNSTMNTPVYPVPKPDGKWRMVLDYREVNKTIPLIAAQNQHSAGILSSIYRGKYKTTLDLTNGFWAHPITPESYWLTAFTWQGKQYCWTRLPQGFLNSPALFNADVVDLLKEIPNVQAYVDDIYISHDDPQEHLEQLEKIFSILLNAGYVVSLKKSEIAQREVEFLGFNITKEGRGLTDTFKQKLLNITPPKDLKQLQSILGKLNFARNFIPNYSELVKPLYTIVAPANGKFISWTEDNSNQLQHIISVLNQADNLEERNPETRLIIKVNSSPSAGYIRYYNEGSKRPIMYVNYIFSKAEAKFTQTEKLLTTMHKGLIKAMDLAMGQEILVYSPIVSMTKIQRTPLPERKALPVRWITWMTYLEDPRIQFHYDKSLPELQQIPNVTEDVIAKTKHPSEFAMVFYTDGSAIKHPDVNKSHSAGMGIAQVQFIPEYKIVHQWSIPLGDHTAQLAEIAAVEFACKKALKISGPVLIVTDSFYVAESANKELPYWKSNGFLNNKKKPLRHVSKWKSIAECLQLKPDIIIMHEKGHQQPMTTLHTEGNNLADKLATQGSYVVHAGKRTADGSEFEKRTADGSEFESPKKKAKVE

SEQ ID NO: 483 - protein, 2174 aa, synthetic construct
MPAAKRVKLDGGDKKYSIGLDIGTNSVGWAVITDEYKVPSKKFKVLGNTDRHSIKKNLIGALLFDSGETAEATRLKRTARRRYTRRKNRICYLQEIFSNEMAKVDDSFFHRLEESFLVEEDKKHERHPIFGNIVDEVAYHEKYPTIYHLRKKLVDSTDKADLRLIYLALAHMIKFRGHFLIEGDLNPDNSDVDKLFIQLVQTYNQLFEENPINASGVDAKAILSARLSKSRRLENLIAQLPGEKKNGLFGNLIALSLGLTPNFKSNFDLAEDAKLQLSKDTYDDDLDNLLAQIGDQYADLFLAAKNLSDAILLSDILRVNTEITKAPLSASMIKRYDEHHQDLTLLKALVRQQLPEKYKEIFFDQSKNGYAGYIDGGASQEEFYKFIKPILEKMDGTEELLVKLNREDLLRKQRTFDNGSIPHQIHLGELHAILRRQEDFYPFLKDNREKIEKILTFRIPYYVGPLARGNSRFAWMTRKSEETITPWNFEEVVDKGASAQSFIERMTNFDKNLPNEKVLPKHSLLYEYFTVYNELTKVKYVTEGMRKPAFLSGEQKKAIVDLLFKTNRKVTVKQLKEDYFKKIECFDSVEISGVEDRFNASLGTYHDLLKIIKDKDFLDNEENEDILEDIVLTLTLFEDREMIEERLKTYAHLFDDKVMKQLKRRRYTGWGRLSRKLINGIRDKQSGKTILDFLKSDGFANRNFMQLIHDDSLTFKEDIQKAQVSGQGDSLHEHIANLAGSPAIKKGILQTVKVVDELVKVMGRHKPENIVIEMARENQTTQKGQKNSRERMKRIEEGIKELGSQILKEHPVENTQLQNEKLYLYYLQNGRDMYVDQELDINRLSDYDVDHIVPQSFLKDDSIDNKVLTRSDKARGKSDNVPSEEVVKKMKNYWRQLLNAKLITQRKFDNLTKAERGGLSELDKAGFIKRQLVETRQITKHVAQILDSRMNTKYDENDKLIREVKVITLKSKLVSDFRKDFQFYKVREINNYHHAHDAYLNAVVGTALIKKYPKLESEFVYGDYKVYDVRKMIAKSEQEIGKATAKYFFYSNIMNFFKTEITLANGEIRKRPLIETNGETGEIVWDKGRDFATVRKVLSMPQVNIVKKTEVQTGGFSKESILPKRNSDKLIARKKDWDPKKYGGFDSPTVAYSVLVVAKVEKGKSKKLKSVKELLGITIMERSSFEKNPIDFLEAKGYKEVKKDLIIKLPKYSLFELENGRKRMLASAGELQKGNELALPSKYVNFLYLASHYEKLKGSPEDNEQKQLFVEQHKHYLDEIIEQISEFSKRVILADANLDKVLSAYNKHRDKPIREQAENIIHLFTLTNLGAPAAFKYFDTTIDRKRYTSTKEVLDATLIHQSITGLYETRIDLSQLGGDGGGGSGSSPAPGGMDPLQLLQPLEAEIKGTKLKAHWNSGATITCVPEAFLEDERPIQTMLIKTIHGEKQQDVYYLTFKVQGRKVEAEVLASPYDYILLNPSDVPWLMKKPLQLTVLVPLHEYQERLLQQTALPKEQKELLQKLFLKYDALWQHWENQVGHRRIKPHNIATGTLAPRPQKQYPINPKAKPSIQIVIDDLLKQGVLIQQNSTMNTPVYPVPKPDGKWRMVLDYREVNKTIPLIAAQNQHSAGILSSIYRGKYKTTLDLTNGFWAHPITPESYWLTAFTWQGKQYCWTRLPQGFLNSPALFNADVVDLLKEIPNVQAYVDDIYISHDDPQEHLEQLEKIFSILLNAGYVVSLKKSEIAQREVEFLGFNITKEGRGLTDTFKQKLLNITPPKDLKQLQSILGKLNFARNFIPNYSELVKPLYTIVAPANGKFISWTEDNSNQLQHIISVLNQADNLEERNPETRLIIKVNSSPSAGYIRYYNEGSKRPIMYVNYIFSKAEAKFTQTEKLLTTMHKGLIKAMDLAMGQEILVYSPIVSMTKIQRTPLPERKALPVRWITWMTYLEDPRIQFHYDKSLPELQQIPNVTEDVIAKTKHPSEFAMVFYTDGSAIKHPDVNKSHSAGMGIAQVQFIPEYKIVHQWSIPLGDHTAQLAEIAAVEFACKKALKISGPVLIVTDSFYVAESANKELPYWKSNGFLNNKKKPLRHVSKWKSIAECLQLKPDIIIMHEKGHQQPMTTLHTEGNNLADKLATQGSYVVHAGKRTADGSEFEKRTADGSEFESPKKKAKVE

SEQ ID NO: 484 - protein, 2171 aa, synthetic construct
MPAAKRVKLDGGDKKYSIGLDIGTNSVGWAVITDEYKVPSKKFKVLGNTDRHSIKKNLIGALLFDSGETAEATRLKRTARRRYTRRKNRICYLQEIFSNEMAKVDDSFFHRLEESFLVEEDKKHERHPIFGNIVDEVAYHEKYPTIYHLRKKLVDSTDKADLRLIYLALAHMIKFRGHFLIEGDLNPDNSDVDKLFIQLVQTYNQLFEENPINASGVDAKAILSARLSKSRRLENLIAQLPGEKKNGLFGNLIALSLGLTPNFKSNFDLAEDAKLQLSKDTYDDDLDNLLAQIGDQYADLFLAAKNLSDAILLSDILRVNTEITKAPLSASMIKRYDEHHQDLTLLKALVRQQLPEKYKEIFFDQSKNGYAGYIDGGASQEEFYKFIKPILEKMDGTEELLVKLNREDLLRKQRTFDNGSIPHQIHLGELHAILRRQEDFYPFLKDNREKIEKILTFRIPYYVGPLARGNSRFAWMTRKSEETITPWNFEEVVDKGASAQSFIERMTNFDKNLPNEKVLPKHSLLYEYFTVYNELTKVKYVTEGMRKPAFLSGEQKKAIVDLLFKTNRKVTVKQLKEDYFKKIECFDSVEISGVEDRFNASLGTYHDLLKIIKDKDFLDNEENEDILEDIVLTLTLFEDREMIEERLKTYAHLFDDKVMKQLKRRRYTGWGRLSRKLINGIRDKQSGKTILDFLKSDGFANRNFMQLIHDDSLTFKEDIQKAQVSGQGDSLHEHIANLAGSPAIKKGILQTVKVVDELVKVMGRHKPENIVIEMARENQTTQKGQKNSRERMKRIEEGIKELGSQILKEHPVENTQLQNEKLYLYYLQNGRDMYVDQELDINRLSDYDVDHIVPQSFLKDDSIDNKVLTRSDKARGKSDNVPSEEVVKKMKNYWRQLLNAKLITQRKFDNLTKAERGGLSELDKAGFIKRQLVETRQITKHVAQILDSRMNTKYDENDKLIREVKVITLKSKLVSDFRKDFQFYKVREINNYHHAHDAYLNAVVGTALIKKYPKLESEFVYGDYKVYDVRKMIAKSEQEIGKATAKYFFYSNIMNFFKTEITLANGEIRKRPLIETNGETGEIVWDKGRDFATVRKVLSMPQVNIVKKTEVQTGGFSKESILPKRNSDKLIARKKDWDPKKYGGFDSPTVAYSVLVVAKVEKGKSKKLKSVKELLGITIMERSSFEKNPIDFLEAKGYKEVKKDLIIKLPKYSLFELENGRKRMLASAGELQKGNELALPSKYVNFLYLASHYEKLKGSPEDNEQKQLFVEQHKHYLDEIIEQISEFSKRVILADANLDKVLSAYNKHRDKPIREQAENIIHLFTLTNLGAPAAFKYFDTTIDRKRYTSTKEVLDATLIHQSITGLYETRIDLSQLGGDGGGGGGGGGGMDPLQLLQPLEAEIKGTKLKAHWNSGATITCVPEAFLEDERPIQTMLIKTIHGEKQQDVYYLTFKVQGRKVEAEVLASPYDYILLNPSDVPWLMKKPLQLTVLVPLHEYQERLLQQTALPKEQKELLQKLFLKYDALWQHWENQVGHRRIKPHNIATGTLAPRPQKQYPINPKAKPSIQIVIDDLLKQGVLIQQNSTMNTPVYPVPKPDGKWRMVLDYREVNKTIPLIAAQNQHSAGILSSIYRGKYKTTLDLTNGFWAHPITPESYWLTAFTWQGKQYCWTRLPQGFLNSPALFNADVVDLLKEIPNVQAYVDDIYISHDDPQEHLEQLEKIFSILLNAGYVVSLKKSEIAQREVEFLGFNITKEGRGLTDTFKQKLLNITPPKDLKQLQSILGKLNFARNFIPNYSELVKPLYTIVAPANGKFISWTEDNSNQLQHIISVLNQADNLEERNPETRLIIKVNSSPSAGYIRYYNEGSKRPIMYVNYIFSKAEAKFTQTEKLLTTMHKGLIKAMDLAMGQEILVYSPIVSMTKIQRTPLPERKALPVRWITWMTYLEDPRIQFHYDKSLPELQQIPNVTEDVIAKTKHPSEFAMVFYTDGSAIKHPDVNKSHSAGMGIAQVQFIPEYKIVHQWSIPLGDHTAQLAEIAAVEFACKKALKISGPVLIVTDSFYVAESANKELPYWKSNGFLNNKKKPLRHVSKWKSIAECLQLKPDIIIMHEKGHQQPMTTLHTEGNNLADKLATQGSYVVHAGKRTADGSEFEKRTADGSEFESPKKKAKVE

SEQ ID NO: 485 - protein, 2176 aa, synthetic construct
MPAAKRVKLDGGDKKYSIGLDIGTNSVGWAVITDEYKVPSKKFKVLGNTDRHSIKKNLIGALLFDSGETAEATRLKRTARRRYTRRKNRICYLQEIFSNEMAKVDDSFFHRLEESFLVEEDKKHERHPIFGNIVDEVAYHEKYPTIYHLRKKLVDSTDKADLRLIYLALAHMIKFRGHFLIEGDLNPDNSDVDKLFIQLVQTYNQLFEENPINASGVDAKAILSARLSKSRRLENLIAQLPGEKKNGLFGNLIALSLGLTPNFKSNFDLAEDAKLQLSKDTYDDDLDNLLAQIGDQYADLFLAAKNLSDAILLSDILRVNTEITKAPLSASMIKRYDEHHQDLTLLKALVRQQLPEKYKEIFFDQSKNGYAGYIDGGASQEEFYKFIKPILEKMDGTEELLVKLNREDLLRKQRTFDNGSIPHQIHLGELHAILRRQEDFYPFLKDNREKIEKILTFRIPYYVGPLARGNSRFAWMTRKSEETITPWNFEEVVDKGASAQSFIERMTNFDKNLPNEKVLPKHSLLYEYFTVYNELTKVKYVTEGMRKPAFLSGEQKKAIVDLLFKTNRKVTVKQLKEDYFKKIECFDSVEISGVEDRFNASLGTYHDLLKIIKDKDFLDNEENEDILEDIVLTLTLFEDREMIEERLKTYAHLFDDKVMKQLKRRRYTGWGRLSRKLINGIRDKQSGKTILDFLKSDGFANRNFMQLIHDDSLTFKEDIQKAQVSGQGDSLHEHIANLAGSPAIKKGILQTVKVVDELVKVMGRHKPENIVIEMARENQTTQKGQKNSRERMKRIEEGIKELGSQILKEHPVENTQLQNEKLYLYYLQNGRDMYVDQELDINRLSDYDVDHIVPQSFLKDDSIDNKVLTRSDKARGKSDNVPSEEVVKKMKNYWRQLLNAKLITQRKFDNLTKAERGGLSELDKAGFIKRQLVETRQITKHVAQILDSRMNTKYDENDKLIREVKVITLKSKLVSDFRKDFQFYKVREINNYHHAHDAYLNAVVGTALIKKYPKLESEFVYGDYKVYDVRKMIAKSEQEIGKATAKYFFYSNIMNFFKTEITLANGEIRKRPLIETNGETGEIVWDKGRDFATVRKVLSMPQVNIVKKTEVQTGGFSKESILPKRNSDKLIARKKDWDPKKYGGFDSPTVAYSVLVVAKVEKGKSKKLKSVKELLGITIMERSSFEKNPIDFLEAKGYKEVKKDLIIKLPKYSLFELENGRKRMLASAGELQKGNELALPSKYVNFLYLASHYEKLKGSPEDNEQKQLFVEQHKHYLDEIIEQISEFSKRVILADANLDKVLSAYNKHRDKPIREQAENIIHLFTLTNLGAPAAFKYFDTTIDRKRYTSTKEVLDATLIHQSITGLYETRIDLSQLGGDGGGSSGGGEAAAKGGMDPLQLLQPLEAEIKGTKLKAHWNSGATITCVPEAFLEDERPIQTMLIKTIHGEKQQDVYYLTFKVQGRKVEAEVLASPYDYILLNPSDVPWLMKKPLQLTVLVPLHEYQERLLQQTALPKEQKELLQKLFLKYDALWQHWENQVGHRRIKPHNIATGTLAPRPQKQYPINPKAKPSIQIVIDDLLKQGVLIQQNSTMNTPVYPVPKPDGKWRMVLDYREVNKTIPLIAAQNQHSAGILSSIYRGKYKTTLDLTNGFWAHPITPESYWLTAFTWQGKQYCWTRLPQGFLNSPALFNADVVDLLKEIPNVQAYVDDIYISHDDPQEHLEQLEKIFSILLNAGYVVSLKKSEIAQREVEFLGFNITKEGRGLTDTFKQKLLNITPPKDLKQLQSILGKLNFARNFIPNYSELVKPLYTIVAPANGKFISWTEDNSNQLQHIISVLNQADNLEERNPETRLIIKVNSSPSAGYIRYYNEGSKRPIMYVNYIFSKAEAKFTQTEKLLTTMHKGLIKAMDLAMGQEILVYSPIVSMTKIQRTPLPERKALPVRWITWMTYLEDPRIQFHYDKSLPELQQIPNVTEDVIAKTKHPSEFAMVFYTDGSAIKHPDVNKSHSAGMGIAQVQFIPEYKIVHQWSIPLGDHTAQLAEIAAVEFACKKALKISGPVLIVTDSFYVAESANKELPYWKSNGFLNNKKKPLRHVSKWKSIAECLQLKPDIIIMHEKGHQQPMTTLHTEGNNLADKLATQGSYVVHAGKRTADGSEFEKRTADGSEFESPKKKAKVE

SEQ ID NO: 486 - protein, 2176 aa, synthetic construct
MPAAKRVKLDGGDKKYSIGLDIGTNSVGWAVITDEYKVPSKKFKVLGNTDRHSIKKNLIGALLFDSGETAEATRLKRTARRRYTRRKNRICYLQEIFSNEMAKVDDSFFHRLEESFLVEEDKKHERHPIFGNIVDEVAYHEKYPTIYHLRKKLVDSTDKADLRLIYLALAHMIKFRGHFLIEGDLNPDNSDVDKLFIQLVQTYNQLFEENPINASGVDAKAILSARLSKSRRLENLIAQLPGEKKNGLFGNLIALSLGLTPNFKSNFDLAEDAKLQLSKDTYDDDLDNLLAQIGDQYADLFLAAKNLSDAILLSDILRVNTEITKAPLSASMIKRYDEHHQDLTLLKALVRQQLPEKYKEIFFDQSKNGYAGYIDGGASQEEFYKFIKPILEKMDGTEELLVKLNREDLLRKQRTFDNGSIPHQIHLGELHAILRRQEDFYPFLKDNREKIEKILTFRIPYYVGPLARGNSRFAWMTRKSEETITPWNFEEVVDKGASAQSFIERMTNFDKNLPNEKVLPKHSLLYEYFTVYNELTKVKYVTEGMRKPAFLSGEQKKAIVDLLFKTNRKVTVKQLKEDYFKKIECFDSVEISGVEDRFNASLGTYHDLLKIIKDKDFLDNEENEDILEDIVLTLTLFEDREMIEERLKTYAHLFDDKVMKQLKRRRYTGWGRLSRKLINGIRDKQSGKTILDFLKSDGFANRNFMQLIHDDSLTFKEDIQKAQVSGQGDSLHEHIANLAGSPAIKKGILQTVKVVDELVKVMGRHKPENIVIEMARENQTTQKGQKNSRERMKRIEEGIKELGSQILKEHPVENTQLQNEKLYLYYLQNGRDMYVDQELDINRLSDYDVDHIVPQSFLKDDSIDNKVLTRSDKARGKSDNVPSEEVVKKMKNYWRQLLNAKLITQRKFDNLTKAERGGLSELDKAGFIKRQLVETRQITKHVAQILDSRMNTKYDENDKLIREVKVITLKSKLVSDFRKDFQFYKVREINNYHHAHDAYLNAVVGTALIKKYPKLESEFVYGDYKVYDVRKMIAKSEQEIGKATAKYFFYSNIMNFFKTEITLANGEIRKRPLIETNGETGEIVWDKGRDFATVRKVLSMPQVNIVKKTEVQTGGFSKESILPKRNSDKLIARKKDWDPKKYGGFDSPTVAYSVLVVAKVEKGKSKKLKSVKELLGITIMERSSFEKNPIDFLEAKGYKEVKKDLIIKLPKYSLFELENGRKRMLASAGELQKGNELALPSKYVNFLYLASHYEKLKGSPEDNEQKQLFVEQHKHYLDEIIEQISEFSKRVILADANLDKVLSAYNKHRDKPIREQAENIIHLFTLTNLGAPAAFKYFDTTIDRKRYTSTKEVLDATLIHQSITGLYETRIDLSQLGGDGGPAPAPAPAPAPGGMDPLQLLQPLEAEIKGTKLKAHWNSGATITCVPEAFLEDERPIQTMLIKTIHGEKQQDVYYLTFKVQGRKVEAEVLASPYDYILLNPSDVPWLMKKPLQLTVLVPLHEYQERLLQQTALPKEQKELLQKLFLKYDALWQHWENQVGHRRIKPHNIATGTLAPRPQKQYPINPKAKPSIQIVIDDLLKQGVLIQQNSTMNTPVYPVPKPDGKWRMVLDYREVNKTIPLIAAQNQHSAGILSSIYRGKYKTTLDLTNGFWAHPITPESYWLTAFTWQGKQYCWTRLPQGFLNSPALFNADVVDLLKEIPNVQAYVDDIYISHDDPQEHLEQLEKIFSILLNAGYVVSLKKSEIAQREVEFLGFNITKEGRGLTDTFKQKLLNITPPKDLKQLQSILGKLNFARNFIPNYSELVKPLYTIVAPANGKFISWTEDNSNQLQHIISVLNQADNLEERNPETRLIIKVNSSPSAGYIRYYNEGSKRPIMYVNYIFSKAEAKFTQTEKLLTTMHKGLIKAMDLAMGQEILVYSPIVSMTKIQRTPLPERKALPVRWITWMTYLEDPRIQFHYDKSLPELQQIPNVTEDVIAKTKHPSEFAMVFYTDGSAIKHPDVNKSHSAGMGIAQVQFIPEYKIVHQWSIPLGDHTAQLAEIAAVEFACKKALKISGPVLIVTDSFYVAESANKELPYWKSNGFLNNKKKPLRHVSKWKSIAECLQLKPDIIIMHEKGHQQPMTTLHTEGNNLADKLATQGSYVVHAGKRTADGSEFEKRTADGSEFESPKKKAKVE

SEQ ID NO: 487 - protein, 2177 aa, synthetic construct
MPAAKRVKLDGGDKKYSIGLDIGTNSVGWAVITDEYKVPSKKFKVLGNTDRHSIKKNLIGALLFDSGETAEATRLKRTARRRYTRRKNRICYLQEIFSNEMAKVDDSFFHRLEESFLVEEDKKHERHPIFGNIVDEVAYHEKYPTIYHLRKKLVDSTDKADLRLIYLALAHMIKFRGHFLIEGDLNPDNSDVDKLFIQLVQTYNQLFEENPINASGVDAKAILSARLSKSRRLENLIAQLPGEKKNGLFGNLIALSLGLTPNFKSNFDLAEDAKLQLSKDTYDDDLDNLLAQIGDQYADLFLAAKNLSDAILLSDILRVNTEITKAPLSASMIKRYDEHHQDLTLLKALVRQQLPEKYKEIFFDQSKNGYAGYIDGGASQEEFYKFIKPILEKMDGTEELLVKLNREDLLRKQRTFDNGSIPHQIHLGELHAILRRQEDFYPFLKDNREKIEKILTFRIPYYVGPLARGNSRFAWMTRKSEETITPWNFEEVVDKGASAQSFIERMTNFDKNLPNEKVLPKHSLLYEYFTVYNELTKVKYVTEGMRKPAFLSGEQKKAIVDLLFKTNRKVTVKQLKEDYFKKIECFDSVEISGVEDRFNASLGTYHDLLKIIKDKDFLDNEENEDILEDIVLTLTLFEDREMIEERLKTYAHLFDDKVMKQLKRRRYTGWGRLSRKLINGIRDKQSGKTILDFLKSDGFANRNFMQLIHDDSLTFKEDIQKAQVSGQGDSLHEHIANLAGSPAIKKGILQTVKVVDELVKVMGRHKPENIVIEMARENQTTQKGQKNSRERMKRIEEGIKELGSQILKEHPVENTQLQNEKLYLYYLQNGRDMYVDQELDINRLSDYDVDHIVPQSFLKDDSIDNKVLTRSDKARGKSDNVPSEEVVKKMKNYWRQLLNAKLITQRKFDNLTKAERGGLSELDKAGFIKRQLVETRQITKHVAQILDSRMNTKYDENDKLIREVKVITLKSKLVSDFRKDFQFYKVREINNYHHAHDAYLNAVVGTALIKKYPKLESEFVYGDYKVYDVRKMIAKSEQEIGKATAKYFFYSNIMNFFKTEITLANGEIRKRPLIETNGETGEIVWDKGRDFATVRKVLSMPQVNIVKKTEVQTGGFSKESILPKRNSDKLIARKKDWDPKKYGGFDSPTVAYSVLVVAKVEKGKSKKLKSVKELLGITIMERSSFEKNPIDFLEAKGYKEVKKDLIIKLPKYSLFELENGRKRMLASAGELQKGNELALPSKYVNFLYLASHYEKLKGSPEDNEQKQLFVEQHKHYLDEIIEQISEFSKRVILADANLDKVLSAYNKHRDKPIREQAENIIHLFTLTNLGAPAAFKYFDTTIDRKRYTSTKEVLDATLIHQSITGLYETRIDLSQLGGDGGGGSGGSGGSGGSGGMDPLQLLQPLEAEIKGTKLKAHWNSGATITCVPEAFLEDERPIQTMLIKTIHGEKQQDVYYLTFKVQGRKVEAEVLASPYDYILLNPSDVPWLMKKPLQLTVLVPLHEYQERLLQQTALPKEQKELLQKLFLKYDALWQHWENQVGHRRIKPHNIATGTLAPRPQKQYPINPKAKPSIQIVIDDLLKQGVLIQQNSTMNTPVYPVPKPDGKWRMVLDYREVNKTIPLIAAQNQHSAGILSSIYRGKYKTTLDLTNGFWAHPITPESYWLTAFTWQGKQYCWTRLPQGFLNSPALFNADVVDLLKEIPNVQAYVDDIYISHDDPQEHLEQLEKIFSILLNAGYVVSLKKSEIAQREVEFLGFNITKEGRGLTDTFKQKLLNITPPKDLKQLQSILGKLNFARNFIPNYSELVKPLYTIVAPANGKFISWTEDNSNQLQHIISVLNQADNLEERNPETRLIIKVNSSPSAGYIRYYNEGSKRPIMYVNYIFSKAEAKFTQTEKLLTTMHKGLIKAMDLAMGQEILVYSPIVSMTKIQRTPLPERKALPVRWITWMTYLEDPRIQFHYDKSLPELQQIPNVTEDVIAKTKHPSEFAMVFYTDGSAIKHPDVNKSHSAGMGIAQVQFIPEYKIVHQWSIPLGDHTAQLAEIAAVEFACKKALKISGPVLIVTDSFYVAESANKELPYWKSNGFLNNKKKPLRHVSKWKSIAECLQLKPDIIIMHEKGHQQPMTTLHTEGNNLADKLATQGSYVVHAGKRTADGSEFEKRTADGSEFESPKKKAKVE

SEQ ID NO: 488 - protein, 2171 aa, synthetic construct
MPAAKRVKLDGGDKKYSIGLDIGTNSVGWAVITDEYKVPSKKFKVLGNTDRHSIKKNLIGALLFDSGETAEATRLKRTARRRYTRRKNRICYLQEIFSNEMAKVDDSFFHRLEESFLVEEDKKHERHPIFGNIVDEVAYHEKYPTIYHLRKKLVDSTDKADLRLIYLALAHMIKFRGHFLIEGDLNPDNSDVDKLFIQLVQTYNQLFEENPINASGVDAKAILSARLSKSRRLENLIAQLPGEKKNGLFGNLIALSLGLTPNFKSNFDLAEDAKLQLSKDTYDDDLDNLLAQIGDQYADLFLAAKNLSDAILLSDILRVNTEITKAPLSASMIKRYDEHHQDLTLLKALVRQQLPEKYKEIFFDQSKNGYAGYIDGGASQEEFYKFIKPILEKMDGTEELLVKLNREDLLRKQRTFDNGSIPHQIHLGELHAILRRQEDFYPFLKDNREKIEKILTFRIPYYVGPLARGNSRFAWMTRKSEETITPWNFEEVVDKGASAQSFIERMTNFDKNLPNEKVLPKHSLLYEYFTVYNELTKVKYVTEGMRKPAFLSGEQKKAIVDLLFKTNRKVTVKQLKEDYFKKIECFDSVEISGVEDRFNASLGTYHDLLKIIKDKDFLDNEENEDILEDIVLTLTLFEDREMIEERLKTYAHLFDDKVMKQLKRRRYTGWGRLSRKLINGIRDKQSGKTILDFLKSDGFANRNFMQLIHDDSLTFKEDIQKAQVSGQGDSLHEHIANLAGSPAIKKGILQTVKVVDELVKVMGRHKPENIVIEMARENQTTQKGQKNSRERMKRIEEGIKELGSQILKEHPVENTQLQNEKLYLYYLQNGRDMYVDQELDINRLSDYDVDHIVPQSFLKDDSIDNKVLTRSDKARGKSDNVPSEEVVKKMKNYWRQLLNAKLITQRKFDNLTKAERGGLSELDKAGFIKRQLVETRQITKHVAQILDSRMNTKYDENDKLIREVKVITLKSKLVSDFRKDFQFYKVREINNYHHAHDAYLNAVVGTALIKKYPKLESEFVYGDYKVYDVRKMIAKSEQEIGKATAKYFFYSNIMNFFKTEITLANGEIRKRPLIETNGETGEIVWDKGRDFATVRKVLSMPQVNIVKKTEVQTGGFSKESILPKRNSDKLIARKKDWDPKKYGGFDSPTVAYSVLVVAKVEKGKSKKLKSVKELLGITIMERSSFEKNPIDFLEAKGYKEVKKDLIIKLPKYSLFELENGRKRMLASAGELQKGNELALPSKYVNFLYLASHYEKLKGSPEDNEQKQLFVEQHKHYLDEIIEQISEFSKRVILADANLDKVLSAYNKHRDKPIREQAENIIHLFTLTNLGAPAAFKYFDTTIDRKRYTSTKEVLDATLIHQSITGLYETRIDLSQLGGDGGGGGGGSGGMDPLQLLQPLEAEIKGTKLKAHWNSGATITCVPEAFLEDERPIQTMLIKTIHGEKQQDVYYLTFKVQGRKVEAEVLASPYDYILLNPSDVPWLMKKPLQLTVLVPLHEYQERLLQQTALPKEQKELLQKLFLKYDALWQHWENQVGHRRIKPHNIATGTLAPRPQKQYPINPKAKPSIQIVIDDLLKQGVLIQQNSTMNTPVYPVPKPDGKWRMVLDYREVNKTIPLIAAQNQHSAGILSSIYRGKYKTTLDLTNGFWAHPITPESYWLTAFTWQGKQYCWTRLPQGFLNSPALFNADVVDLLKEIPNVQAYVDDIYISHDDPQEHLEQLEKIFSILLNAGYVVSLKKSEIAQREVEFLGFNITKEGRGLTDTFKQKLLNITPPKDLKQLQSILGKLNFARNFIPNYSELVKPLYTIVAPANGKFISWTEDNSNQLQHIISVLNQADNLEERNPETRLIIKVNSSPSAGYIRYYNEGSKRPIMYVNYIFSKAEAKFTQTEKLLTTMHKGLIKAMDLAMGQEILVYSPIVSMTKIQRTPLPERKALPVRWITWMTYLEDPRIQFHYDKSLPELQQIPNVTEDVIAKTKHPSEFAMVFYTDGSAIKHPDVNKSHSAGMGIAQVQFIPEYKIVHQWSIPLGDHTAQLAEIAAVEFACKKALKISGPVLIVTDSFYVAESANKELPYWKSNGFLNNKKKPLRHVSKWKSIAECLQLKPDIIIMHEKGHQQPMTTLHTEGNNLADKLATQGSYVVHAGKRTADGSEFEKRTADGSEFESPKKKAKVE

SEQ ID NO: 489 - protein, 2211 aa, synthetic construct
MPAAKRVKLDGGDKKYSIGLDIGTNSVGWAVITDEYKVPSKKFKVLGNTDRHSIKKNLIGALLFDSGETAEATRLKRTARRRYTRRKNRICYLQEIFSNEMAKVDDSFFHRLEESFLVEEDKKHERHPIFGNIVDEVAYHEKYPTIYHLRKKLVDSTDKADLRLIYLALAHMIKFRGHFLIEGDLNPDNSDVDKLFIQLVQTYNQLFEENPINASGVDAKAILSARLSKSRRLENLIAQLPGEKKNGLFGNLIALSLGLTPNFKSNFDLAEDAKLQLSKDTYDDDLDNLLAQIGDQYADLFLAAKNLSDAILLSDILRVNTEITKAPLSASMIKRYDEHHQDLTLLKALVRQQLPEKYKEIFFDQSKNGYAGYIDGGASQEEFYKFIKPILEKMDGTEELLVKLNREDLLRKQRTFDNGSIPHQIHLGELHAILRRQEDFYPFLKDNREKIEKILTFRIPYYVGPLARGNSRFAWMTRKSEETITPWNFEEVVDKGASAQSFIERMTNFDKNLPNEKVLPKHSLLYEYFTVYNELTKVKYVTEGMRKPAFLSGEQKKAIVDLLFKTNRKVTVKQLKEDYFKKIECFDSVEISGVEDRFNASLGTYHDLLKIIKDKDFLDNEENEDILEDIVLTLTLFEDREMIEERLKTYAHLFDDKVMKQLKRRRYTGWGRLSRKLINGIRDKQSGKTILDFLKSDGFANRNFMQLIHDDSLTFKEDIQKAQVSGQGDSLHEHIANLAGSPAIKKGILQTVKVVDELVKVMGRHKPENIVIEMARENQTTQKGQKNSRERMKRIEEGIKELGSQILKEHPVENTQLQNEKLYLYYLQNGRDMYVDQELDINRLSDYDVDHIVPQSFLKDDSIDNKVLTRSDKARGKSDNVPSEEVVKKMKNYWRQLLNAKLITQRKFDNLTKAERGGLSELDKAGFIKRQLVETRQITKHVAQILDSRMNTKYDENDKLIREVKVITLKSKLVSDFRKDFQFYKVREINNYHHAHDAYLNAVVGTALIKKYPKLESEFVYGDYKVYDVRKMIAKSEQEIGKATAKYFFYSNIMNFFKTEITLANGEIRKRPLIETNGETGEIVWDKGRDFATVRKVLSMPQVNIVKKTEVQTGGFSKESILPKRNSDKLIARKKDWDPKKYGGFDSPTVAYSVLVVAKVEKGKSKKLKSVKELLGITIMERSSFEKNPIDFLEAKGYKEVKKDLIIKLPKYSLFELENGRKRMLASAGELQKGNELALPSKYVNFLYLASHYEKLKGSPEDNEQKQLFVEQHKHYLDEIIEQISEFSKRVILADANLDKVLSAYNKHRDKPIREQAENIIHLFTLTNLGAPAAFKYFDTTIDRKRYTSTKEVLDATLIHQSITGLYETRIDLSQLGGDGGAEAAAKEAAAKEAAAKEAAAKALEAEAAAKEAAAKEAAAKEAAAKAGGMDPLQLLQPLEAEIKGTKLKAHWNSGATITCVPQAFLEEEVPIKNIWIKTIHGEKEQPVYYLTFKIQGRKVEAEVISSPYDYILVSPSDIPWLMKKPLQLTTLVPLQEYEERLLKQTMLTGSYKEKLQSLFLKYDALWQHWENQVGHRRIKPHHIATGTVNPRPQKQYPINPKAKASIQTVINDLLKQGVLIQQNSIMNTPVYPVPKPDGKWRMVLDYREVNKTIPLIAAQNQHSAGILSSIFRGKYKTTLDLSNGFWAHSITPESYWLTAFTWLGQQYCWTRLPQGFLNSPALFTADVVDLLKEVPNVQVYVDDIYISHDDPREHLEQLEKVFSLLLNAGYVVSLKKSEIAQHEVEFLGFNITKEGRGLTETFKQKLLNITPPRDLKQLQSILGLLNFARNFIPNFSELVKPLYNIIATANGKYITWTTDNSQQLQNIISMLNSAENLEERNPEVRLIMKVNTSPSAGYIRFYNEFAKRPIMYLNYVYTKAEVKFTNTEKLLTTIHKGLIKALDLGMGQEILVYSPIVSMTKIQKTPLPERKALPIRWITWMSYLEDPRIQFHYDKTLPELQQVPTVTDDIIAKIKHPSEFSMVFYTDGSAIKHPNVNKSHNAGMGIAQVQFKPEFTVINTWSIPLGDHTAQLAEVAAVEFACKKALKIDGPVLIVTDSFYVAESVNKELPYWQSNGFFNNKKKPLKHVSKWKSIADCIQLKPDIIIIHEKGHQPTASTFHTEGNNLADKLATQGSYVVNAGKRTADGSEFEKRTADGSEFESPKKKAKVE

SEQ ID NO: 490 - protein, 2190 aa, synthetic construct
MPAAKRVKLDGGDKKYSIGLDIGTNSVGWAVITDEYKVPSKKFKVLGNTDRHSIKKNLIGALLFDSGETAEATRLKRTARRRYTRRKNRICYLQEIFSNEMAKVDDSFFHRLEESFLVEEDKKHERHPIFGNIVDEVAYHEKYPTIYHLRKKLVDSTDKADLRLIYLALAHMIKFRGHFLIEGDLNPDNSDVDKLFIQLVQTYNQLFEENPINASGVDAKAILSARLSKSRRLENLIAQLPGEKKNGLFGNLIALSLGLTPNFKSNFDLAEDAKLQLSKDTYDDDLDNLLAQIGDQYADLFLAAKNLSDAILLSDILRVNTEITKAPLSASMIKRYDEHHQDLTLLKALVRQQLPEKYKEIFFDQSKNGYAGYIDGGASQEEFYKFIKPILEKMDGTEELLVKLNREDLLRKQRTFDNGSIPHQIHLGELHAILRRQEDFYPFLKDNREKIEKILTFRIPYYVGPLARGNSRFAWMTRKSEETITPWNFEEVVDKGASAQSFIERMTNFDKNLPNEKVLPKHSLLYEYFTVYNELTKVKYVTEGMRKPAFLSGEQKKAIVDLLFKTNRKVTVKQLKEDYFKKIECFDSVEISGVEDRFNASLGTYHDLLKIIKDKDFLDNEENEDILEDIVLTLTLFEDREMIEERLKTYAHLFDDKVMKQLKRRRYTGWGRLSRKLINGIRDKQSGKTILDFLKSDGFANRNFMQLIHDDSLTFKEDIQKAQVSGQGDSLHEHIANLAGSPAIKKGILQTVKVVDELVKVMGRHKPENIVIEMARENQTTQKGQKNSRERMKRIEEGIKELGSQILKEHPVENTQLQNEKLYLYYLQNGRDMYVDQELDINRLSDYDVDHIVPQSFLKDDSIDNKVLTRSDKARGKSDNVPSEEVVKKMKNYWRQLLNAKLITQRKFDNLTKAERGGLSELDKAGFIKRQLVETRQITKHVAQILDSRMNTKYDENDKLIREVKVITLKSKLVSDFRKDFQFYKVREINNYHHAHDAYLNAVVGTALIKKYPKLESEFVYGDYKVYDVRKMIAKSEQEIGKATAKYFFYSNIMNFFKTEITLANGEIRKRPLIETNGETGEIVWDKGRDFATVRKVLSMPQVNIVKKTEVQTGGFSKESILPKRNSDKLIARKKDWDPKKYGGFDSPTVAYSVLVVAKVEKGKSKKLKSVKELLGITIMERSSFEKNPIDFLEAKGYKEVKKDLIIKLPKYSLFELENGRKRMLASAGELQKGNELALPSKYVNFLYLASHYEKLKGSPEDNEQKQLFVEQHKHYLDEIIEQISEFSKRVILADANLDKVLSAYNKHRDKPIREQAENIIHLFTLTNLGAPAAFKYFDTTIDRKRYTSTKEVLDATLIHQSITGLYETRIDLSQLGGDGGEAAAKEAAAKEAAAKEAAAKEAAAKGGMDPLQLLQPLEAEIKGTKLKAHWNSGATITCVPQAFLEEEVPIKNIWIKTIHGEKEQPVYYLTFKIQGRKVEAEVISSPYDYILVSPSDIPWLMKKPLQLTTLVPLQEYEERLLKQTMLTGSYKEKLQSLFLKYDALWQHWENQVGHRRIKPHHIATGTVNPRPQKQYPINPKAKASIQTVINDLLKQGVLIQQNSIMNTPVYPVPKPDGKWRMVLDYREVNKTIPLIAAQNQHSAGILSSIFRGKYKTTLDLSNGFWAHSITPESYWLTAFTWLGQQYCWTRLPQGFLNSPALFTADVVDLLKEVPNVQVYVDDIYISHDDPREHLEQLEKVFSLLLNAGYVVSLKKSEIAQHEVEFLGFNITKEGRGLTETFKQKLLNITPPRDLKQLQSILGLLNFARNFIPNFSELVKPLYNIIATANGKYITWTTDNSQQLQNIISMLNSAENLEERNPEVRLIMKVNTSPSAGYIRFYNEFAKRPIMYLNYVYTKAEVKFTNTEKLLTTIHKGLIKALDLGMGQEILVYSPIVSMTKIQKTPLPERKALPIRWITWMSYLEDPRIQFHYDKTLPELQQVPTVTDDIIAKIKHPSEFSMVFYTDGSAIKHPNVNKSHNAGMGIAQVQFKPEFTVINTWSIPLGDHTAQLAEVAAVEFACKKALKIDGPVLIVTDSFYVAESVNKELPYWQSNGFFNNKKKPLKHVSKWKSIADCIQLKPDIIIIHEKGHQPTASTFHTEGNNLADKLATQGSYVVNAGKRTADGSEFEKRTADGSEFESPKKKAKVE

SEQ ID NO: 491 - protein, 2176 aa, synthetic construct
MPAAKRVKLDGGDKKYSIGLDIGTNSVGWAVITDEYKVPSKKFKVLGNTDRHSIKKNLIGALLFDSGETAEATRLKRTARRRYTRRKNRICYLQEIFSNEMAKVDDSFFHRLEESFLVEEDKKHERHPIFGNIVDEVAYHEKYPTIYHLRKKLVDSTDKADLRLIYLALAHMIKFRGHFLIEGDLNPDNSDVDKLFIQLVQTYNQLFEENPINASGVDAKAILSARLSKSRRLENLIAQLPGEKKNGLFGNLIALSLGLTPNFKSNFDLAEDAKLQLSKDTYDDDLDNLLAQIGDQYADLFLAAKNLSDAILLSDILRVNTEITKAPLSASMIKRYDEHHQDLTLLKALVRQQLPEKYKEIFFDQSKNGYAGYIDGGASQEEFYKFIKPILEKMDGTEELLVKLNREDLLRKQRTFDNGSIPHQIHLGELHAILRRQEDFYPFLKDNREKIEKILTFRIPYYVGPLARGNSRFAWMTRKSEETITPWNFEEVVDKGASAQSFIERMTNFDKNLPNEKVLPKHSLLYEYFTVYNELTKVKYVTEGMRKPAFLSGEQKKAIVDLLFKTNRKVTVKQLKEDYFKKIECFDSVEISGVEDRFNASLGTYHDLLKIIKDKDFLDNEENEDILEDIVLTLTLFEDREMIEERLKTYAHLFDDKVMKQLKRRRYTGWGRLSRKLINGIRDKQSGKTILDFLKSDGFANRNFMQLIHDDSLTFKEDIQKAQVSGQGDSLHEHIANLAGSPAIKKGILQTVKVVDELVKVMGRHKPENIVIEMARENQTTQKGQKNSRERMKRIEEGIKELGSQILKEHPVENTQLQNEKLYLYYLQNGRDMYVDQELDINRLSDYDVDHIVPQSFLKDDSIDNKVLTRSDKARGKSDNVPSEEVVKKMKNYWRQLLNAKLITQRKFDNLTKAERGGLSELDKAGFIKRQLVETRQITKHVAQILDSRMNTKYDENDKLIREVKVITLKSKLVSDFRKDFQFYKVREINNYHHAHDAYLNAVVGTALIKKYPKLESEFVYGDYKVYDVRKMIAKSEQEIGKATAKYFFYSNIMNFFKTEITLANGEIRKRPLIETNGETGEIVWDKGRDFATVRKVLSMPQVNIVKKTEVQTGGFSKESILPKRNSDKLIARKKDWDPKKYGGFDSPTVAYSVLVVAKVEKGKSKKLKSVKELLGITIMERSSFEKNPIDFLEAKGYKEVKKDLIIKLPKYSLFELENGRKRMLASAGELQKGNELALPSKYVNFLYLASHYEKLKGSPEDNEQKQLFVEQHKHYLDEIIEQISEFSKRVILADANLDKVLSAYNKHRDKPIREQAENIIHLFTLTNLGAPAAFKYFDTTIDRKRYTSTKEVLDATLIHQSITGLYETRIDLSQLGGDGGEAAAKGGGPAPGGMDPLQLLQPLEAEIKGTKLKAHWNSGATITCVPQAFLEEEVPIKNIWIKTIHGEKEQPVYYLTFKIQGRKVEAEVISSPYDYILVSPSDIPWLMKKPLQLTTLVPLQEYEERLLKQTMLTGSYKEKLQSLFLKYDALWQHWENQVGHRRIKPHHIATGTVNPRPQKQYPINPKAKASIQTVINDLLKQGVLIQQNSIMNTPVYPVPKPDGKWRMVLDYREVNKTIPLIAAQNQHSAGILSSIFRGKYKTTLDLSNGFWAHSITPESYWLTAFTWLGQQYCWTRLPQGFLNSPALFTADVVDLLKEVPNVQVYVDDIYISHDDPREHLEQLEKVFSLLLNAGYVVSLKKSEIAQHEVEFLGFNITKEGRGLTETFKQKLLNITPPRDLKQLQSILGLLNFARNFIPNFSELVKPLYNIIATANGKYITWTTDNSQQLQNIISMLNSAENLEERNPEVRLIMKVNTSPSAGYIRFYNEFAKRPIMYLNYVYTKAEVKFTNTEKLLTTIHKGLIKALDLGMGQEILVYSPIVSMTKIQKTPLPERKALPIRWITWMSYLEDPRIQFHYDKTLPELQQVPTVTDDIIAKIKHPSEFSMVFYTDGSAIKHPNVNKSHNAGMGIAQVQFKPEFTVINTWSIPLGDHTAQLAEVAAVEFACKKALKIDGPVLIVTDSFYVAESVNKELPYWQSNGFFNNKKKPLKHVSKWKSIADCIQLKPDIIIIHEKGHQPTASTFHTEGNNLADKLATQGSYVVNAGKRTADGSEFEKRTADGSEFESPKKKAKVE

SEQ ID NO: 492 - protein, 2180 aa, synthetic construct
MPAAKRVKLDGGDKKYSIGLDIGTNSVGWAVITDEYKVPSKKFKVLGNTDRHSIKKNLIGALLFDSGETAEATRLKRTARRRYTRRKNRICYLQEIFSNEMAKVDDSFFHRLEESFLVEEDKKHERHPIFGNIVDEVAYHEKYPTIYHLRKKLVDSTDKADLRLIYLALAHMIKFRGHFLIEGDLNPDNSDVDKLFIQLVQTYNQLFEENPINASGVDAKAILSARLSKSRRLENLIAQLPGEKKNGLFGNLIALSLGLTPNFKSNFDLAEDAKLQLSKDTYDDDLDNLLAQIGDQYADLFLAAKNLSDAILLSDILRVNTEITKAPLSASMIKRYDEHHQDLTLLKALVRQQLPEKYKEIFFDQSKNGYAGYIDGGASQEEFYKFIKPILEKMDGTEELLVKLNREDLLRKQRTFDNGSIPHQIHLGELHAILRRQEDFYPFLKDNREKIEKILTFRIPYYVGPLARGNSRFAWMTRKSEETITPWNFEEVVDKGASAQSFIERMTNFDKNLPNEKVLPKHSLLYEYFTVYNELTKVKYVTEGMRKPAFLSGEQKKAIVDLLFKTNRKVTVKQLKEDYFKKIECFDSVEISGVEDRFNASLGTYHDLLKIIKDKDFLDNEENEDILEDIVLTLTLFEDREMIEERLKTYAHLFDDKVMKQLKRRRYTGWGRLSRKLINGIRDKQSGKTILDFLKSDGFANRNFMQLIHDDSLTFKEDIQKAQVSGQGDSLHEHIANLAGSPAIKKGILQTVKVVDELVKVMGRHKPENIVIEMARENQTTQKGQKNSRERMKRIEEGIKELGSQILKEHPVENTQLQNEKLYLYYLQNGRDMYVDQELDINRLSDYDVDHIVPQSFLKDDSIDNKVLTRSDKARGKSDNVPSEEVVKKMKNYWRQLLNAKLITQRKFDNLTKAERGGLSELDKAGFIKRQLVETRQITKHVAQILDSRMNTKYDENDKLIREVKVITLKSKLVSDFRKDFQFYKVREINNYHHAHDAYLNAVVGTALIKKYPKLESEFVYGDYKVYDVRKMIAKSEQEIGKATAKYFFYSNIMNFFKTEITLANGEIRKRPLIETNGETGEIVWDKGRDFATVRKVLSMPQVNIVKKTEVQTGGFSKESILPKRNSDKLIARKKDWDPKKYGGFDSPTVAYSVLVVAKVEKGKSKKLKSVKELLGITIMERSSFEKNPIDFLEAKGYKEVKKDLIIKLPKYSLFELENGRKRMLASAGELQKGNELALPSKYVNFLYLASHYEKLKGSPEDNEQKQLFVEQHKHYLDEIIEQISEFSKRVILADANLDKVLSAYNKHRDKPIREQAENIIHLFTLTNLGAPAAFKYFDTTIDRKRYTSTKEVLDATLIHQSITGLYETRIDLSQLGGDGGGSSGSSGSSGSSGSSGGMDPLQLLQPLEAEIKGTKLKAHWNSGATITCVPQAFLEEEVPIKNIWIKTIHGEKEQPVYYLTFKIQGRKVEAEVISSPYDYILVSPSDIPWLMKKPLQLTTLVPLQEYEERLLKQTMLTGSYKEKLQSLFLKYDALWQHWENQVGHRRIKPHHIATGTVNPRPQKQYPINPKAKASIQTVINDLLKQGVLIQQNSIMNTPVYPVPKPDGKWRMVLDYREVNKTIPLIAAQNQHSAGILSSIFRGKYKTTLDLSNGFWAHSITPESYWLTAFTWLGQQYCWTRLPQGFLNSPALFTADVVDLLKEVPNVQVYVDDIYISHDDPREHLEQLEKVFSLLLNAGYVVSLKKSEIAQHEVEFLGFNITKEGRGLTETFKQKLLNITPPRDLKQLQSILGLLNFARNFIPNFSELVKPLYNIIATANGKYITWTTDNSQQLQNIISMLNSAENLEERNPEVRLIMKVNTSPSAGYIRFYNEFAKRPIMYLNYVYTKAEVKFTNTEKLLTTIHKGLIKALDLGMGQEILVYSPIVSMTKIQKTPLPERKALPIRWITWMSYLEDPRIQFHYDKTLPELQQVPTVTDDIIAKIKHPSEFSMVFYTDGSAIKHPNVNKSHNAGMGIAQVQFKPEFTVINTWSIPLGDHTAQLAEVAAVEFACKKALKIDGPVLIVTDSFYVAESVNKELPYWQSNGFFNNKKKPLKHVSKWKSIADCIQLKPDIIIIHEKGHQPTASTFHTEGNNLADKLATQGSYVVNAGKRTADGSEFEKRTADGSEFESPKKKAKVE

SEQ ID NO: 493 - protein, 2176 aa, synthetic construct
MPAAKRVKLDGGDKKYSIGLDIGTNSVGWAVITDEYKVPSKKFKVLGNTDRHSIKKNLIGALLFDSGETAEATRLKRTARRRYTRRKNRICYLQEIFSNEMAKVDDSFFHRLEESFLVEEDKKHERHPIFGNIVDEVAYHEKYPTIYHLRKKLVDSTDKADLRLIYLALAHMIKFRGHFLIEGDLNPDNSDVDKLFIQLVQTYNQLFEENPINASGVDAKAILSARLSKSRRLENLIAQLPGEKKNGLFGNLIALSLGLTPNFKSNFDLAEDAKLQLSKDTYDDDLDNLLAQIGDQYADLFLAAKNLSDAILLSDILRVNTEITKAPLSASMIKRYDEHHQDLTLLKALVRQQLPEKYKEIFFDQSKNGYAGYIDGGASQEEFYKFIKPILEKMDGTEELLVKLNREDLLRKQRTFDNGSIPHQIHLGELHAILRRQEDFYPFLKDNREKIEKILTFRIPYYVGPLARGNSRFAWMTRKSEETITPWNFEEVVDKGASAQSFIERMTNFDKNLPNEKVLPKHSLLYEYFTVYNELTKVKYVTEGMRKPAFLSGEQKKAIVDLLFKTNRKVTVKQLKEDYFKKIECFDSVEISGVEDRFNASLGTYHDLLKIIKDKDFLDNEENEDILEDIVLTLTLFEDREMIEERLKTYAHLFDDKVMKQLKRRRYTGWGRLSRKLINGIRDKQSGKTILDFLKSDGFANRNFMQLIHDDSLTFKEDIQKAQVSGQGDSLHEHIANLAGSPAIKKGILQTVKVVDELVKVMGRHKPENIVIEMARENQTTQKGQKNSRERMKRIEEGIKELGSQILKEHPVENTQLQNEKLYLYYLQNGRDMYVDQELDINRLSDYDVDHIVPQSFLKDDSIDNKVLTRSDKARGKSDNVPSEEVVKKMKNYWRQLLNAKLITQRKFDNLTKAERGGLSELDKAGFIKRQLVETRQITKHVAQILDSRMNTKYDENDKLIREVKVITLKSKLVSDFRKDFQFYKVREINNYHHAHDAYLNAVVGTALIKKYPKLESEFVYGDYKVYDVRKMIAKSEQEIGKATAKYFFYSNIMNFFKTEITLANGEIRKRPLIETNGETGEIVWDKGRDFATVRKVLSMPQVNIVKKTEVQTGGFSKESILPKRNSDKLIARKKDWDPKKYGGFDSPTVAYSVLVVAKVEKGKSKKLKSVKELLGITIMERSSFEKNPIDFLEAKGYKEVKKDLIIKLPKYSLFELENGRKRMLASAGELQKGNELALPSKYVNFLYLASHYEKLKGSPEDNEQKQLFVEQHKHYLDEIIEQISEFSKRVILADANLDKVLSAYNKHRDKPIREQAENIIHLFTLTNLGAPAAFKYFDTTIDRKRYTSTKEVLDATLIHQSITGLYETRIDLSQLGGDGGEAAAKGGSPAPGGMDPLQLLQPLEAEIKGTKLKAHWNSGATITCVPQAFLEEEVPIKNIWIKTIHGEKEQPVYYLTFKIQGRKVEAEVISSPYDYILVSPSDIPWLMKKPLQLTTLVPLQEYEERLLKQTMLTGSYKEKLQSLFLKYDALWQHWENQVGHRRIKPHHIATGTVNPRPQKQYPINPKAKASIQTVINDLLKQGVLIQQNSIMNTPVYPVPKPDGKWRMVLDYREVNKTIPLIAAQNQHSAGILSSIFRGKYKTTLDLSNGFWAHSITPESYWLTAFTWLGQQYCWTRLPQGFLNSPALFTADVVDLLKEVPNVQVYVDDIYISHDDPREHLEQLEKVFSLLLNAGYVVSLKKSEIAQHEVEFLGFNITKEGRGLTETFKQKLLNITPPRDLKQLQSILGLLNFARNFIPNFSELVKPLYNIIATANGKYITWTTDNSQQLQNIISMLNSAENLEERNPEVRLIMKVNTSPSAGYIRFYNEFAKRPIMYLNYVYTKAEVKFTNTEKLLTTIHKGLIKALDLGMGQEILVYSPIVSMTKIQKTPLPERKALPIRWITWMSYLEDPRIQFHYDKTLPELQQVPTVTDDIIAKIKHPSEFSMVFYTDGSAIKHPNVNKSHNAGMGIAQVQFKPEFTVINTWSIPLGDHTAQLAEVAAVEFACKKALKIDGPVLIVTDSFYVAESVNKELPYWQSNGFFNNKKKPLKHVSKWKSIADCIQLKPDIIIIHEKGHQPTASTFHTEGNNLADKLATQGSYVVNAGKRTADGSEFEKRTADGSEFESPKKKAKVE

SEQ ID NO: 494 - protein, 2181 aa, synthetic construct
MPAAKRVKLDGGDKKYSIGLDIGTNSVGWAVITDEYKVPSKKFKVLGNTDRHSIKKNLIGALLFDSGETAEATRLKRTARRRYTRRKNRICYLQEIFSNEMAKVDDSFFHRLEESFLVEEDKKHERHPIFGNIVDEVAYHEKYPTIYHLRKKLVDSTDKADLRLIYLALAHMIKFRGHFLIEGDLNPDNSDVDKLFIQLVQTYNQLFEENPINASGVDAKAILSARLSKSRRLENLIAQLPGEKKNGLFGNLIALSLGLTPNFKSNFDLAEDAKLQLSKDTYDDDLDNLLAQIGDQYADLFLAAKNLSDAILLSDILRVNTEITKAPLSASMIKRYDEHHQDLTLLKALVRQQLPEKYKEIFFDQSKNGYAGYIDGGASQEEFYKFIKPILEKMDGTEELLVKLNREDLLRKQRTFDNGSIPHQIHLGELHAILRRQEDFYPFLKDNREKIEKILTFRIPYYVGPLARGNSRFAWMTRKSEETITPWNFEEVVDKGASAQSFIERMTNFDKNLPNEKVLPKHSLLYEYFTVYNELTKVKYVTEGMRKPAFLSGEQKKAIVDLLFKTNRKVTVKQLKEDYFKKIECFDSVEISGVEDRFNASLGTYHDLLKIIKDKDFLDNEENEDILEDIVLTLTLFEDREMIEERLKTYAHLFDDKVMKQLKRRRYTGWGRLSRKLINGIRDKQSGKTILDFLKSDGFANRNFMQLIHDDSLTFKEDIQKAQVSGQGDSLHEHIANLAGSPAIKKGILQTVKVVDELVKVMGRHKPENIVIEMARENQTTQKGQKNSRERMKRIEEGIKELGSQILKEHPVENTQLQNEKLYLYYLQNGRDMYVDQELDINRLSDYDVDHIVPQSFLKDDSIDNKVLTRSDKARGKSDNVPSEEVVKKMKNYWRQLLNAKLITQRKFDNLTKAERGGLSELDKAGFIKRQLVETRQITKHVAQILDSRMNTKYDENDKLIREVKVITLKSKLVSDFRKDFQFYKVREINNYHHAHDAYLNAVVGTALIKKYPKLESEFVYGDYKVYDVRKMIAKSEQEIGKATAKYFFYSNIMNFFKTEITLANGEIRKRPLIETNGETGEIVWDKGRDFATVRKVLSMPQVNIVKKTEVQTGGFSKESILPKRNSDKLIARKKDWDPKKYGGFDSPTVAYSVLVVAKVEKGKSKKLKSVKELLGITIMERSSFEKNPIDFLEAKGYKEVKKDLIIKLPKYSLFELENGRKRMLASAGELQKGNELALPSKYVNFLYLASHYEKLKGSPEDNEQKQLFVEQHKHYLDEIIEQISEFSKRVILADANLDKVLSAYNKHRDKPIREQAENIIHLFTLTNLGAPAAFKYFDTTIDRKRYTSTKEVLDATLIHQSITGLYETRIDLSQLGGDGGSGSETPGTSESATPESGGMDPLQLLQPLEAEIKGTKLKAHWNSGATITCVPQAFLEEEVPIKNIWIKTIHGEKEQPVYYLTFKIQGRKVEAEVISSPYDYILVSPSDIPWLMKKPLQLTTLVPLQEYEERLLKQTMLTGSYKEKLQSLFLKYDALWQHWENQVGHRRIKPHHIATGTVNPRPQKQYPINPKAKASIQTVINDLLKQGVLIQQNSIMNTPVYPVPKPDGKWRMVLDYREVNKTIPLIAAQNQHSAGILSSIFRGKYKTTLDLSNGFWAHSITPESYWLTAFTWLGQQYCWTRLPQGFLNSPALFTADVVDLLKEVPNVQVYVDDIYISHDDPREHLEQLEKVFSLLLNAGYVVSLKKSEIAQHEVEFLGFNITKEGRGLTETFKQKLLNITPPRDLKQLQSILGLLNFARNFIPNFSELVKPLYNIIATANGKYITWTTDNSQQLQNIISMLNSAENLEERNPEVRLIMKVNTSPSAGYIRFYNEFAKRPIMYLNYVYTKAEVKFTNTEKLLTTIHKGLIKALDLGMGQEILVYSPIVSMTKIQKTPLPERKALPIRWITWMSYLEDPRIQFHYDKTLPELQQVPTVTDDIIAKIKHPSEFSMVFYTDGSAIKHPNVNKSHNAGMGIAQVQFKPEFTVINTWSIPLGDHTAQLAEVAAVEFACKKALKIDGPVLIVTDSFYVAESVNKELPYWQSNGFFNNKKKPLKHVSKWKSIADCIQLKPDIIIIHEKGHQPTASTFHTEGNNLADKLATQGSYVVNAGKRTADGSEFEKRTADGSEFESPKKKAKVE

SEQ ID NO: 495 - protein, 2176 aa, synthetic construct
MPAAKRVKLDGGDKKYSIGLDIGTNSVGWAVITDEYKVPSKKFKVLGNTDRHSIKKNLIGALLFDSGETAEATRLKRTARRRYTRRKNRICYLQEIFSNEMAKVDDSFFHRLEESFLVEEDKKHERHPIFGNIVDEVAYHEKYPTIYHLRKKLVDSTDKADLRLIYLALAHMIKFRGHFLIEGDLNPDNSDVDKLFIQLVQTYNQLFEENPINASGVDAKAILSARLSKSRRLENLIAQLPGEKKNGLFGNLIALSLGLTPNFKSNFDLAEDAKLQLSKDTYDDDLDNLLAQIGDQYADLFLAAKNLSDAILLSDILRVNTEITKAPLSASMIKRYDEHHQDLTLLKALVRQQLPEKYKEIFFDQSKNGYAGYIDGGASQEEFYKFIKPILEKMDGTEELLVKLNREDLLRKQRTFDNGSIPHQIHLGELHAILRRQEDFYPFLKDNREKIEKILTFRIPYYVGPLARGNSRFAWMTRKSEETITPWNFEEVVDKGASAQSFIERMTNFDKNLPNEKVLPKHSLLYEYFTVYNELTKVKYVTEGMRKPAFLSGEQKKAIVDLLFKTNRKVTVKQLKEDYFKKIECFDSVEISGVEDRFNASLGTYHDLLKIIKDKDFLDNEENEDILEDIVLTLTLFEDREMIEERLKTYAHLFDDKVMKQLKRRRYTGWGRLSRKLINGIRDKQSGKTILDFLKSDGFANRNFMQLIHDDSLTFKEDIQKAQVSGQGDSLHEHIANLAGSPAIKKGILQTVKVVDELVKVMGRHKPENIVIEMARENQTTQKGQKNSRERMKRIEEGIKELGSQILKEHPVENTQLQNEKLYLYYLQNGRDMYVDQELDINRLSDYDVDHIVPQSFLKDDSIDNKVLTRSDKARGKSDNVPSEEVVKKMKNYWRQLLNAKLITQRKFDNLTKAERGGLSELDKAGFIKRQLVETRQITKHVAQILDSRMNTKYDENDKLIREVKVITLKSKLVSDFRKDFQFYKVREINNYHHAHDAYLNAVVGTALIKKYPKLESEFVYGDYKVYDVRKMIAKSEQEIGKATAKYFFYSNIMNFFKTEITLANGEIRKRPLIETNGETGEIVWDKGRDFATVRKVLSMPQVNIVKKTEVQTGGFSKESILPKRNSDKLIARKKDWDPKKYGGFDSPTVAYSVLVVAKVEKGKSKKLKSVKELLGITIMERSSFEKNPIDFLEAKGYKEVKKDLIIKLPKYSLFELENGRKRMLASAGELQKGNELALPSKYVNFLYLASHYEKLKGSPEDNEQKQLFVEQHKHYLDEIIEQISEFSKRVILADANLDKVLSAYNKHRDKPIREQAENIIHLFTLTNLGAPAAFKYFDTTIDRKRYTSTKEVLDATLIHQSITGLYETRIDLSQLGGDGGEAAAKPAPGSSGGMDPLQLLQPLEAEIKGTKLKAHWNSGATITCVPQAFLEEEVPIKNIWIKTIHGEKEQPVYYLTFKIQGRKVEAEVISSPYDYILVSPSDIPWLMKKPLQLTTLVPLQEYEERLLKQTMLTGSYKEKLQSLFLKYDALWQHWENQVGHRRIKPHHIATGTVNPRPQKQYPINPKAKASIQTVINDLLKQGVLIQQNSIMNTPVYPVPKPDGKWRMVLDYREVNKTIPLIAAQNQHSAGILSSIFRGKYKTTLDLSNGFWAHSITPESYWLTAFTWLGQQYCWTRLPQGFLNSPALFTADVVDLLKEVPNVQVYVDDIYISHDDPREHLEQLEKVFSLLLNAGYVVSLKKSEIAQHEVEFLGFNITKEGRGLTETFKQKLLNITPPRDLKQLQSILGLLNFARNFIPNFSELVKPLYNIIATANGKYITWTTDNSQQLQNIISMLNSAENLEERNPEVRLIMKVNTSPSAGYIRFYNEFAKRPIMYLNYVYTKAEVKFTNTEKLLTTIHKGLIKALDLGMGQEILVYSPIVSMTKIQKTPLPERKALPIRWITWMSYLEDPRIQFHYDKTLPELQQVPTVTDDIIAKIKHPSEFSMVFYTDGSAIKHPNVNKSHNAGMGIAQVQFKPEFTVINTWSIPLGDHTAQLAEVAAVEFACKKALKIDGPVLIVTDSFYVAESVNKELPYWQSNGFFNNKKKPLKHVSKWKSIADCIQLKPDIIIIHEKGHQPTASTFHTEGNNLADKLATQGSYVVNAGKRTADGSEFEKRTADGSEFESPKKKAKVE

SEQ ID NO: 496 - protein, 2176 aa, synthetic construct
MPAAKRVKLDGGDKKYSIGLDIGTNSVGWAVITDEYKVPSKKFKVLGNTDRHSIKKNLIGALLFDSGETAEATRLKRTARRRYTRRKNRICYLQEIFSNEMAKVDDSFFHRLEESFLVEEDKKHERHPIFGNIVDEVAYHEKYPTIYHLRKKLVDSTDKADLRLIYLALAHMIKFRGHFLIEGDLNPDNSDVDKLFIQLVQTYNQLFEENPINASGVDAKAILSARLSKSRRLENLIAQLPGEKKNGLFGNLIALSLGLTPNFKSNFDLAEDAKLQLSKDTYDDDLDNLLAQIGDQYADLFLAAKNLSDAILLSDILRVNTEITKAPLSASMIKRYDEHHQDLTLLKALVRQQLPEKYKEIFFDQSKNGYAGYIDGGASQEEFYKFIKPILEKMDGTEELLVKLNREDLLRKQRTFDNGSIPHQIHLGELHAILRRQEDFYPFLKDNREKIEKILTFRIPYYVGPLARGNSRFAWMTRKSEETITPWNFEEVVDKGASAQSFIERMTNFDKNLPNEKVLPKHSLLYEYFTVYNELTKVKYVTEGMRKPAFLSGEQKKAIVDLLFKTNRKVTVKQLKEDYFKKIECFDSVEISGVEDRFNASLGTYHDLLKIIKDKDFLDNEENEDILEDIVLTLTLFEDREMIEERLKTYAHLFDDKVMKQLKRRRYTGWGRLSRKLINGIRDKQSGKTILDFLKSDGFANRNFMQLIHDDSLTFKEDIQKAQVSGQGDSLHEHIANLAGSPAIKKGILQTVKVVDELVKVMGRHKPENIVIEMARENQTTQKGQKNSRERMKRIEEGIKELGSQILKEHPVENTQLQNEKLYLYYLQNGRDMYVDQELDINRLSDYDVDHIVPQSFLKDDSIDNKVLTRSDKARGKSDNVPSEEVVKKMKNYWRQLLNAKLITQRKFDNLTKAERGGLSELDKAGFIKRQLVETRQITKHVAQILDSRMNTKYDENDKLIREVKVITLKSKLVSDFRKDFQFYKVREINNYHHAHDAYLNAVVGTALIKKYPKLESEFVYGDYKVYDVRKMIAKSEQEIGKATAKYFFYSNIMNFFKTEITLANGEIRKRPLIETNGETGEIVWDKGRDFATVRKVLSMPQVNIVKKTEVQTGGFSKESILPKRNSDKLIARKKDWDPKKYGGFDSPTVAYSVLVVAKVEKGKSKKLKSVKELLGITIMERSSFEKNPIDFLEAKGYKEVKKDLIIKLPKYSLFELENGRKRMLASAGELQKGNELALPSKYVNFLYLASHYEKLKGSPEDNEQKQLFVEQHKHYLDEIIEQISEFSKRVILADANLDKVLSAYNKHRDKPIREQAENIIHLFTLTNLGAPAAFKYFDTTIDRKRYTSTKEVLDATLIHQSITGLYETRIDLSQLGGDGGEAAAKGSSPAPGGMDPLQLLQPLEAEIKGTKLKAHWNSGATITCVPQAFLEEEVPIKNIWIKTIHGEKEQPVYYLTFKIQGRKVEAEVISSPYDYILVSPSDIPWLMKKPLQLTTLVPLQEYEERLLKQTMLTGSYKEKLQSLFLKYDALWQHWENQVGHRRIKPHHIATGTVNPRPQKQYPINPKAKASIQTVINDLLKQGVLIQQNSIMNTPVYPVPKPDGKWRMVLDYREVNKTIPLIAAQNQHSAGILSSIFRGKYKTTLDLSNGFWAHSITPESYWLTAFTWLGQQYCWTRLPQGFLNSPALFTADVVDLLKEVPNVQVYVDDIYISHDDPREHLEQLEKVFSLLLNAGYVVSLKKSEIAQHEVEFLGFNITKEGRGLTETFKQKLLNITPPRDLKQLQSILGLLNFARNFIPNFSELVKPLYNIIATANGKYITWTTDNSQQLQNIISMLNSAENLEERNPEVRLIMKVNTSPSAGYIRFYNEFAKRPIMYLNYVYTKAEVKFTNTEKLLTTIHKGLIKALDLGMGQEILVYSPIVSMTKIQKTPLPERKALPIRWITWMSYLEDPRIQFHYDKTLPELQQVPTVTDDIIAKIKHPSEFSMVFYTDGSAIKHPNVNKSHNAGMGIAQVQFKPEFTVINTWSIPLGDHTAQLAEVAAVEFACKKALKIDGPVLIVTDSFYVAESVNKELPYWQSNGFFNNKKKPLKHVSKWKSIADCIQLKPDIIIIHEKGHQPTASTFHTEGNNLADKLATQGSYVVNAGKRTADGSEFEKRTADGSEFESPKKKAKVE

SEQ ID NO: 497 - protein, 2176 aa, synthetic construct
MPAAKRVKLDGGDKKYSIGLDIGTNSVGWAVITDEYKVPSKKFKVLGNTDRHSIKKNLIGALLFDSGETAEATRLKRTARRRYTRRKNRICYLQEIFSNEMAKVDDSFFHRLEESFLVEEDKKHERHPIFGNIVDEVAYHEKYPTIYHLRKKLVDSTDKADLRLIYLALAHMIKFRGHFLIEGDLNPDNSDVDKLFIQLVQTYNQLFEENPINASGVDAKAILSARLSKSRRLENLIAQLPGEKKNGLFGNLIALSLGLTPNFKSNFDLAEDAKLQLSKDTYDDDLDNLLAQIGDQYADLFLAAKNLSDAILLSDILRVNTEITKAPLSASMIKRYDEHHQDLTLLKALVRQQLPEKYKEIFFDQSKNGYAGYIDGGASQEEFYKFIKPILEKMDGTEELLVKLNREDLLRKQRTFDNGSIPHQIHLGELHAILRRQEDFYPFLKDNREKIEKILTFRIPYYVGPLARGNSRFAWMTRKSEETITPWNFEEVVDKGASAQSFIERMTNFDKNLPNEKVLPKHSLLYEYFTVYNELTKVKYVTEGMRKPAFLSGEQKKAIVDLLFKTNRKVTVKQLKEDYFKKIECFDSVEISGVEDRFNASLGTYHDLLKIIKDKDFLDNEENEDILEDIVLTLTLFEDREMIEERLKTYAHLFDDKVMKQLKRRRYTGWGRLSRKLINGIRDKQSGKTILDFLKSDGFANRNFMQLIHDDSLTFKEDIQKAQVSGQGDSLHEHIANLAGSPAIKKGILQTVKVVDELVKVMGRHKPENIVIEMARENQTTQKGQKNSRERMKRIEEGIKELGSQILKEHPVENTQLQNEKLYLYYLQNGRDMYVDQELDINRLSDYDVDHIVPQSFLKDDSIDNKVLTRSDKARGKSDNVPSEEVVKKMKNYWRQLLNAKLITQRKFDNLTKAERGGLSELDKAGFIKRQLVETRQITKHVAQILDSRMNTKYDENDKLIREVKVITLKSKLVSDFRKDFQFYKVREINNYHHAHDAYLNAVVGTALIKKYPKLESEFVYGDYKVYDVRKMIAKSEQEIGKATAKYFFYSNIMNFFKTEITLANGEIRKRPLIETNGETGEIVWDKGRDFATVRKVLSMPQVNIVKKTEVQTGGFSKESILPKRNSDKLIARKKDWDPKKYGGFDSPTVAYSVLVVAKVEKGKSKKLKSVKELLGITIMERSSFEKNPIDFLEAKGYKEVKKDLIIKLPKYSLFELENGRKRMLASAGELQKGNELALPSKYVNFLYLASHYEKLKGSPEDNEQKQLFVEQHKHYLDEIIEQISEFSKRVILADANLDKVLSAYNKHRDKPIREQAENIIHLFTLTNLGAPAAFKYFDTTIDRKRYTSTKEVLDATLIHQSITGLYETRIDLSQLGGDGGPAPGGGEAAAKGGMDPLQLLQPLEAEIKGTKLKAHWNSGATITCVPQAFLEEEVPIKNIWIKTIHGEKEQPVYYLTFKIQGRKVEAEVISSPYDYILVSPSDIPWLMKKPLQLTTLVPLQEYEERLLKQTMLTGSYKEKLQSLFLKYDALWQHWENQVGHRRIKPHHIATGTVNPRPQKQYPINPKAKASIQTVINDLLKQGVLIQQNSIMNTPVYPVPKPDGKWRMVLDYREVNKTIPLIAAQNQHSAGILSSIFRGKYKTTLDLSNGFWAHSITPESYWLTAFTWLGQQYCWTRLPQGFLNSPALFTADVVDLLKEVPNVQVYVDDIYISHDDPREHLEQLEKVFSLLLNAGYVVSLKKSEIAQHEVEFLGFNITKEGRGLTETFKQKLLNITPPRDLKQLQSILGLLNFARNFIPNFSELVKPLYNIIATANGKYITWTTDNSQQLQNIISMLNSAENLEERNPEVRLIMKVNTSPSAGYIRFYNEFAKRPIMYLNYVYTKAEVKFTNTEKLLTTIHKGLIKALDLGMGQEILVYSPIVSMTKIQKTPLPERKALPIRWITWMSYLEDPRIQFHYDKTLPELQQVPTVTDDIIAKIKHPSEFSMVFYTDGSAIKHPNVNKSHNAGMGIAQVQFKPEFTVINTWSIPLGDHTAQLAEVAAVEFACKKALKIDGPVLIVTDSFYVAESVNKELPYWQSNGFFNNKKKPLKHVSKWKSIADCIQLKPDIIIIHEKGHQPTASTFHTEGNNLADKLATQGSYVVNAGKRTADGSEFEKRTADGSEFESPKKKAKVE

SEQ ID NO: 498 - protein, 2180 aa, synthetic construct
MPAAKRVKLDGGDKKYSIGLDIGTNSVGWAVITDEYKVPSKKFKVLGNTDRHSIKKNLIGALLFDSGETAEATRLKRTARRRYTRRKNRICYLQEIFSNEMAKVDDSFFHRLEESFLVEEDKKHERHPIFGNIVDEVAYHEKYPTIYHLRKKLVDSTDKADLRLIYLALAHMIKFRGHFLIEGDLNPDNSDVDKLFIQLVQTYNQLFEENPINASGVDAKAILSARLSKSRRLENLIAQLPGEKKNGLFGNLIALSLGLTPNFKSNFDLAEDAKLQLSKDTYDDDLDNLLAQIGDQYADLFLAAKNLSDAILLSDILRVNTEITKAPLSASMIKRYDEHHQDLTLLKALVRQQLPEKYKEIFFDQSKNGYAGYIDGGASQEEFYKFIKPILEKMDGTEELLVKLNREDLLRKQRTFDNGSIPHQIHLGELHAILRRQEDFYPFLKDNREKIEKILTFRIPYYVGPLARGNSRFAWMTRKSEETITPWNFEEVVDKGASAQSFIERMTNFDKNLPNEKVLPKHSLLYEYFTVYNELTKVKYVTEGMRKPAFLSGEQKKAIVDLLFKTNRKVTVKQLKEDYFKKIECFDSVEISGVEDRFNASLGTYHDLLKIIKDKDFLDNEENEDILEDIVLTLTLFEDREMIEERLKTYAHLFDDKVMKQLKRRRYTGWGRLSRKLINGIRDKQSGKTILDFLKSDGFANRNFMQLIHDDSLTFKEDIQKAQVSGQGDSLHEHIANLAGSPAIKKGILQTVKVVDELVKVMGRHKPENIVIEMARENQTTQKGQKNSRERMKRIEEGIKELGSQILKEHPVENTQLQNEKLYLYYLQNGRDMYVDQELDINRLSDYDVDHIVPQSFLKDDSIDNKVLTRSDKARGKSDNVPSEEVVKKMKNYWRQLLNAKLITQRKFDNLTKAERGGLSELDKAGFIKRQLVETRQITKHVAQILDSRMNTKYDENDKLIREVKVITLKSKLVSDFRKDFQFYKVREINNYHHAHDAYLNAVVGTALIKKYPKLESEFVYGDYKVYDVRKMIAKSEQEIGKATAKYFFYSNIMNFFKTEITLANGEIRKRPLIETNGETGEIVWDKGRDFATVRKVLSMPQVNIVKKTEVQTGGFSKESILPKRNSDKLIARKKDWDPKKYGGFDSPTVAYSVLVVAKVEKGKSKKLKSVKELLGITIMERSSFEKNPIDFLEAKGYKEVKKDLIIKLPKYSLFELENGRKRMLASAGELQKGNELALPSKYVNFLYLASHYEKLKGSPEDNEQKQLFVEQHKHYLDEIIEQISEFSKRVILADANLDKVLSAYNKHRDKPIREQAENIIHLFTLTNLGAPAAFKYFDTTIDRKRYTSTKEVLDATLIHQSITGLYETRIDLSQLGGDGGEAAAKEAAAKEAAAKGGMDPLQLLQPLEAEIKGTKLKAHWNSGATITCVPQAFLEEEVPIKNIWIKTIHGEKEQPVYYLTFKIQGRKVEAEVISSPYDYILVSPSDIPWLMKKPLQLTTLVPLQEYEERLLKQTMLTGSYKEKLQSLFLKYDALWQHWENQVGHRRIKPHHIATGTVNPRPQKQYPINPKAKASIQTVINDLLKQGVLIQQNSIMNTPVYPVPKPDGKWRMVLDYREVNKTIPLIAAQNQHSAGILSSIFRGKYKTTLDLSNGFWAHSITPESYWLTAFTWLGQQYCWTRLPQGFLNSPALFTADVVDLLKEVPNVQVYVDDIYISHDDPREHLEQLEKVFSLLLNAGYVVSLKKSEIAQHEVEFLGFNITKEGRGLTETFKQKLLNITPPRDLKQLQSILGLLNFARNFIPNFSELVKPLYNIIATANGKYITWTTDNSQQLQNIISMLNSAENLEERNPEVRLIMKVNTSPSAGYIRFYNEFAKRPIMYLNYVYTKAEVKFTNTEKLLTTIHKGLIKALDLGMGQEILVYSPIVSMTKIQKTPLPERKALPIRWITWMSYLEDPRIQFHYDKTLPELQQVPTVTDDIIAKIKHPSEFSMVFYTDGSAIKHPNVNKSHNAGMGIAQVQFKPEFTVINTWSIPLGDHTAQLAEVAAVEFACKKALKIDGPVLIVTDSFYVAESVNKELPYWQSNGFFNNKKKPLKHVSKWKSIADCIQLKPDIIIIHEKGHQPTASTFHTEGNNLADKLATQGSYVVNAGKRTADGSEFEKRTADGSEFESPKKKAKVE

SEQ ID NO: 499 - protein, 2176 aa, synthetic construct
MPAAKRVKLDGGDKKYSIGLDIGTNSVGWAVITDEYKVPSKKFKVLGNTDRHSIKKNLIGALLFDSGETAEATRLKRTARRRYTRRKNRICYLQEIFSNEMAKVDDSFFHRLEESFLVEEDKKHERHPIFGNIVDEVAYHEKYPTIYHLRKKLVDSTDKADLRLIYLALAHMIKFRGHFLIEGDLNPDNSDVDKLFIQLVQTYNQLFEENPINASGVDAKAILSARLSKSRRLENLIAQLPGEKKNGLFGNLIALSLGLTPNFKSNFDLAEDAKLQLSKDTYDDDLDNLLAQIGDQYADLFLAAKNLSDAILLSDILRVNTEITKAPLSASMIKRYDEHHQDLTLLKALVRQQLPEKYKEIFFDQSKNGYAGYIDGGASQEEFYKFIKPILEKMDGTEELLVKLNREDLLRKQRTFDNGSIPHQIHLGELHAILRRQEDFYPFLKDNREKIEKILTFRIPYYVGPLARGNSRFAWMTRKSEETITPWNFEEVVDKGASAQSFIERMTNFDKNLPNEKVLPKHSLLYEYFTVYNELTKVKYVTEGMRKPAFLSGEQKKAIVDLLFKTNRKVTVKQLKEDYFKKIECFDSVEISGVEDRFNASLGTYHDLLKIIKDKDFLDNEENEDILEDIVLTLTLFEDREMIEERLKTYAHLFDDKVMKQLKRRRYTGWGRLSRKLINGIRDKQSGKTILDFLKSDGFANRNFMQLIHDDSLTFKEDIQKAQVSGQGDSLHEHIANLAGSPAIKKGILQTVKVVDELVKVMGRHKPENIVIEMARENQTTQKGQKNSRERMKRIEEGIKELGSQILKEHPVENTQLQNEKLYLYYLQNGRDMYVDQELDINRLSDYDVDHIVPQSFLKDDSIDNKVLTRSDKARGKSDNVPSEEVVKKMKNYWRQLLNAKLITQRKFDNLTKAERGGLSELDKAGFIKRQLVETRQITKHVAQILDSRMNTKYDENDKLIREVKVITLKSKLVSDFRKDFQFYKVREINNYHHAHDAYLNAVVGTALIKKYPKLESEFVYGDYKVYDVRKMIAKSEQEIGKATAKYFFYSNIMNFFKTEITLANGEIRKRPLIETNGETGEIVWDKGRDFATVRKVLSMPQVNIVKKTEVQTGGFSKESILPKRNSDKLIARKKDWDPKKYGGFDSPTVAYSVLVVAKVEKGKSKKLKSVKELLGITIMERSSFEKNPIDFLEAKGYKEVKKDLIIKLPKYSLFELENGRKRMLASAGELQKGNELALPSKYVNFLYLASHYEKLKGSPEDNEQKQLFVEQHKHYLDEIIEQISEFSKRVILADANLDKVLSAYNKHRDKPIREQAENIIHLFTLTNLGAPAAFKYFDTTIDRKRYTSTKEVLDATLIHQSITGLYETRIDLSQLGGDGGEAAAKPAPGGSGGMDPLQLLQPLEAEIKGTKLKAHWNSGATITCVPQAFLEEEVPIKNIWIKTIHGEKEQPVYYLTFKIQGRKVEAEVISSPYDYILVSPSDIPWLMKKPLQLTTLVPLQEYEERLLKQTMLTGSYKEKLQSLFLKYDALWQHWENQVGHRRIKPHHIATGTVNPRPQKQYPINPKAKASIQTVINDLLKQGVLIQQNSIMNTPVYPVPKPDGKWRMVLDYREVNKTIPLIAAQNQHSAGILSSIFRGKYKTTLDLSNGFWAHSITPESYWLTAFTWLGQQYCWTRLPQGFLNSPALFTADVVDLLKEVPNVQVYVDDIYISHDDPREHLEQLEKVFSLLLNAGYVVSLKKSEIAQHEVEFLGFNITKEGRGLTETFKQKLLNITPPRDLKQLQSILGLLNFARNFIPNFSELVKPLYNIIATANGKYITWTTDNSQQLQNIISMLNSAENLEERNPEVRLIMKVNTSPSAGYIRFYNEFAKRPIMYLNYVYTKAEVKFTNTEKLLTTIHKGLIKALDLGMGQEILVYSPIVSMTKIQKTPLPERKALPIRWITWMSYLEDPRIQFHYDKTLPELQQVPTVTDDIIAKIKHPSEFSMVFYTDGSAIKHPNVNKSHNAGMGIAQVQFKPEFTVINTWSIPLGDHTAQLAEVAAVEFACKKALKIDGPVLIVTDSFYVAESVNKELPYWQSNGFFNNKKKPLKHVSKWKSIADCIQLKPDIIIIHEKGHQPTASTFHTEGNNLADKLATQGSYVVNAGKRTADGSEFEKRTADGSEFESPKKKAKVE

SEQ ID NO: 500 - protein, 2178 aa, synthetic construct
MPAAKRVKLDGGDKKYSIGLDIGTNSVGWAVITDEYKVPSKKFKVLGNTDRHSIKKNLIGALLFDSGETAEATRLKRTARRRYTRRKNRICYLQEIFSNEMAKVDDSFFHRLEESFLVEEDKKHERHPIFGNIVDEVAYHEKYPTIYHLRKKLVDSTDKADLRLIYLALAHMIKFRGHFLIEGDLNPDNSDVDKLFIQLVQTYNQLFEENPINASGVDAKAILSARLSKSRRLENLIAQLPGEKKNGLFGNLIALSLGLTPNFKSNFDLAEDAKLQLSKDTYDDDLDNLLAQIGDQYADLFLAAKNLSDAILLSDILRVNTEITKAPLSASMIKRYDEHHQDLTLLKALVRQQLPEKYKEIFFDQSKNGYAGYIDGGASQEEFYKFIKPILEKMDGTEELLVKLNREDLLRKQRTFDNGSIPHQIHLGELHAILRRQEDFYPFLKDNREKIEKILTFRIPYYVGPLARGNSRFAWMTRKSEETITPWNFEEVVDKGASAQSFIERMTNFDKNLPNEKVLPKHSLLYEYFTVYNELTKVKYVTEGMRKPAFLSGEQKKAIVDLLFKTNRKVTVKQLKEDYFKKIECFDSVEISGVEDRFNASLGTYHDLLKIIKDKDFLDNEENEDILEDIVLTLTLFEDREMIEERLKTYAHLFDDKVMKQLKRRRYTGWGRLSRKLINGIRDKQSGKTILDFLKSDGFANRNFMQLIHDDSLTFKEDIQKAQVSGQGDSLHEHIANLAGSPAIKKGILQTVKVVDELVKVMGRHKPENIVIEMARENQTTQKGQKNSRERMKRIEEGIKELGSQILKEHPVENTQLQNEKLYLYYLQNGRDMYVDQELDINRLSDYDVDHIVPQSFLKDDSIDNKVLTRSDKARGKSDNVPSEEVVKKMKNYWRQLLNAKLITQRKFDNLTKAERGGLSELDKAGFIKRQLVETRQITKHVAQILDSRMNTKYDENDKLIREVKVITLKSKLVSDFRKDFQFYKVREINNYHHAHDAYLNAVVGTALIKKYPKLESEFVYGDYKVYDVRKMIAKSEQEIGKATAKYFFYSNIMNFFKTEITLANGEIRKRPLIETNGETGEIVWDKGRDFATVRKVLSMPQVNIVKKTEVQTGGFSKESILPKRNSDKLIARKKDWDPKKYGGFDSPTVAYSVLVVAKVEKGKSKKLKSVKELLGITIMERSSFEKNPIDFLEAKGYKEVKKDLIIKLPKYSLFELENGRKRMLASAGELQKGNELALPSKYVNFLYLASHYEKLKGSPEDNEQKQLFVEQHKHYLDEIIEQISEFSKRVILADANLDKVLSAYNKHRDKPIREQAENIIHLFTLTNLGAPAAFKYFDTTIDRKRYTSTKEVLDATLIHQSITGLYETRIDLSQLGGDGGPAPAPAPAPAPAPGGMDPLQLLQPLEAEIKGTKLKAHWNSGATITCVPQAFLEEEVPIKNIWIKTIHGEKEQPVYYLTFKIQGRKVEAEVISSPYDYILVSPSDIPWLMKKPLQLTTLVPLQEYEERLLKQTMLTGSYKEKLQSLFLKYDALWQHWENQVGHRRIKPHHIATGTVNPRPQKQYPINPKAKASIQTVINDLLKQGVLIQQNSIMNTPVYPVPKPDGKWRMVLDYREVNKTIPLIAAQNQHSAGILSSIFRGKYKTTLDLSNGFWAHSITPESYWLTAFTWLGQQYCWTRLPQGFLNSPALFTADVVDLLKEVPNVQVYVDDIYISHDDPREHLEQLEKVFSLLLNAGYVVSLKKSEIAQHEVEFLGFNITKEGRGLTETFKQKLLNITPPRDLKQLQSILGLLNFARNFIPNFSELVKPLYNIIATANGKYITWTTDNSQQLQNIISMLNSAENLEERNPEVRLIMKVNTSPSAGYIRFYNEFAKRPIMYLNYVYTKAEVKFTNTEKLLTTIHKGLIKALDLGMGQEILVYSPIVSMTKIQKTPLPERKALPIRWITWMSYLEDPRIQFHYDKTLPELQQVPTVTDDIIAKIKHPSEFSMVFYTDGSAIKHPNVNKSHNAGMGIAQVQFKPEFTVINTWSIPLGDHTAQLAEVAAVEFACKKALKIDGPVLIVTDSFYVAESVNKELPYWQSNGFFNNKKKPLKHVSKWKSIADCIQLKPDIIIIHEKGHQPTASTFHTEGNNLADKLATQGSYVVNAGKRTADGSEFEKRTADGSEFESPKKKAKVE

SEQ ID NO: 501 - protein, 2176 aa, synthetic construct
MPAAKRVKLDGGDKKYSIGLDIGTNSVGWAVITDEYKVPSKKFKVLGNTDRHSIKKNLIGALLFDSGETAEATRLKRTARRRYTRRKNRICYLQEIFSNEMAKVDDSFFHRLEESFLVEEDKKHERHPIFGNIVDEVAYHEKYPTIYHLRKKLVDSTDKADLRLIYLALAHMIKFRGHFLIEGDLNPDNSDVDKLFIQLVQTYNQLFEENPINASGVDAKAILSARLSKSRRLENLIAQLPGEKKNGLFGNLIALSLGLTPNFKSNFDLAEDAKLQLSKDTYDDDLDNLLAQIGDQYADLFLAAKNLSDAILLSDILRVNTEITKAPLSASMIKRYDEHHQDLTLLKALVRQQLPEKYKEIFFDQSKNGYAGYIDGGASQEEFYKFIKPILEKMDGTEELLVKLNREDLLRKQRTFDNGSIPHQIHLGELHAILRRQEDFYPFLKDNREKIEKILTFRIPYYVGPLARGNSRFAWMTRKSEETITPWNFEEVVDKGASAQSFIERMTNFDKNLPNEKVLPKHSLLYEYFTVYNELTKVKYVTEGMRKPAFLSGEQKKAIVDLLFKTNRKVTVKQLKEDYFKKIECFDSVEISGVEDRFNASLGTYHDLLKIIKDKDFLDNEENEDILEDIVLTLTLFEDREMIEERLKTYAHLFDDKVMKQLKRRRYTGWGRLSRKLINGIRDKQSGKTILDFLKSDGFANRNFMQLIHDDSLTFKEDIQKAQVSGQGDSLHEHIANLAGSPAIKKGILQTVKVVDELVKVMGRHKPENIVIEMARENQTTQKGQKNSRERMKRIEEGIKELGSQILKEHPVENTQLQNEKLYLYYLQNGRDMYVDQELDINRLSDYDVDHIVPQSFLKDDSIDNKVLTRSDKARGKSDNVPSEEVVKKMKNYWRQLLNAKLITQRKFDNLTKAERGGLSELDKAGFIKRQLVETRQITKHVAQILDSRMNTKYDENDKLIREVKVITLKSKLVSDFRKDFQFYKVREINNYHHAHDAYLNAVVGTALIKKYPKLESEFVYGDYKVYDVRKMIAKSEQEIGKATAKYFFYSNIMNFFKTEITLANGEIRKRPLIETNGETGEIVWDKGRDFATVRKVLSMPQVNIVKKTEVQTGGFSKESILPKRNSDKLIARKKDWDPKKYGGFDSPTVAYSVLVVAKVEKGKSKKLKSVKELLGITIMERSSFEKNPIDFLEAKGYKEVKKDLIIKLPKYSLFELENGRKRMLASAGELQKGNELALPSKYVNFLYLASHYEKLKGSPEDNEQKQLFVEQHKHYLDEIIEQISEFSKRVILADANLDKVLSAYNKHRDKPIREQAENIIHLFTLTNLGAPAAFKYFDTTIDRKRYTSTKEVLDATLIHQSITGLYETRIDLSQLGGDGGGGGEAAAKGGSGGMDPLQLLQPLEAEIKGTKLKAHWNSGATITCVPQAFLEEEVPIKNIWIKTIHGEKEQPVYYLTFKIQGRKVEAEVISSPYDYILVSPSDIPWLMKKPLQLTTLVPLQEYEERLLKQTMLTGSYKEKLQSLFLKYDALWQHWENQVGHRRIKPHHIATGTVNPRPQKQYPINPKAKASIQTVINDLLKQGVLIQQNSIMNTPVYPVPKPDGKWRMVLDYREVNKTIPLIAAQNQHSAGILSSIFRGKYKTTLDLSNGFWAHSITPESYWLTAFTWLGQQYCWTRLPQGFLNSPALFTADVVDLLKEVPNVQVYVDDIYISHDDPREHLEQLEKVFSLLLNAGYVVSLKKSEIAQHEVEFLGFNITKEGRGLTETFKQKLLNITPPRDLKQLQSILGLLNFARNFIPNFSELVKPLYNIIATANGKYITWTTDNSQQLQNIISMLNSAENLEERNPEVRLIMKVNTSPSAGYIRFYNEFAKRPIMYLNYVYTKAEVKFTNTEKLLTTIHKGLIKALDLGMGQEILVYSPIVSMTKIQKTPLPERKALPIRWITWMSYLEDPRIQFHYDKTLPELQQVPTVTDDIIAKIKHPSEFSMVFYTDGSAIKHPNVNKSHNAGMGIAQVQFKPEFTVINTWSIPLGDHTAQLAEVAAVEFACKKALKIDGPVLIVTDSFYVAESVNKELPYWQSNGFFNNKKKPLKHVSKWKSIADCIQLKPDIIIIHEKGHQPTASTFHTEGNNLADKLATQGSYVVNAGKRTADGSEFEKRTADGSEFESPKKKAKVE

SEQ ID NO: 502 - protein, 2176 aa, synthetic construct
MPAAKRVKLDGGDKKYSIGLDIGTNSVGWAVITDEYKVPSKKFKVLGNTDRHSIKKNLIGALLFDSGETAEATRLKRTARRRYTRRKNRICYLQEIFSNEMAKVDDSFFHRLEESFLVEEDKKHERHPIFGNIVDEVAYHEKYPTIYHLRKKLVDSTDKADLRLIYLALAHMIKFRGHFLIEGDLNPDNSDVDKLFIQLVQTYNQLFEENPINASGVDAKAILSARLSKSRRLENLIAQLPGEKKNGLFGNLIALSLGLTPNFKSNFDLAEDAKLQLSKDTYDDDLDNLLAQIGDQYADLFLAAKNLSDAILLSDILRVNTEITKAPLSASMIKRYDEHHQDLTLLKALVRQQLPEKYKEIFFDQSKNGYAGYIDGGASQEEFYKFIKPILEKMDGTEELLVKLNREDLLRKQRTFDNGSIPHQIHLGELHAILRRQEDFYPFLKDNREKIEKILTFRIPYYVGPLARGNSRFAWMTRKSEETITPWNFEEVVDKGASAQSFIERMTNFDKNLPNEKVLPKHSLLYEYFTVYNELTKVKYVTEGMRKPAFLSGEQKKAIVDLLFKTNRKVTVKQLKEDYFKKIECFDSVEISGVEDRFNASLGTYHDLLKIIKDKDFLDNEENEDILEDIVLTLTLFEDREMIEERLKTYAHLFDDKVMKQLKRRRYTGWGRLSRKLINGIRDKQSGKTILDFLKSDGFANRNFMQLIHDDSLTFKEDIQKAQVSGQGDSLHEHIANLAGSPAIKKGILQTVKVVDELVKVMGRHKPENIVIEMARENQTTQKGQKNSRERMKRIEEGIKELGSQILKEHPVENTQLQNEKLYLYYLQNGRDMYVDQELDINRLSDYDVDHIVPQSFLKDDSIDNKVLTRSDKARGKSDNVPSEEVVKKMKNYWRQLLNAKLITQRKFDNLTKAERGGLSELDKAGFIKRQLVETRQITKHVAQILDSRMNTKYDENDKLIREVKVITLKSKLVSDFRKDFQFYKVREINNYHHAHDAYLNAVVGTALIKKYPKLESEFVYGDYKVYDVRKMIAKSEQEIGKATAKYFFYSNIMNFFKTEITLANGEIRKRPLIETNGETGEIVWDKGRDFATVRKVLSMPQVNIVKKTEVQTGGFSKESILPKRNSDKLIARKKDWDPKKYGGFDSPTVAYSVLVVAKVEKGKSKKLKSVKELLGITIMERSSFEKNPIDFLEAKGYKEVKKDLIIKLPKYSLFELENGRKRMLASAGELQKGNELALPSKYVNFLYLASHYEKLKGSPEDNEQKQLFVEQHKHYLDEIIEQISEFSKRVILADANLDKVLSAYNKHRDKPIREQAENIIHLFTLTNLGAPAAFKYFDTTIDRKRYTSTKEVLDATLIHQSITGLYETRIDLSQLGGDGGGGSPAPEAAAKGGMDPLQLLQPLEAEIKGTKLKAHWNSGATITCVPQAFLEEEVPIKNIWIKTIHGEKEQPVYYLTFKIQGRKVEAEVISSPYDYILVSPSDIPWLMKKPLQLTTLVPLQEYEERLLKQTMLTGSYKEKLQSLFLKYDALWQHWENQVGHRRIKPHHIATGTVNPRPQKQYPINPKAKASIQTVINDLLKQGVLIQQNSIMNTPVYPVPKPDGKWRMVLDYREVNKTIPLIAAQNQHSAGILSSIFRGKYKTTLDLSNGFWAHSITPESYWLTAFTWLGQQYCWTRLPQGFLNSPALFTADVVDLLKEVPNVQVYVDDIYISHDDPREHLEQLEKVFSLLLNAGYVVSLKKSEIAQHEVEFLGFNITKEGRGLTETFKQKLLNITPPRDLKQLQSILGLLNFARNFIPNFSELVKPLYNIIATANGKYITWTTDNSQQLQNIISMLNSAENLEERNPEVRLIMKVNTSPSAGYIRFYNEFAKRPIMYLNYVYTKAEVKFTNTEKLLTTIHKGLIKALDLGMGQEILVYSPIVSMTKIQKTPLPERKALPIRWITWMSYLEDPRIQFHYDKTLPELQQVPTVTDDIIAKIKHPSEFSMVFYTDGSAIKHPNVNKSHNAGMGIAQVQFKPEFTVINTWSIPLGDHTAQLAEVAAVEFACKKALKIDGPVLIVTDSFYVAESVNKELPYWQSNGFFNNKKKPLKHVSKWKSIADCIQLKPDIIIIHEKGHQPTASTFHTEGNNLADKLATQGSYVVNAGKRTADGSEFEKRTADGSEFESPKKKAKVE

SEQ ID NO: 503 - protein, 2174 aa, synthetic construct
MPAAKRVKLDGGDKKYSIGLDIGTNSVGWAVITDEYKVPSKKFKVLGNTDRHSIKKNLIGALLFDSGETAEATRLKRTARRRYTRRKNRICYLQEIFSNEMAKVDDSFFHRLEESFLVEEDKKHERHPIFGNIVDEVAYHEKYPTIYHLRKKLVDSTDKADLRLIYLALAHMIKFRGHFLIEGDLNPDNSDVDKLFIQLVQTYNQLFEENPINASGVDAKAILSARLSKSRRLENLIAQLPGEKKNGLFGNLIALSLGLTPNFKSNFDLAEDAKLQLSKDTYDDDLDNLLAQIGDQYADLFLAAKNLSDAILLSDILRVNTEITKAPLSASMIKRYDEHHQDLTLLKALVRQQLPEKYKEIFFDQSKNGYAGYIDGGASQEEFYKFIKPILEKMDGTEELLVKLNREDLLRKQRTFDNGSIPHQIHLGELHAILRRQEDFYPFLKDNREKIEKILTFRIPYYVGPLARGNSRFAWMTRKSEETITPWNFEEVVDKGASAQSFIERMTNFDKNLPNEKVLPKHSLLYEYFTVYNELTKVKYVTEGMRKPAFLSGEQKKAIVDLLFKTNRKVTVKQLKEDYFKKIECFDSVEISGVEDRFNASLGTYHDLLKIIKDKDFLDNEENEDILEDIVLTLTLFEDREMIEERLKTYAHLFDDKVMKQLKRRRYTGWGRLSRKLINGIRDKQSGKTILDFLKSDGFANRNFMQLIHDDSLTFKEDIQKAQVSGQGDSLHEHIANLAGSPAIKKGILQTVKVVDELVKVMGRHKPENIVIEMARENQTTQKGQKNSRERMKRIEEGIKELGSQILKEHPVENTQLQNEKLYLYYLQNGRDMYVDQELDINRLSDYDVDHIVPQSFLKDDSIDNKVLTRSDKARGKSDNVPSEEVVKKMKNYWRQLLNAKLITQRKFDNLTKAERGGLSELDKAGFIKRQLVETRQITKHVAQILDSRMNTKYDENDKLIREVKVITLKSKLVSDFRKDFQFYKVREINNYHHAHDAYLNAVVGTALIKKYPKLESEFVYGDYKVYDVRKMIAKSEQEIGKATAKYFFYSNIMNFFKTEITLANGEIRKRPLIETNGETGEIVWDKGRDFATVRKVLSMPQVNIVKKTEVQTGGFSKESILPKRNSDKLIARKKDWDPKKYGGFDSPTVAYSVLVVAKVEKGKSKKLKSVKELLGITIMERSSFEKNPIDFLEAKGYKEVKKDLIIKLPKYSLFELENGRKRMLASAGELQKGNELALPSKYVNFLYLASHYEKLKGSPEDNEQKQLFVEQHKHYLDEIIEQISEFSKRVILADANLDKVLSAYNKHRDKPIREQAENIIHLFTLTNLGAPAAFKYFDTTIDRKRYTSTKEVLDATLIHQSITGLYETRIDLSQLGGDGGPAPAPAPAPGGMDPLQLLQPLEAEIKGTKLKAHWNSGATITCVPQAFLEEEVPIKNIWIKTIHGEKEQPVYYLTFKIQGRKVEAEVISSPYDYILVSPSDIPWLMKKPLQLTTLVPLQEYEERLLKQTMLTGSYKEKLQSLFLKYDALWQHWENQVGHRRIKPHHIATGTVNPRPQKQYPINPKAKASIQTVINDLLKQGVLIQQNSIMNTPVYPVPKPDGKWRMVLDYREVNKTIPLIAAQNQHSAGILSSIFRGKYKTTLDLSNGFWAHSITPESYWLTAFTWLGQQYCWTRLPQGFLNSPALFTADVVDLLKEVPNVQVYVDDIYISHDDPREHLEQLEKVFSLLLNAGYVVSLKKSEIAQHEVEFLGFNITKEGRGLTETFKQKLLNITPPRDLKQLQSILGLLNFARNFIPNFSELVKPLYNIIATANGKYITWTTDNSQQLQNIISMLNSAENLEERNPEVRLIMKVNTSPSAGYIRFYNEFAKRPIMYLNYVYTKAEVKFTNTEKLLTTIHKGLIKALDLGMGQEILVYSPIVSMTKIQKTPLPERKALPIRWITWMSYLEDPRIQFHYDKTLPELQQVPTVTDDIIAKIKHPSEFSMVFYTDGSAIKHPNVNKSHNAGMGIAQVQFKPEFTVINTWSIPLGDHTAQLAEVAAVEFACKKALKIDGPVLIVTDSFYVAESVNKELPYWQSNGFFNNKKKPLKHVSKWKSIADCIQLKPDIIIIHEKGHQPTASTFHTEGNNLADKLATQGSYVVNAGKRTADGSEFEKRTADGSEFESPKKKAKVE

SEQ ID NO: 504 - protein, 2176 aa, synthetic construct
MPAAKRVKLDGGDKKYSIGLDIGTNSVGWAVITDEYKVPSKKFKVLGNTDRHSIKKNLIGALLFDSGETAEATRLKRTARRRYTRRKNRICYLQEIFSNEMAKVDDSFFHRLEESFLVEEDKKHERHPIFGNIVDEVAYHEKYPTIYHLRKKLVDSTDKADLRLIYLALAHMIKFRGHFLIEGDLNPDNSDVDKLFIQLVQTYNQLFEENPINASGVDAKAILSARLSKSRRLENLIAQLPGEKKNGLFGNLIALSLGLTPNFKSNFDLAEDAKLQLSKDTYDDDLDNLLAQIGDQYADLFLAAKNLSDAILLSDILRVNTEITKAPLSASMIKRYDEHHQDLTLLKALVRQQLPEKYKEIFFDQSKNGYAGYIDGGASQEEFYKFIKPILEKMDGTEELLVKLNREDLLRKQRTFDNGSIPHQIHLGELHAILRRQEDFYPFLKDNREKIEKILTFRIPYYVGPLARGNSRFAWMTRKSEETITPWNFEEVVDKGASAQSFIERMTNFDKNLPNEKVLPKHSLLYEYFTVYNELTKVKYVTEGMRKPAFLSGEQKKAIVDLLFKTNRKVTVKQLKEDYFKKIECFDSVEISGVEDRFNASLGTYHDLLKIIKDKDFLDNEENEDILEDIVLTLTLFEDREMIEERLKTYAHLFDDKVMKQLKRRRYTGWGRLSRKLINGIRDKQSGKTILDFLKSDGFANRNFMQLIHDDSLTFKEDIQKAQVSGQGDSLHEHIANLAGSPAIKKGILQTVKVVDELVKVMGRHKPENIVIEMARENQTTQKGQKNSRERMKRIEEGIKELGSQILKEHPVENTQLQNEKLYLYYLQNGRDMYVDQELDINRLSDYDVDHIVPQSFLKDDSIDNKVLTRSDKARGKSDNVPSEEVVKKMKNYWRQLLNAKLITQRKFDNLTKAERGGLSELDKAGFIKRQLVETRQITKHVAQILDSRMNTKYDENDKLIREVKVITLKSKLVSDFRKDFQFYKVREINNYHHAHDAYLNAVVGTALIKKYPKLESEFVYGDYKVYDVRKMIAKSEQEIGKATAKYFFYSNIMNFFKTEITLANGEIRKRPLIETNGETGEIVWDKGRDFATVRKVLSMPQVNIVKKTEVQTGGFSKESILPKRNSDKLIARKKDWDPKKYGGFDSPTVAYSVLVVAKVEKGKSKKLKSVKELLGITIMERSSFEKNPIDFLEAKGYKEVKKDLIIKLPKYSLFELENGRKRMLASAGELQKGNELALPSKYVNFLYLASHYEKLKGSPEDNEQKQLFVEQHKHYLDEIIEQISEFSKRVILADANLDKVLSAYNKHRDKPIREQAENIIHLFTLTNLGAPAAFKYFDTTIDRKRYTSTKEVLDATLIHQSITGLYETRIDLSQLGGDGGGGGEAAAKGSSGGMDPLQLLQPLEAEIKGTKLKAHWNSGATITCVPQAFLEEEVPIKNIWIKTIHGEKEQPVYYLTFKIQGRKVEAEVISSPYDYILVSPSDIPWLMKKPLQLTTLVPLQEYEERLLKQTMLTGSYKEKLQSLFLKYDALWQHWENQVGHRRIKPHHIATGTVNPRPQKQYPINPKAKASIQTVINDLLKQGVLIQQNSIMNTPVYPVPKPDGKWRMVLDYREVNKTIPLIAAQNQHSAGILSSIFRGKYKTTLDLSNGFWAHSITPESYWLTAFTWLGQQYCWTRLPQGFLNSPALFTADVVDLLKEVPNVQVYVDDIYISHDDPREHLEQLEKVFSLLLNAGYVVSLKKSEIAQHEVEFLGFNITKEGRGLTETFKQKLLNITPPRDLKQLQSILGLLNFARNFIPNFSELVKPLYNIIATANGKYITWTTDNSQQLQNIISMLNSAENLEERNPEVRLIMKVNTSPSAGYIRFYNEFAKRPIMYLNYVYTKAEVKFTNTEKLLTTIHKGLIKALDLGMGQEILVYSPIVSMTKIQKTPLPERKALPIRWITWMSYLEDPRIQFHYDKTLPELQQVPTVTDDIIAKIKHPSEFSMVFYTDGSAIKHPNVNKSHNAGMGIAQVQFKPEFTVINTWSIPLGDHTAQLAEVAAVEFACKKALKIDGPVLIVTDSFYVAESVNKELPYWQSNGFFNNKKKPLKHVSKWKSIADCIQLKPDIIIIHEKGHQPTASTFHTEGNNLADKLATQGSYVVNAGKRTADGSEFEKRTADGSEFESPKKKAKVE

SEQ ID NO: 505 - protein, 2176 aa, synthetic construct
MPAAKRVKLDGGDKKYSIGLDIGTNSVGWAVITDEYKVPSKKFKVLGNTDRHSIKKNLIGALLFDSGETAEATRLKRTARRRYTRRKNRICYLQEIFSNEMAKVDDSFFHRLEESFLVEEDKKHERHPIFGNIVDEVAYHEKYPTIYHLRKKLVDSTDKADLRLIYLALAHMIKFRGHFLIEGDLNPDNSDVDKLFIQLVQTYNQLFEENPINASGVDAKAILSARLSKSRRLENLIAQLPGEKKNGLFGNLIALSLGLTPNFKSNFDLAEDAKLQLSKDTYDDDLDNLLAQIGDQYADLFLAAKNLSDAILLSDILRVNTEITKAPLSASMIKRYDEHHQDLTLLKALVRQQLPEKYKEIFFDQSKNGYAGYIDGGASQEEFYKFIKPILEKMDGTEELLVKLNREDLLRKQRTFDNGSIPHQIHLGELHAILRRQEDFYPFLKDNREKIEKILTFRIPYYVGPLARGNSRFAWMTRKSEETITPWNFEEVVDKGASAQSFIERMTNFDKNLPNEKVLPKHSLLYEYFTVYNELTKVKYVTEGMRKPAFLSGEQKKAIVDLLFKTNRKVTVKQLKEDYFKKIECFDSVEISGVEDRFNASLGTYHDLLKIIKDKDFLDNEENEDILEDIVLTLTLFEDREMIEERLKTYAHLFDDKVMKQLKRRRYTGWGRLSRKLINGIRDKQSGKTILDFLKSDGFANRNFMQLIHDDSLTFKEDIQKAQVSGQGDSLHEHIANLAGSPAIKKGILQTVKVVDELVKVMGRHKPENIVIEMARENQTTQKGQKNSRERMKRIEEGIKELGSQILKEHPVENTQLQNEKLYLYYLQNGRDMYVDQELDINRLSDYDVDHIVPQSFLKDDSIDNKVLTRSDKARGKSDNVPSEEVVKKMKNYWRQLLNAKLITQRKFDNLTKAERGGLSELDKAGFIKRQLVETRQITKHVAQILDSRMNTKYDENDKLIREVKVITLKSKLVSDFRKDFQFYKVREINNYHHAHDAYLNAVVGTALIKKYPKLESEFVYGDYKVYDVRKMIAKSEQEIGKATAKYFFYSNIMNFFKTEITLANGEIRKRPLIETNGETGEIVWDKGRDFATVRKVLSMPQVNIVKKTEVQTGGFSKESILPKRNSDKLIARKKDWDPKKYGGFDSPTVAYSVLVVAKVEKGKSKKLKSVKELLGITIMERSSFEKNPIDFLEAKGYKEVKKDLIIKLPKYSLFELENGRKRMLASAGELQKGNELALPSKYVNFLYLASHYEKLKGSPEDNEQKQLFVEQHKHYLDEIIEQISEFSKRVILADANLDKVLSAYNKHRDKPIREQAENIIHLFTLTNLGAPAAFKYFDTTIDRKRYTSTKEVLDATLIHQSITGLYETRIDLSQLGGDGGEAAAKGGSGSSGGMDPLQLLQPLEAEIKGTKLKAHWNSGATITCVPQAFLEEEVPIKNIWIKTIHGEKEQPVYYLTFKIQGRKVEAEVISSPYDYILVSPSDIPWLMKKPLQLTTLVPLQEYEERLLKQTMLTGSYKEKLQSLFLKYDALWQHWENQVGHRRIKPHHIATGTVNPRPQKQYPINPKAKASIQTVINDLLKQGVLIQQNSIMNTPVYPVPKPDGKWRMVLDYREVNKTIPLIAAQNQHSAGILSSIFRGKYKTTLDLSNGFWAHSITPESYWLTAFTWLGQQYCWTRLPQGFLNSPALFTADVVDLLKEVPNVQVYVDDIYISHDDPREHLEQLEKVFSLLLNAGYVVSLKKSEIAQHEVEFLGFNITKEGRGLTETFKQKLLNITPPRDLKQLQSILGLLNFARNFIPNFSELVKPLYNIIATANGKYITWTTDNSQQLQNIISMLNSAENLEERNPEVRLIMKVNTSPSAGYIRFYNEFAKRPIMYLNYVYTKAEVKFTNTEKLLTTIHKGLIKALDLGMGQEILVYSPIVSMTKIQKTPLPERKALPIRWITWMSYLEDPRIQFHYDKTLPELQQVPTVTDDIIAKIKHPSEFSMVFYTDGSAIKHPNVNKSHNAGMGIAQVQFKPEFTVINTWSIPLGDHTAQLAEVAAVEFACKKALKIDGPVLIVTDSFYVAESVNKELPYWQSNGFFNNKKKPLKHVSKWKSIADCIQLKPDIIIIHEKGHQPTASTFHTEGNNLADKLATQGSYVVNAGKRTADGSEFEKRTADGSEFESPKKKAKVE

SEQ ID NO: 506 - protein, 2176 aa, synthetic construct
MPAAKRVKLDGGDKKYSIGLDIGTNSVGWAVITDEYKVPSKKFKVLGNTDRHSIKKNLIGALLFDSGETAEATRLKRTARRRYTRRKNRICYLQEIFSNEMAKVDDSFFHRLEESFLVEEDKKHERHPIFGNIVDEVAYHEKYPTIYHLRKKLVDSTDKADLRLIYLALAHMIKFRGHFLIEGDLNPDNSDVDKLFIQLVQTYNQLFEENPINASGVDAKAILSARLSKSRRLENLIAQLPGEKKNGLFGNLIALSLGLTPNFKSNFDLAEDAKLQLSKDTYDDDLDNLLAQIGDQYADLFLAAKNLSDAILLSDILRVNTEITKAPLSASMIKRYDEHHQDLTLLKALVRQQLPEKYKEIFFDQSKNGYAGYIDGGASQEEFYKFIKPILEKMDGTEELLVKLNREDLLRKQRTFDNGSIPHQIHLGELHAILRRQEDFYPFLKDNREKIEKILTFRIPYYVGPLARGNSRFAWMTRKSEETITPWNFEEVVDKGASAQSFIERMTNFDKNLPNEKVLPKHSLLYEYFTVYNELTKVKYVTEGMRKPAFLSGEQKKAIVDLLFKTNRKVTVKQLKEDYFKKIECFDSVEISGVEDRFNASLGTYHDLLKIIKDKDFLDNEENEDILEDIVLTLTLFEDREMIEERLKTYAHLFDDKVMKQLKRRRYTGWGRLSRKLINGIRDKQSGKTILDFLKSDGFANRNFMQLIHDDSLTFKEDIQKAQVSGQGDSLHEHIANLAGSPAIKKGILQTVKVVDELVKVMGRHKPENIVIEMARENQTTQKGQKNSRERMKRIEEGIKELGSQILKEHPVENTQLQNEKLYLYYLQNGRDMYVDQELDINRLSDYDVDHIVPQSFLKDDSIDNKVLTRSDKARGKSDNVPSEEVVKKMKNYWRQLLNAKLITQRKFDNLTKAERGGLSELDKAGFIKRQLVETRQITKHVAQILDSRMNTKYDENDKLIREVKVITLKSKLVSDFRKDFQFYKVREINNYHHAHDAYLNAVVGTALIKKYPKLESEFVYGDYKVYDVRKMIAKSEQEIGKATAKYFFYSNIMNFFKTEITLANGEIRKRPLIETNGETGEIVWDKGRDFATVRKVLSMPQVNIVKKTEVQTGGFSKESILPKRNSDKLIARKKDWDPKKYGGFDSPTVAYSVLVVAKVEKGKSKKLKSVKELLGITIMERSSFEKNPIDFLEAKGYKEVKKDLIIKLPKYSLFELENGRKRMLASAGELQKGNELALPSKYVNFLYLASHYEKLKGSPEDNEQKQLFVEQHKHYLDEIIEQISEFSKRVILADANLDKVLSAYNKHRDKPIREQAENIIHLFTLTNLGAPAAFKYFDTTIDRKRYTSTKEVLDATLIHQSITGLYETRIDLSQLGGDGGGSSEAAAKPAPGGMDPLQLLQPLEAEIKGTKLKAHWNSGATITCVPQAFLEEEVPIKNIWIKTIHGEKEQPVYYLTFKIQGRKVEAEVISSPYDYILVSPSDIPWLMKKPLQLTTLVPLQEYEERLLKQTMLTGSYKEKLQSLFLKYDALWQHWENQVGHRRIKPHHIATGTVNPRPQKQYPINPKAKASIQTVINDLLKQGVLIQQNSIMNTPVYPVPKPDGKWRMVLDYREVNKTIPLIAAQNQHSAGILSSIFRGKYKTTLDLSNGFWAHSITPESYWLTAFTWLGQQYCWTRLPQGFLNSPALFTADVVDLLKEVPNVQVYVDDIYISHDDPREHLEQLEKVFSLLLNAGYVVSLKKSEIAQHEVEFLGFNITKEGRGLTETFKQKLLNITPPRDLKQLQSILGLLNFARNFIPNFSELVKPLYNIIATANGKYITWTTDNSQQLQNIISMLNSAENLEERNPEVRLIMKVNTSPSAGYIRFYNEFAKRPIMYLNYVYTKAEVKFTNTEKLLTTIHKGLIKALDLGMGQEILVYSPIVSMTKIQKTPLPERKALPIRWITWMSYLEDPRIQFHYDKTLPELQQVPTVTDDIIAKIKHPSEFSMVFYTDGSAIKHPNVNKSHNAGMGIAQVQFKPEFTVINTWSIPLGDHTAQLAEVAAVEFACKKALKIDGPVLIVTDSFYVAESVNKELPYWQSNGFFNNKKKPLKHVSKWKSIADCIQLKPDIIIIHEKGHQPTASTFHTEGNNLADKLATQGSYVVNAGKRTADGSEFEKRTADGSEFESPKKKAKVE

SEQ ID NO: 507 - protein, 2176 aa, synthetic construct
MPAAKRVKLDGGDKKYSIGLDIGTNSVGWAVITDEYKVPSKKFKVLGNTDRHSIKKNLIGALLFDSGETAEATRLKRTARRRYTRRKNRICYLQEIFSNEMAKVDDSFFHRLEESFLVEEDKKHERHPIFGNIVDEVAYHEKYPTIYHLRKKLVDSTDKADLRLIYLALAHMIKFRGHFLIEGDLNPDNSDVDKLFIQLVQTYNQLFEENPINASGVDAKAILSARLSKSRRLENLIAQLPGEKKNGLFGNLIALSLGLTPNFKSNFDLAEDAKLQLSKDTYDDDLDNLLAQIGDQYADLFLAAKNLSDAILLSDILRVNTEITKAPLSASMIKRYDEHHQDLTLLKALVRQQLPEKYKEIFFDQSKNGYAGYIDGGASQEEFYKFIKPILEKMDGTEELLVKLNREDLLRKQRTFDNGSIPHQIHLGELHAILRRQEDFYPFLKDNREKIEKILTFRIPYYVGPLARGNSRFAWMTRKSEETITPWNFEEVVDKGASAQSFIERMTNFDKNLPNEKVLPKHSLLYEYFTVYNELTKVKYVTEGMRKPAFLSGEQKKAIVDLLFKTNRKVTVKQLKEDYFKKIECFDSVEISGVEDRFNASLGTYHDLLKIIKDKDFLDNEENEDILEDIVLTLTLFEDREMIEERLKTYAHLFDDKVMKQLKRRRYTGWGRLSRKLINGIRDKQSGKTILDFLKSDGFANRNFMQLIHDDSLTFKEDIQKAQVSGQGDSLHEHIANLAGSPAIKKGILQTVKVVDELVKVMGRHKPENIVIEMARENQTTQKGQKNSRERMKRIEEGIKELGSQILKEHPVENTQLQNEKLYLYYLQNGRDMYVDQELDINRLSDYDVDHIVPQSFLKDDSIDNKVLTRSDKARGKSDNVPSEEVVKKMKNYWRQLLNAKLITQRKFDNLTKAERGGLSELDKAGFIKRQLVETRQITKHVAQILDSRMNTKYDENDKLIREVKVITLKSKLVSDFRKDFQFYKVREINNYHHAHDAYLNAVVGTALIKKYPKLESEFVYGDYKVYDVRKMIAKSEQEIGKATAKYFFYSNIMNFFKTEITLANGEIRKRPLIETNGETGEIVWDKGRDFATVRKVLSMPQVNIVKKTEVQTGGFSKESILPKRNSDKLIARKKDWDPKKYGGFDSPTVAYSVLVVAKVEKGKSKKLKSVKELLGITIMERSSFEKNPIDFLEAKGYKEVKKDLIIKLPKYSLFELENGRKRMLASAGELQKGNELALPSKYVNFLYLASHYEKLKGSPEDNEQKQLFVEQHKHYLDEIIEQISEFSKRVILADANLDKVLSAYNKHRDKPIREQAENIIHLFTLTNLGAPAAFKYFDTTIDRKRYTSTKEVLDATLIHQSITGLYETRIDLSQLGGDGGGGGPAPEAAAKGGMDPLQLLQPLEAEIKGTKLKAHWNSGATITCVPQAFLEEEVPIKNIWIKTIHGEKEQPVYYLTFKIQGRKVEAEVISSPYDYILVSPSDIPWLMKKPLQLTTLVPLQEYEERLLKQTMLTGSYKEKLQSLFLKYDALWQHWENQVGHRRIKPHHIATGTVNPRPQKQYPINPKAKASIQTVINDLLKQGVLIQQNSIMNTPVYPVPKPDGKWRMVLDYREVNKTIPLIAAQNQHSAGILSSIFRGKYKTTLDLSNGFWAHSITPESYWLTAFTWLGQQYCWTRLPQGFLNSPALFTADVVDLLKEVPNVQVYVDDIYISHDDPREHLEQLEKVFSLLLNAGYVVSLKKSEIAQHEVEFLGFNITKEGRGLTETFKQKLLNITPPRDLKQLQSILGLLNFARNFIPNFSELVKPLYNIIATANGKYITWTTDNSQQLQNIISMLNSAENLEERNPEVRLIMKVNTSPSAGYIRFYNEFAKRPIMYLNYVYTKAEVKFTNTEKLLTTIHKGLIKALDLGMGQEILVYSPIVSMTKIQKTPLPERKALPIRWITWMSYLEDPRIQFHYDKTLPELQQVPTVTDDIIAKIKHPSEFSMVFYTDGSAIKHPNVNKSHNAGMGIAQVQFKPEFTVINTWSIPLGDHTAQLAEVAAVEFACKKALKIDGPVLIVTDSFYVAESVNKELPYWQSNGFFNNKKKPLKHVSKWKSIADCIQLKPDIIIIHEKGHQPTASTFHTEGNNLADKLATQGSYVVNAGKRTADGSEFEKRTADGSEFESPKKKAKVE

SEQ ID NO: 508 - protein, 2174 aa, synthetic construct
MPAAKRVKLDGGDKKYSIGLDIGTNSVGWAVITDEYKVPSKKFKVLGNTDRHSIKKNLIGALLFDSGETAEATRLKRTARRRYTRRKNRICYLQEIFSNEMAKVDDSFFHRLEESFLVEEDKKHERHPIFGNIVDEVAYHEKYPTIYHLRKKLVDSTDKADLRLIYLALAHMIKFRGHFLIEGDLNPDNSDVDKLFIQLVQTYNQLFEENPINASGVDAKAILSARLSKSRRLENLIAQLPGEKKNGLFGNLIALSLGLTPNFKSNFDLAEDAKLQLSKDTYDDDLDNLLAQIGDQYADLFLAAKNLSDAILLSDILRVNTEITKAPLSASMIKRYDEHHQDLTLLKALVRQQLPEKYKEIFFDQSKNGYAGYIDGGASQEEFYKFIKPILEKMDGTEELLVKLNREDLLRKQRTFDNGSIPHQIHLGELHAILRRQEDFYPFLKDNREKIEKILTFRIPYYVGPLARGNSRFAWMTRKSEETITPWNFEEVVDKGASAQSFIERMTNFDKNLPNEKVLPKHSLLYEYFTVYNELTKVKYVTEGMRKPAFLSGEQKKAIVDLLFKTNRKVTVKQLKEDYFKKIECFDSVEISGVEDRFNASLGTYHDLLKIIKDKDFLDNEENEDILEDIVLTLTLFEDREMIEERLKTYAHLFDDKVMKQLKRRRYTGWGRLSRKLINGIRDKQSGKTILDFLKSDGFANRNFMQLIHDDSLTFKEDIQKAQVSGQGDSLHEHIANLAGSPAIKKGILQTVKVVDELVKVMGRHKPENIVIEMARENQTTQKGQKNSRERMKRIEEGIKELGSQILKEHPVENTQLQNEKLYLYYLQNGRDMYVDQELDINRLSDYDVDHIVPQSFLKDDSIDNKVLTRSDKARGKSDNVPSEEVVKKMKNYWRQLLNAKLITQRKFDNLTKAERGGLSELDKAGFIKRQLVETRQITKHVAQILDSRMNTKYDENDKLIREVKVITLKSKLVSDFRKDFQFYKVREINNYHHAHDAYLNAVVGTALIKKYPKLESEFVYGDYKVYDVRKMIAKSEQEIGKATAKYFFYSNIMNFFKTEITLANGEIRKRPLIETNGETGEIVWDKGRDFATVRKVLSMPQVNIVKKTEVQTGGFSKESILPKRNSDKLIARKKDWDPKKYGGFDSPTVAYSVLVVAKVEKGKSKKLKSVKELLGITIMERSSFEKNPIDFLEAKGYKEVKKDLIIKLPKYSLFELENGRKRMLASAGELQKGNELALPSKYVNFLYLASHYEKLKGSPEDNEQKQLFVEQHKHYLDEIIEQISEFSKRVILADANLDKVLSAYNKHRDKPIREQAENIIHLFTLTNLGAPAAFKYFDTTIDRKRYTSTKEVLDATLIHQSITGLYETRIDLSQLGGDGGGSSGGGGGSGGMDPLQLLQPLEAEIKGTKLKAHWNSGATITCVPQAFLEEEVPIKNIWIKTIHGEKEQPVYYLTFKIQGRKVEAEVISSPYDYILVSPSDIPWLMKKPLQLTTLVPLQEYEERLLKQTMLTGSYKEKLQSLFLKYDALWQHWENQVGHRRIKPHHIATGTVNPRPQKQYPINPKAKASIQTVINDLLKQGVLIQQNSIMNTPVYPVPKPDGKWRMVLDYREVNKTIPLIAAQNQHSAGILSSIFRGKYKTTLDLSNGFWAHSITPESYWLTAFTWLGQQYCWTRLPQGFLNSPALFTADVVDLLKEVPNVQVYVDDIYISHDDPREHLEQLEKVFSLLLNAGYVVSLKKSEIAQHEVEFLGFNITKEGRGLTETFKQKLLNITPPRDLKQLQSILGLLNFARNFIPNFSELVKPLYNIIATANGKYITWTTDNSQQLQNIISMLNSAENLEERNPEVRLIMKVNTSPSAGYIRFYNEFAKRPIMYLNYVYTKAEVKFTNTEKLLTTIHKGLIKALDLGMGQEILVYSPIVSMTKIQKTPLPERKALPIRWITWMSYLEDPRIQFHYDKTLPELQQVPTVTDDIIAKIKHPSEFSMVFYTDGSAIKHPNVNKSHNAGMGIAQVQFKPEFTVINTWSIPLGDHTAQLAEVAAVEFACKKALKIDGPVLIVTDSFYVAESVNKELPYWQSNGFFNNKKKPLKHVSKWKSIADCIQLKPDIIIIHEKGHQPTASTFHTEGNNLADKLATQGSYVVNAGKRTADGSEFEKRTADGSEFESPKKKAKVE

SEQ ID NO: 509 - protein, 2183 aa, synthetic construct
MPAAKRVKLDGGDKKYSIGLDIGTNSVGWAVITDEYKVPSKKFKVLGNTDRHSIKKNLIGALLFDSGETAEATRLKRTARRRYTRRKNRICYLQEIFSNEMAKVDDSFFHRLEESFLVEEDKKHERHPIFGNIVDEVAYHEKYPTIYHLRKKLVDSTDKADLRLIYLALAHMIKFRGHFLIEGDLNPDNSDVDKLFIQLVQTYNQLFEENPINASGVDAKAILSARLSKSRRLENLIAQLPGEKKNGLFGNLIALSLGLTPNFKSNFDLAEDAKLQLSKDTYDDDLDNLLAQIGDQYADLFLAAKNLSDAILLSDILRVNTEITKAPLSASMIKRYDEHHQDLTLLKALVRQQLPEKYKEIFFDQSKNGYAGYIDGGASQEEFYKFIKPILEKMDGTEELLVKLNREDLLRKQRTFDNGSIPHQIHLGELHAILRRQEDFYPFLKDNREKIEKILTFRIPYYVGPLARGNSRFAWMTRKSEETITPWNFEEVVDKGASAQSFIERMTNFDKNLPNEKVLPKHSLLYEYFTVYNELTKVKYVTEGMRKPAFLSGEQKKAIVDLLFKTNRKVTVKQLKEDYFKKIECFDSVEISGVEDRFNASLGTYHDLLKIIKDKDFLDNEENEDILEDIVLTLTLFEDREMIEERLKTYAHLFDDKVMKQLKRRRYTGWGRLSRKLINGIRDKQSGKTILDFLKSDGFANRNFMQLIHDDSLTFKEDIQKAQVSGQGDSLHEHIANLAGSPAIKKGILQTVKVVDELVKVMGRHKPENIVIEMARENQTTQKGQKNSRERMKRIEEGIKELGSQILKEHPVENTQLQNEKLYLYYLQNGRDMYVDQELDINRLSDYDVDHIVPQSFLKDDSIDNKVLTRSDKARGKSDNVPSEEVVKKMKNYWRQLLNAKLITQRKFDNLTKAERGGLSELDKAGFIKRQLVETRQITKHVAQILDSRMNTKYDENDKLIREVKVITLKSKLVSDFRKDFQFYKVREINNYHHAHDAYLNAVVGTALIKKYPKLESEFVYGDYKVYDVRKMIAKSEQEIGKATAKYFFYSNIMNFFKTEITLANGEIRKRPLIETNGETGEIVWDKGRDFATVRKVLSMPQVNIVKKTEVQTGGFSKESILPKRNSDKLIARKKDWDPKKYGGFDSPTVAYSVLVVAKVEKGKSKKLKSVKELLGITIMERSSFEKNPIDFLEAKGYKEVKKDLIIKLPKYSLFELENGRKRMLASAGELQKGNELALPSKYVNFLYLASHYEKLKGSPEDNEQKQLFVEQHKHYLDEIIEQISEFSKRVILADANLDKVLSAYNKHRDKPIREQAENIIHLFTLTNLGAPAAFKYFDTTIDRKRYTSTKEVLDATLIHQSITGLYETRIDLSQLGGDGGGSSGSSGSSGSSGSSGSSGGMDPLQLLQPLEAEIKGTKLKAHWNSGATITCVPQAFLEEEVPIKNIWIKTIHGEKEQPVYYLTFKIQGRKVEAEVISSPYDYILVSPSDIPWLMKKPLQLTTLVPLQEYEERLLKQTMLTGSYKEKLQSLFLKYDALWQHWENQVGHRRIKPHHIATGTVNPRPQKQYPINPKAKASIQTVINDLLKQGVLIQQNSIMNTPVYPVPKPDGKWRMVLDYREVNKTIPLIAAQNQHSAGILSSIFRGKYKTTLDLSNGFWAHSITPESYWLTAFTWLGQQYCWTRLPQGFLNSPALFTADVVDLLKEVPNVQVYVDDIYISHDDPREHLEQLEKVFSLLLNAGYVVSLKKSEIAQHEVEFLGFNITKEGRGLTETFKQKLLNITPPRDLKQLQSILGLLNFARNFIPNFSELVKPLYNIIATANGKYITWTTDNSQQLQNIISMLNSAENLEERNPEVRLIMKVNTSPSAGYIRFYNEFAKRPIMYLNYVYTKAEVKFTNTEKLLTTIHKGLIKALDLGMGQEILVYSPIVSMTKIQKTPLPERKALPIRWITWMSYLEDPRIQFHYDKTLPELQQVPTVTDDIIAKIKHPSEFSMVFYTDGSAIKHPNVNKSHNAGMGIAQVQFKPEFTVINTWSIPLGDHTAQLAEVAAVEFACKKALKIDGPVLIVTDSFYVAESVNKELPYWQSNGFFNNKKKPLKHVSKWKSIADCIQLKPDIIIIHEKGHQPTASTFHTEGNNLADKLATQGSYVVNAGKRTADGSEFEKRTADGSEFESPKKKAKVE

SEQ ID NO: 510 - protein, 2176 aa, synthetic construct
MPAAKRVKLDGGDKKYSIGLDIGTNSVGWAVITDEYKVPSKKFKVLGNTDRHSIKKNLIGALLFDSGETAEATRLKRTARRRYTRRKNRICYLQEIFSNEMAKVDDSFFHRLEESFLVEEDKKHERHPIFGNIVDEVAYHEKYPTIYHLRKKLVDSTDKADLRLIYLALAHMIKFRGHFLIEGDLNPDNSDVDKLFIQLVQTYNQLFEENPINASGVDAKAILSARLSKSRRLENLIAQLPGEKKNGLFGNLIALSLGLTPNFKSNFDLAEDAKLQLSKDTYDDDLDNLLAQIGDQYADLFLAAKNLSDAILLSDILRVNTEITKAPLSASMIKRYDEHHQDLTLLKALVRQQLPEKYKEIFFDQSKNGYAGYIDGGASQEEFYKFIKPILEKMDGTEELLVKLNREDLLRKQRTFDNGSIPHQIHLGELHAILRRQEDFYPFLKDNREKIEKILTFRIPYYVGPLARGNSRFAWMTRKSEETITPWNFEEVVDKGASAQSFIERMTNFDKNLPNEKVLPKHSLLYEYFTVYNELTKVKYVTEGMRKPAFLSGEQKKAIVDLLFKTNRKVTVKQLKEDYFKKIECFDSVEISGVEDRFNASLGTYHDLLKIIKDKDFLDNEENEDILEDIVLTLTLFEDREMIEERLKTYAHLFDDKVMKQLKRRRYTGWGRLSRKLINGIRDKQSGKTILDFLKSDGFANRNFMQLIHDDSLTFKEDIQKAQVSGQGDSLHEHIANLAGSPAIKKGILQTVKVVDELVKVMGRHKPENIVIEMARENQTTQKGQKNSRERMKRIEEGIKELGSQILKEHPVENTQLQNEKLYLYYLQNGRDMYVDQELDINRLSDYDVDHIVPQSFLKDDSIDNKVLTRSDKARGKSDNVPSEEVVKKMKNYWRQLLNAKLITQRKFDNLTKAERGGLSELDKAGFIKRQLVETRQITKHVAQILDSRMNTKYDENDKLIREVKVITLKSKLVSDFRKDFQFYKVREINNYHHAHDAYLNAVVGTALIKKYPKLESEFVYGDYKVYDVRKMIAKSEQEIGKATAKYFFYSNIMNFFKTEITLANGEIRKRPLIETNGETGEIVWDKGRDFATVRKVLSMPQVNIVKKTEVQTGGFSKESILPKRNSDKLIARKKDWDPKKYGGFDSPTVAYSVLVVAKVEKGKSKKLKSVKELLGITIMERSSFEKNPIDFLEAKGYKEVKKDLIIKLPKYSLFELENGRKRMLASAGELQKGNELALPSKYVNFLYLASHYEKLKGSPEDNEQKQLFVEQHKHYLDEIIEQISEFSKRVILADANLDKVLSAYNKHRDKPIREQAENIIHLFTLTNLGAPAAFKYFDTTIDRKRYTSTKEVLDATLIHQSITGLYETRIDLSQLGGDGGPAPEAAAKGGGGGMDPLQLLQPLEAEIKGTKLKAHWNSGATITCVPQAFLEEEVPIKNIWIKTIHGEKEQPVYYLTFKIQGRKVEAEVISSPYDYILVSPSDIPWLMKKPLQLTTLVPLQEYEERLLKQTMLTGSYKEKLQSLFLKYDALWQHWENQVGHRRIKPHHIATGTVNPRPQKQYPINPKAKASIQTVINDLLKQGVLIQQNSIMNTPVYPVPKPDGKWRMVLDYREVNKTIPLIAAQNQHSAGILSSIFRGKYKTTLDLSNGFWAHSITPESYWLTAFTWLGQQYCWTRLPQGFLNSPALFTADVVDLLKEVPNVQVYVDDIYISHDDPREHLEQLEKVFSLLLNAGYVVSLKKSEIAQHEVEFLGFNITKEGRGLTETFKQKLLNITPPRDLKQLQSILGLLNFARNFIPNFSELVKPLYNIIATANGKYITWTTDNSQQLQNIISMLNSAENLEERNPEVRLIMKVNTSPSAGYIRFYNEFAKRPIMYLNYVYTKAEVKFTNTEKLLTTIHKGLIKALDLGMGQEILVYSPIVSMTKIQKTPLPERKALPIRWITWMSYLEDPRIQFHYDKTLPELQQVPTVTDDIIAKIKHPSEFSMVFYTDGSAIKHPNVNKSHNAGMGIAQVQFKPEFTVINTWSIPLGDHTAQLAEVAAVEFACKKALKIDGPVLIVTDSFYVAESVNKELPYWQSNGFFNNKKKPLKHVSKWKSIADCIQLKPDIIIIHEKGHQPTASTFHTEGNNLADKLATQGSYVVNAGKRTADGSEFEKRTADGSEFESPKKKAKVE

SEQ ID NO: 511 - protein, 2176 aa, synthetic construct
MPAAKRVKLDGGDKKYSIGLDIGTNSVGWAVITDEYKVPSKKFKVLGNTDRHSIKKNLIGALLFDSGETAEATRLKRTARRRYTRRKNRICYLQEIFSNEMAKVDDSFFHRLEESFLVEEDKKHERHPIFGNIVDEVAYHEKYPTIYHLRKKLVDSTDKADLRLIYLALAHMIKFRGHFLIEGDLNPDNSDVDKLFIQLVQTYNQLFEENPINASGVDAKAILSARLSKSRRLENLIAQLPGEKKNGLFGNLIALSLGLTPNFKSNFDLAEDAKLQLSKDTYDDDLDNLLAQIGDQYADLFLAAKNLSDAILLSDILRVNTEITKAPLSASMIKRYDEHHQDLTLLKALVRQQLPEKYKEIFFDQSKNGYAGYIDGGASQEEFYKFIKPILEKMDGTEELLVKLNREDLLRKQRTFDNGSIPHQIHLGELHAILRRQEDFYPFLKDNREKIEKILTFRIPYYVGPLARGNSRFAWMTRKSEETITPWNFEEVVDKGASAQSFIERMTNFDKNLPNEKVLPKHSLLYEYFTVYNELTKVKYVTEGMRKPAFLSGEQKKAIVDLLFKTNRKVTVKQLKEDYFKKIECFDSVEISGVEDRFNASLGTYHDLLKIIKDKDFLDNEENEDILEDIVLTLTLFEDREMIEERLKTYAHLFDDKVMKQLKRRRYTGWGRLSRKLINGIRDKQSGKTILDFLKSDGFANRNFMQLIHDDSLTFKEDIQKAQVSGQGDSLHEHIANLAGSPAIKKGILQTVKVVDELVKVMGRHKPENIVIEMARENQTTQKGQKNSRERMKRIEEGIKELGSQILKEHPVENTQLQNEKLYLYYLQNGRDMYVDQELDINRLSDYDVDHIVPQSFLKDDSIDNKVLTRSDKARGKSDNVPSEEVVKKMKNYWRQLLNAKLITQRKFDNLTKAERGGLSELDKAGFIKRQLVETRQITKHVAQILDSRMNTKYDENDKLIREVKVITLKSKLVSDFRKDFQFYKVREINNYHHAHDAYLNAVVGTALIKKYPKLESEFVYGDYKVYDVRKMIAKSEQEIGKATAKYFFYSNIMNFFKTEITLANGEIRKRPLIETNGETGEIVWDKGRDFATVRKVLSMPQVNIVKKTEVQTGGFSKESILPKRNSDKLIARKKDWDPKKYGGFDSPTVAYSVLVVAKVEKGKSKKLKSVKELLGITIMERSSFEKNPIDFLEAKGYKEVKKDLIIKLPKYSLFELENGRKRMLASAGELQKGNELALPSKYVNFLYLASHYEKLKGSPEDNEQKQLFVEQHKHYLDEIIEQISEFSKRVILADANLDKVLSAYNKHRDKPIREQAENIIHLFTLTNLGAPAAFKYFDTTIDRKRYTSTKEVLDATLIHQSITGLYETRIDLSQLGGDGGEAAAKGGGGSSGGMDPLQLLQPLEAEIKGTKLKAHWNSGATITCVPQAFLEEEVPIKNIWIKTIHGEKEQPVYYLTFKIQGRKVEAEVISSPYDYILVSPSDIPWLMKKPLQLTTLVPLQEYEERLLKQTMLTGSYKEKLQSLFLKYDALWQHWENQVGHRRIKPHHIATGTVNPRPQKQYPINPKAKASIQTVINDLLKQGVLIQQNSIMNTPVYPVPKPDGKWRMVLDYREVNKTIPLIAAQNQHSAGILSSIFRGKYKTTLDLSNGFWAHSITPESYWLTAFTWLGQQYCWTRLPQGFLNSPALFTADVVDLLKEVPNVQVYVDDIYISHDDPREHLEQLEKVFSLLLNAGYVVSLKKSEIAQHEVEFLGFNITKEGRGLTETFKQKLLNITPPRDLKQLQSILGLLNFARNFIPNFSELVKPLYNIIATANGKYITWTTDNSQQLQNIISMLNSAENLEERNPEVRLIMKVNTSPSAGYIRFYNEFAKRPIMYLNYVYTKAEVKFTNTEKLLTTIHKGLIKALDLGMGQEILVYSPIVSMTKIQKTPLPERKALPIRWITWMSYLEDPRIQFHYDKTLPELQQVPTVTDDIIAKIKHPSEFSMVFYTDGSAIKHPNVNKSHNAGMGIAQVQFKPEFTVINTWSIPLGDHTAQLAEVAAVEFACKKALKIDGPVLIVTDSFYVAESVNKELPYWQSNGFFNNKKKPLKHVSKWKSIADCIQLKPDIIIIHEKGHQPTASTFHTEGNNLADKLATQGSYVVNAGKRTADGSEFEKRTADGSEFESPKKKAKVE

SEQ ID NO: 512 - protein, 2171 aa, synthetic construct
MPAAKRVKLDGGDKKYSIGLDIGTNSVGWAVITDEYKVPSKKFKVLGNTDRHSIKKNLIGALLFDSGETAEATRLKRTARRRYTRRKNRICYLQEIFSNEMAKVDDSFFHRLEESFLVEEDKKHERHPIFGNIVDEVAYHEKYPTIYHLRKKLVDSTDKADLRLIYLALAHMIKFRGHFLIEGDLNPDNSDVDKLFIQLVQTYNQLFEENPINASGVDAKAILSARLSKSRRLENLIAQLPGEKKNGLFGNLIALSLGLTPNFKSNFDLAEDAKLQLSKDTYDDDLDNLLAQIGDQYADLFLAAKNLSDAILLSDILRVNTEITKAPLSASMIKRYDEHHQDLTLLKALVRQQLPEKYKEIFFDQSKNGYAGYIDGGASQEEFYKFIKPILEKMDGTEELLVKLNREDLLRKQRTFDNGSIPHQIHLGELHAILRRQEDFYPFLKDNREKIEKILTFRIPYYVGPLARGNSRFAWMTRKSEETITPWNFEEVVDKGASAQSFIERMTNFDKNLPNEKVLPKHSLLYEYFTVYNELTKVKYVTEGMRKPAFLSGEQKKAIVDLLFKTNRKVTVKQLKEDYFKKIECFDSVEISGVEDRFNASLGTYHDLLKIIKDKDFLDNEENEDILEDIVLTLTLFEDREMIEERLKTYAHLFDDKVMKQLKRRRYTGWGRLSRKLINGIRDKQSGKTILDFLKSDGFANRNFMQLIHDDSLTFKEDIQKAQVSGQGDSLHEHIANLAGSPAIKKGILQTVKVVDELVKVMGRHKPENIVIEMARENQTTQKGQKNSRERMKRIEEGIKELGSQILKEHPVENTQLQNEKLYLYYLQNGRDMYVDQELDINRLSDYDVDHIVPQSFLKDDSIDNKVLTRSDKARGKSDNVPSEEVVKKMKNYWRQLLNAKLITQRKFDNLTKAERGGLSELDKAGFIKRQLVETRQITKHVAQILDSRMNTKYDENDKLIREVKVITLKSKLVSDFRKDFQFYKVREINNYHHAHDAYLNAVVGTALIKKYPKLESEFVYGDYKVYDVRKMIAKSEQEIGKATAKYFFYSNIMNFFKTEITLANGEIRKRPLIETNGETGEIVWDKGRDFATVRKVLSMPQVNIVKKTEVQTGGFSKESILPKRNSDKLIARKKDWDPKKYGGFDSPTVAYSVLVVAKVEKGKSKKLKSVKELLGITIMERSSFEKNPIDFLEAKGYKEVKKDLIIKLPKYSLFELENGRKRMLASAGELQKGNELALPSKYVNFLYLASHYEKLKGSPEDNEQKQLFVEQHKHYLDEIIEQISEFSKRVILADANLDKVLSAYNKHRDKPIREQAENIIHLFTLTNLGAPAAFKYFDTTIDRKRYTSTKEVLDATLIHQSITGLYETRIDLSQLGGDGGGGGPAPGGMDPLQLLQPLEAEIKGTKLKAHWNSGATITCVPQAFLEEEVPIKNIWIKTIHGEKEQPVYYLTFKIQGRKVEAEVISSPYDYILVSPSDIPWLMKKPLQLTTLVPLQEYEERLLKQTMLTGSYKEKLQSLFLKYDALWQHWENQVGHRRIKPHHIATGTVNPRPQKQYPINPKAKASIQTVINDLLKQGVLIQQNSIMNTPVYPVPKPDGKWRMVLDYREVNKTIPLIAAQNQHSAGILSSIFRGKYKTTLDLSNGFWAHSITPESYWLTAFTWLGQQYCWTRLPQGFLNSPALFTADVVDLLKEVPNVQVYVDDIYISHDDPREHLEQLEKVFSLLLNAGYVVSLKKSEIAQHEVEFLGFNITKEGRGLTETFKQKLLNITPPRDLKQLQSILGLLNFARNFIPNFSELVKPLYNIIATANGKYITWTTDNSQQLQNIISMLNSAENLEERNPEVRLIMKVNTSPSAGYIRFYNEFAKRPIMYLNYVYTKAEVKFTNTEKLLTTIHKGLIKALDLGMGQEILVYSPIVSMTKIQKTPLPERKALPIRWITWMSYLEDPRIQFHYDKTLPELQQVPTVTDDIIAKIKHPSEFSMVFYTDGSAIKHPNVNKSHNAGMGIAQVQFKPEFTVINTWSIPLGDHTAQLAEVAAVEFACKKALKIDGPVLIVTDSFYVAESVNKELPYWQSNGFFNNKKKPLKHVSKWKSIADCIQLKPDIIIIHEKGHQPTASTFHTEGNNLADKLATQGSYVVNAGKRTADGSEFEKRTADGSEFESPKKKAKVE

SEQ ID NO: 513 - protein, 2176 aa, synthetic construct
MPAAKRVKLDGGDKKYSIGLDIGTNSVGWAVITDEYKVPSKKFKVLGNTDRHSIKKNLIGALLFDSGETAEATRLKRTARRRYTRRKNRICYLQEIFSNEMAKVDDSFFHRLEESFLVEEDKKHERHPIFGNIVDEVAYHEKYPTIYHLRKKLVDSTDKADLRLIYLALAHMIKFRGHFLIEGDLNPDNSDVDKLFIQLVQTYNQLFEENPINASGVDAKAILSARLSKSRRLENLIAQLPGEKKNGLFGNLIALSLGLTPNFKSNFDLAEDAKLQLSKDTYDDDLDNLLAQIGDQYADLFLAAKNLSDAILLSDILRVNTEITKAPLSASMIKRYDEHHQDLTLLKALVRQQLPEKYKEIFFDQSKNGYAGYIDGGASQEEFYKFIKPILEKMDGTEELLVKLNREDLLRKQRTFDNGSIPHQIHLGELHAILRRQEDFYPFLKDNREKIEKILTFRIPYYVGPLARGNSRFAWMTRKSEETITPWNFEEVVDKGASAQSFIERMTNFDKNLPNEKVLPKHSLLYEYFTVYNELTKVKYVTEGMRKPAFLSGEQKKAIVDLLFKTNRKVTVKQLKEDYFKKIECFDSVEISGVEDRFNASLGTYHDLLKIIKDKDFLDNEENEDILEDIVLTLTLFEDREMIEERLKTYAHLFDDKVMKQLKRRRYTGWGRLSRKLINGIRDKQSGKTILDFLKSDGFANRNFMQLIHDDSLTFKEDIQKAQVSGQGDSLHEHIANLAGSPAIKKGILQTVKVVDELVKVMGRHKPENIVIEMARENQTTQKGQKNSRERMKRIEEGIKELGSQILKEHPVENTQLQNEKLYLYYLQNGRDMYVDQELDINRLSDYDVDHIVPQSFLKDDSIDNKVLTRSDKARGKSDNVPSEEVVKKMKNYWRQLLNAKLITQRKFDNLTKAERGGLSELDKAGFIKRQLVETRQITKHVAQILDSRMNTKYDENDKLIREVKVITLKSKLVSDFRKDFQFYKVREINNYHHAHDAYLNAVVGTALIKKYPKLESEFVYGDYKVYDVRKMIAKSEQEIGKATAKYFFYSNIMNFFKTEITLANGEIRKRPLIETNGETGEIVWDKGRDFATVRKVLSMPQVNIVKKTEVQTGGFSKESILPKRNSDKLIARKKDWDPKKYGGFDSPTVAYSVLVVAKVEKGKSKKLKSVKELLGITIMERSSFEKNPIDFLEAKGYKEVKKDLIIKLPKYSLFELENGRKRMLASAGELQKGNELALPSKYVNFLYLASHYEKLKGSPEDNEQKQLFVEQHKHYLDEIIEQISEFSKRVILADANLDKVLSAYNKHRDKPIREQAENIIHLFTLTNLGAPAAFKYFDTTIDRKRYTSTKEVLDATLIHQSITGLYETRIDLSQLGGDGGEAAAKGGSGGGGGMDPLQLLQPLEAEIKGTKLKAHWNSGATITCVPQAFLEEEVPIKNIWIKTIHGEKEQPVYYLTFKIQGRKVEAEVISSPYDYILVSPSDIPWLMKKPLQLTTLVPLQEYEERLLKQTMLTGSYKEKLQSLFLKYDALWQHWENQVGHRRIKPHHIATGTVNPRPQKQYPINPKAKASIQTVINDLLKQGVLIQQNSIMNTPVYPVPKPDGKWRMVLDYREVNKTIPLIAAQNQHSAGILSSIFRGKYKTTLDLSNGFWAHSITPESYWLTAFTWLGQQYCWTRLPQGFLNSPALFTADVVDLLKEVPNVQVYVDDIYISHDDPREHLEQLEKVFSLLLNAGYVVSLKKSEIAQHEVEFLGFNITKEGRGLTETFKQKLLNITPPRDLKQLQSILGLLNFARNFIPNFSELVKPLYNIIATANGKYITWTTDNSQQLQNIISMLNSAENLEERNPEVRLIMKVNTSPSAGYIRFYNEFAKRPIMYLNYVYTKAEVKFTNTEKLLTTIHKGLIKALDLGMGQEILVYSPIVSMTKIQKTPLPERKALPIRWITWMSYLEDPRIQFHYDKTLPELQQVPTVTDDIIAKIKHPSEFSMVFYTDGSAIKHPNVNKSHNAGMGIAQVQFKPEFTVINTWSIPLGDHTAQLAEVAAVEFACKKALKIDGPVLIVTDSFYVAESVNKELPYWQSNGFFNNKKKPLKHVSKWKSIADCIQLKPDIIIIHEKGHQPTASTFHTEGNNLADKLATQGSYVVNAGKRTADGSEFEKRTADGSEFESPKKKAKVE

SEQ ID NO: 514 - protein, 2174 aa, synthetic construct
MPAAKRVKLDGGDKKYSIGLDIGTNSVGWAVITDEYKVPSKKFKVLGNTDRHSIKKNLIGALLFDSGETAEATRLKRTARRRYTRRKNRICYLQEIFSNEMAKVDDSFFHRLEESFLVEEDKKHERHPIFGNIVDEVAYHEKYPTIYHLRKKLVDSTDKADLRLIYLALAHMIKFRGHFLIEGDLNPDNSDVDKLFIQLVQTYNQLFEENPINASGVDAKAILSARLSKSRRLENLIAQLPGEKKNGLFGNLIALSLGLTPNFKSNFDLAEDAKLQLSKDTYDDDLDNLLAQIGDQYADLFLAAKNLSDAILLSDILRVNTEITKAPLSASMIKRYDEHHQDLTLLKALVRQQLPEKYKEIFFDQSKNGYAGYIDGGASQEEFYKFIKPILEKMDGTEELLVKLNREDLLRKQRTFDNGSIPHQIHLGELHAILRRQEDFYPFLKDNREKIEKILTFRIPYYVGPLARGNSRFAWMTRKSEETITPWNFEEVVDKGASAQSFIERMTNFDKNLPNEKVLPKHSLLYEYFTVYNELTKVKYVTEGMRKPAFLSGEQKKAIVDLLFKTNRKVTVKQLKEDYFKKIECFDSVEISGVEDRFNASLGTYHDLLKIIKDKDFLDNEENEDILEDIVLTLTLFEDREMIEERLKTYAHLFDDKVMKQLKRRRYTGWGRLSRKLINGIRDKQSGKTILDFLKSDGFANRNFMQLIHDDSLTFKEDIQKAQVSGQGDSLHEHIANLAGSPAIKKGILQTVKVVDELVKVMGRHKPENIVIEMARENQTTQKGQKNSRERMKRIEEGIKELGSQILKEHPVENTQLQNEKLYLYYLQNGRDMYVDQELDINRLSDYDVDHIVPQSFLKDDSIDNKVLTRSDKARGKSDNVPSEEVVKKMKNYWRQLLNAKLITQRKFDNLTKAERGGLSELDKAGFIKRQLVETRQITKHVAQILDSRMNTKYDENDKLIREVKVITLKSKLVSDFRKDFQFYKVREINNYHHAHDAYLNAVVGTALIKKYPKLESEFVYGDYKVYDVRKMIAKSEQEIGKATAKYFFYSNIMNFFKTEITLANGEIRKRPLIETNGETGEIVWDKGRDFATVRKVLSMPQVNIVKKTEVQTGGFSKESILPKRNSDKLIARKKDWDPKKYGGFDSPTVAYSVLVVAKVEKGKSKKLKSVKELLGITIMERSSFEKNPIDFLEAKGYKEVKKDLIIKLPKYSLFELENGRKRMLASAGELQKGNELALPSKYVNFLYLASHYEKLKGSPEDNEQKQLFVEQHKHYLDEIIEQISEFSKRVILADANLDKVLSAYNKHRDKPIREQAENIIHLFTLTNLGAPAAFKYFDTTIDRKRYTSTKEVLDATLIHQSITGLYETRIDLSQLGGDGGGGGPAPGGSGGMDPLQLLQPLEAEIKGTKLKAHWNSGATITCVPQAFLEEEVPIKNIWIKTIHGEKEQPVYYLTFKIQGRKVEAEVISSPYDYILVSPSDIPWLMKKPLQLTTLVPLQEYEERLLKQTMLTGSYKEKLQSLFLKYDALWQHWENQVGHRRIKPHHIATGTVNPRPQKQYPINPKAKASIQTVINDLLKQGVLIQQNSIMNTPVYPVPKPDGKWRMVLDYREVNKTIPLIAAQNQHSAGILSSIFRGKYKTTLDLSNGFWAHSITPESYWLTAFTWLGQQYCWTRLPQGFLNSPALFTADVVDLLKEVPNVQVYVDDIYISHDDPREHLEQLEKVFSLLLNAGYVVSLKKSEIAQHEVEFLGFNITKEGRGLTETFKQKLLNITPPRDLKQLQSILGLLNFARNFIPNFSELVKPLYNIIATANGKYITWTTDNSQQLQNIISMLNSAENLEERNPEVRLIMKVNTSPSAGYIRFYNEFAKRPIMYLNYVYTKAEVKFTNTEKLLTTIHKGLIKALDLGMGQEILVYSPIVSMTKIQKTPLPERKALPIRWITWMSYLEDPRIQFHYDKTLPELQQVPTVTDDIIAKIKHPSEFSMVFYTDGSAIKHPNVNKSHNAGMGIAQVQFKPEFTVINTWSIPLGDHTAQLAEVAAVEFACKKALKIDGPVLIVTDSFYVAESVNKELPYWQSNGFFNNKKKPLKHVSKWKSIADCIQLKPDIIIIHEKGHQPTASTFHTEGNNLADKLATQGSYVVNAGKRTADGSEFEKRTADGSEFESPKKKAKVE

SEQ ID NO: 515 - protein, 2174 aa, synthetic construct
MPAAKRVKLDGGDKKYSIGLDIGTNSVGWAVITDEYKVPSKKFKVLGNTDRHSIKKNLIGALLFDSGETAEATRLKRTARRRYTRRKNRICYLQEIFSNEMAKVDDSFFHRLEESFLVEEDKKHERHPIFGNIVDEVAYHEKYPTIYHLRKKLVDSTDKADLRLIYLALAHMIKFRGHFLIEGDLNPDNSDVDKLFIQLVQTYNQLFEENPINASGVDAKAILSARLSKSRRLENLIAQLPGEKKNGLFGNLIALSLGLTPNFKSNFDLAEDAKLQLSKDTYDDDLDNLLAQIGDQYADLFLAAKNLSDAILLSDILRVNTEITKAPLSASMIKRYDEHHQDLTLLKALVRQQLPEKYKEIFFDQSKNGYAGYIDGGASQEEFYKFIKPILEKMDGTEELLVKLNREDLLRKQRTFDNGSIPHQIHLGELHAILRRQEDFYPFLKDNREKIEKILTFRIPYYVGPLARGNSRFAWMTRKSEETITPWNFEEVVDKGASAQSFIERMTNFDKNLPNEKVLPKHSLLYEYFTVYNELTKVKYVTEGMRKPAFLSGEQKKAIVDLLFKTNRKVTVKQLKEDYFKKIECFDSVEISGVEDRFNASLGTYHDLLKIIKDKDFLDNEENEDILEDIVLTLTLFEDREMIEERLKTYAHLFDDKVMKQLKRRRYTGWGRLSRKLINGIRDKQSGKTILDFLKSDGFANRNFMQLIHDDSLTFKEDIQKAQVSGQGDSLHEHIANLAGSPAIKKGILQTVKVVDELVKVMGRHKPENIVIEMARENQTTQKGQKNSRERMKRIEEGIKELGSQILKEHPVENTQLQNEKLYLYYLQNGRDMYVDQELDINRLSDYDVDHIVPQSFLKDDSIDNKVLTRSDKARGKSDNVPSEEVVKKMKNYWRQLLNAKLITQRKFDNLTKAERGGLSELDKAGFIKRQLVETRQITKHVAQILDSRMNTKYDENDKLIREVKVITLKSKLVSDFRKDFQFYKVREINNYHHAHDAYLNAVVGTALIKKYPKLESEFVYGDYKVYDVRKMIAKSEQEIGKATAKYFFYSNIMNFFKTEITLANGEIRKRPLIETNGETGEIVWDKGRDFATVRKVLSMPQVNIVKKTEVQTGGFSKESILPKRNSDKLIARKKDWDPKKYGGFDSPTVAYSVLVVAKVEKGKSKKLKSVKELLGITIMERSSFEKNPIDFLEAKGYKEVKKDLIIKLPKYSLFELENGRKRMLASAGELQKGNELALPSKYVNFLYLASHYEKLKGSPEDNEQKQLFVEQHKHYLDEIIEQISEFSKRVILADANLDKVLSAYNKHRDKPIREQAENIIHLFTLTNLGAPAAFKYFDTTIDRKRYTSTKEVLDATLIHQSITGLYETRIDLSQLGGDGGGSSGSSGSSGGMDPLQLLQPLEAEIKGTKLKAHWNSGATITCVPQAFLEEEVPIKNIWIKTIHGEKEQPVYYLTFKIQGRKVEAEVISSPYDYILVSPSDIPWLMKKPLQLTTLVPLQEYEERLLKQTMLTGSYKEKLQSLFLKYDALWQHWENQVGHRRIKPHHIATGTVNPRPQKQYPINPKAKASIQTVINDLLKQGVLIQQNSIMNTPVYPVPKPDGKWRMVLDYREVNKTIPLIAAQNQHSAGILSSIFRGKYKTTLDLSNGFWAHSITPESYWLTAFTWLGQQYCWTRLPQGFLNSPALFTADVVDLLKEVPNVQVYVDDIYISHDDPREHLEQLEKVFSLLLNAGYVVSLKKSEIAQHEVEFLGFNITKEGRGLTETFKQKLLNITPPRDLKQLQSILGLLNFARNFIPNFSELVKPLYNIIATANGKYITWTTDNSQQLQNIISMLNSAENLEERNPEVRLIMKVNTSPSAGYIRFYNEFAKRPIMYLNYVYTKAEVKFTNTEKLLTTIHKGLIKALDLGMGQEILVYSPIVSMTKIQKTPLPERKALPIRWITWMSYLEDPRIQFHYDKTLPELQQVPTVTDDIIAKIKHPSEFSMVFYTDGSAIKHPNVNKSHNAGMGIAQVQFKPEFTVINTWSIPLGDHTAQLAEVAAVEFACKKALKIDGPVLIVTDSFYVAESVNKELPYWQSNGFFNNKKKPLKHVSKWKSIADCIQLKPDIIIIHEKGHQPTASTFHTEGNNLADKLATQGSYVVNAGKRTADGSEFEKRTADGSEFESPKKKAKVE

SEQ ID NO: 516 - protein, 2171 aa, synthetic construct
MPAAKRVKLDGGDKKYSIGLDIGTNSVGWAVITDEYKVPSKKFKVLGNTDRHSIKKNLIGALLFDSGETAEATRLKRTARRRYTRRKNRICYLQEIFSNEMAKVDDSFFHRLEESFLVEEDKKHERHPIFGNIVDEVAYHEKYPTIYHLRKKLVDSTDKADLRLIYLALAHMIKFRGHFLIEGDLNPDNSDVDKLFIQLVQTYNQLFEENPINASGVDAKAILSARLSKSRRLENLIAQLPGEKKNGLFGNLIALSLGLTPNFKSNFDLAEDAKLQLSKDTYDDDLDNLLAQIGDQYADLFLAAKNLSDAILLSDILRVNTEITKAPLSASMIKRYDEHHQDLTLLKALVRQQLPEKYKEIFFDQSKNGYAGYIDGGASQEEFYKFIKPILEKMDGTEELLVKLNREDLLRKQRTFDNGSIPHQIHLGELHAILRRQEDFYPFLKDNREKIEKILTFRIPYYVGPLARGNSRFAWMTRKSEETITPWNFEEVVDKGASAQSFIERMTNFDKNLPNEKVLPKHSLLYEYFTVYNELTKVKYVTEGMRKPAFLSGEQKKAIVDLLFKTNRKVTVKQLKEDYFKKIECFDSVEISGVEDRFNASLGTYHDLLKIIKDKDFLDNEENEDILEDIVLTLTLFEDREMIEERLKTYAHLFDDKVMKQLKRRRYTGWGRLSRKLINGIRDKQSGKTILDFLKSDGFANRNFMQLIHDDSLTFKEDIQKAQVSGQGDSLHEHIANLAGSPAIKKGILQTVKVVDELVKVMGRHKPENIVIEMARENQTTQKGQKNSRERMKRIEEGIKELGSQILKEHPVENTQLQNEKLYLYYLQNGRDMYVDQELDINRLSDYDVDHIVPQSFLKDDSIDNKVLTRSDKARGKSDNVPSEEVVKKMKNYWRQLLNAKLITQRKFDNLTKAERGGLSELDKAGFIKRQLVETRQITKHVAQILDSRMNTKYDENDKLIREVKVITLKSKLVSDFRKDFQFYKVREINNYHHAHDAYLNAVVGTALIKKYPKLESEFVYGDYKVYDVRKMIAKSEQEIGKATAKYFFYSNIMNFFKTEITLANGEIRKRPLIETNGETGEIVWDKGRDFATVRKVLSMPQVNIVKKTEVQTGGFSKESILPKRNSDKLIARKKDWDPKKYGGFDSPTVAYSVLVVAKVEKGKSKKLKSVKELLGITIMERSSFEKNPIDFLEAKGYKEVKKDLIIKLPKYSLFELENGRKRMLASAGELQKGNELALPSKYVNFLYLASHYEKLKGSPEDNEQKQLFVEQHKHYLDEIIEQISEFSKRVILADANLDKVLSAYNKHRDKPIREQAENIIHLFTLTNLGAPAAFKYFDTTIDRKRYTSTKEVLDATLIHQSITGLYETRIDLSQLGGDGGPAPGGGGGMDPLQLLQPLEAEIKGTKLKAHWNSGATITCVPQAFLEEEVPIKNIWIKTIHGEKEQPVYYLTFKIQGRKVEAEVISSPYDYILVSPSDIPWLMKKPLQLTTLVPLQEYEERLLKQTMLTGSYKEKLQSLFLKYDALWQHWENQVGHRRIKPHHIATGTVNPRPQKQYPINPKAKASIQTVINDLLKQGVLIQQNSIMNTPVYPVPKPDGKWRMVLDYREVNKTIPLIAAQNQHSAGILSSIFRGKYKTTLDLSNGFWAHSITPESYWLTAFTWLGQQYCWTRLPQGFLNSPALFTADVVDLLKEVPNVQVYVDDIYISHDDPREHLEQLEKVFSLLLNAGYVVSLKKSEIAQHEVEFLGFNITKEGRGLTETFKQKLLNITPPRDLKQLQSILGLLNFARNFIPNFSELVKPLYNIIATANGKYITWTTDNSQQLQNIISMLNSAENLEERNPEVRLIMKVNTSPSAGYIRFYNEFAKRPIMYLNYVYTKAEVKFTNTEKLLTTIHKGLIKALDLGMGQEILVYSPIVSMTKIQKTPLPERKALPIRWITWMSYLEDPRIQFHYDKTLPELQQVPTVTDDIIAKIKHPSEFSMVFYTDGSAIKHPNVNKSHNAGMGIAQVQFKPEFTVINTWSIPLGDHTAQLAEVAAVEFACKKALKIDGPVLIVTDSFYVAESVNKELPYWQSNGFFNNKKKPLKHVSKWKSIADCIQLKPDIIIIHEKGHQPTASTFHTEGNNLADKLATQGSYVVNAGKRTADGSEFEKRTADGSEFESPKKKAKVE

SEQ ID NO: 517 - protein, 2176 aa, synthetic construct
MPAAKRVKLDGGDKKYSIGLDIGTNSVGWAVITDEYKVPSKKFKVLGNTDRHSIKKNLIGALLFDSGETAEATRLKRTARRRYTRRKNRICYLQEIFSNEMAKVDDSFFHRLEESFLVEEDKKHERHPIFGNIVDEVAYHEKYPTIYHLRKKLVDSTDKADLRLIYLALAHMIKFRGHFLIEGDLNPDNSDVDKLFIQLVQTYNQLFEENPINASGVDAKAILSARLSKSRRLENLIAQLPGEKKNGLFGNLIALSLGLTPNFKSNFDLAEDAKLQLSKDTYDDDLDNLLAQIGDQYADLFLAAKNLSDAILLSDILRVNTEITKAPLSASMIKRYDEHHQDLTLLKALVRQQLPEKYKEIFFDQSKNGYAGYIDGGASQEEFYKFIKPILEKMDGTEELLVKLNREDLLRKQRTFDNGSIPHQIHLGELHAILRRQEDFYPFLKDNREKIEKILTFRIPYYVGPLARGNSRFAWMTRKSEETITPWNFEEVVDKGASAQSFIERMTNFDKNLPNEKVLPKHSLLYEYFTVYNELTKVKYVTEGMRKPAFLSGEQKKAIVDLLFKTNRKVTVKQLKEDYFKKIECFDSVEISGVEDRFNASLGTYHDLLKIIKDKDFLDNEENEDILEDIVLTLTLFEDREMIEERLKTYAHLFDDKVMKQLKRRRYTGWGRLSRKLINGIRDKQSGKTILDFLKSDGFANRNFMQLIHDDSLTFKEDIQKAQVSGQGDSLHEHIANLAGSPAIKKGILQTVKVVDELVKVMGRHKPENIVIEMARENQTTQKGQKNSRERMKRIEEGIKELGSQILKEHPVENTQLQNEKLYLYYLQNGRDMYVDQELDINRLSDYDVDHIVPQSFLKDDSIDNKVLTRSDKARGKSDNVPSEEVVKKMKNYWRQLLNAKLITQRKFDNLTKAERGGLSELDKAGFIKRQLVETRQITKHVAQILDSRMNTKYDENDKLIREVKVITLKSKLVSDFRKDFQFYKVREINNYHHAHDAYLNAVVGTALIKKYPKLESEFVYGDYKVYDVRKMIAKSEQEIGKATAKYFFYSNIMNFFKTEITLANGEIRKRPLIETNGETGEIVWDKGRDFATVRKVLSMPQVNIVKKTEVQTGGFSKESILPKRNSDKLIARKKDWDPKKYGGFDSPTVAYSVLVVAKVEKGKSKKLKSVKELLGITIMERSSFEKNPIDFLEAKGYKEVKKDLIIKLPKYSLFELENGRKRMLASAGELQKGNELALPSKYVNFLYLASHYEKLKGSPEDNEQKQLFVEQHKHYLDEIIEQISEFSKRVILADANLDKVLSAYNKHRDKPIREQAENIIHLFTLTNLGAPAAFKYFDTTIDRKRYTSTKEVLDATLIHQSITGLYETRIDLSQLGGDGGEAAAKGSSGGSGGMDPLQLLQPLEAEIKGTKLKAHWNSGATITCVPQAFLEEEVPIKNIWIKTIHGEKEQPVYYLTFKIQGRKVEAEVISSPYDYILVSPSDIPWLMKKPLQLTTLVPLQEYEERLLKQTMLTGSYKEKLQSLFLKYDALWQHWENQVGHRRIKPHHIATGTVNPRPQKQYPINPKAKASIQTVINDLLKQGVLIQQNSIMNTPVYPVPKPDGKWRMVLDYREVNKTIPLIAAQNQHSAGILSSIFRGKYKTTLDLSNGFWAHSITPESYWLTAFTWLGQQYCWTRLPQGFLNSPALFTADVVDLLKEVPNVQVYVDDIYISHDDPREHLEQLEKVFSLLLNAGYVVSLKKSEIAQHEVEFLGFNITKEGRGLTETFKQKLLNITPPRDLKQLQSILGLLNFARNFIPNFSELVKPLYNIIATANGKYITWTTDNSQQLQNIISMLNSAENLEERNPEVRLIMKVNTSPSAGYIRFYNEFAKRPIMYLNYVYTKAEVKFTNTEKLLTTIHKGLIKALDLGMGQEILVYSPIVSMTKIQKTPLPERKALPIRWITWMSYLEDPRIQFHYDKTLPELQQVPTVTDDIIAKIKHPSEFSMVFYTDGSAIKHPNVNKSHNAGMGIAQVQFKPEFTVINTWSIPLGDHTAQLAEVAAVEFACKKALKIDGPVLIVTDSFYVAESVNKELPYWQSNGFFNNKKKPLKHVSKWKSIADCIQLKPDIIIIHEKGHQPTASTFHTEGNNLADKLATQGSYVVNAGKRTADGSEFEKRTADGSEFESPKKKAKVE

SEQ ID NO: 518 - protein, 2174 aa, synthetic construct
MPAAKRVKLDGGDKKYSIGLDIGTNSVGWAVITDEYKVPSKKFKVLGNTDRHSIKKNLIGALLFDSGETAEATRLKRTARRRYTRRKNRICYLQEIFSNEMAKVDDSFFHRLEESFLVEEDKKHERHPIFGNIVDEVAYHEKYPTIYHLRKKLVDSTDKADLRLIYLALAHMIKFRGHFLIEGDLNPDNSDVDKLFIQLVQTYNQLFEENPINASGVDAKAILSARLSKSRRLENLIAQLPGEKKNGLFGNLIALSLGLTPNFKSNFDLAEDAKLQLSKDTYDDDLDNLLAQIGDQYADLFLAAKNLSDAILLSDILRVNTEITKAPLSASMIKRYDEHHQDLTLLKALVRQQLPEKYKEIFFDQSKNGYAGYIDGGASQEEFYKFIKPILEKMDGTEELLVKLNREDLLRKQRTFDNGSIPHQIHLGELHAILRRQEDFYPFLKDNREKIEKILTFRIPYYVGPLARGNSRFAWMTRKSEETITPWNFEEVVDKGASAQSFIERMTNFDKNLPNEKVLPKHSLLYEYFTVYNELTKVKYVTEGMRKPAFLSGEQKKAIVDLLFKTNRKVTVKQLKEDYFKKIECFDSVEISGVEDRFNASLGTYHDLLKIIKDKDFLDNEENEDILEDIVLTLTLFEDREMIEERLKTYAHLFDDKVMKQLKRRRYTGWGRLSRKLINGIRDKQSGKTILDFLKSDGFANRNFMQLIHDDSLTFKEDIQKAQVSGQGDSLHEHIANLAGSPAIKKGILQTVKVVDELVKVMGRHKPENIVIEMARENQTTQKGQKNSRERMKRIEEGIKELGSQILKEHPVENTQLQNEKLYLYYLQNGRDMYVDQELDINRLSDYDVDHIVPQSFLKDDSIDNKVLTRSDKARGKSDNVPSEEVVKKMKNYWRQLLNAKLITQRKFDNLTKAERGGLSELDKAGFIKRQLVETRQITKHVAQILDSRMNTKYDENDKLIREVKVITLKSKLVSDFRKDFQFYKVREINNYHHAHDAYLNAVVGTALIKKYPKLESEFVYGDYKVYDVRKMIAKSEQEIGKATAKYFFYSNIMNFFKTEITLANGEIRKRPLIETNGETGEIVWDKGRDFATVRKVLSMPQVNIVKKTEVQTGGFSKESILPKRNSDKLIARKKDWDPKKYGGFDSPTVAYSVLVVAKVEKGKSKKLKSVKELLGITIMERSSFEKNPIDFLEAKGYKEVKKDLIIKLPKYSLFELENGRKRMLASAGELQKGNELALPSKYVNFLYLASHYEKLKGSPEDNEQKQLFVEQHKHYLDEIIEQISEFSKRVILADANLDKVLSAYNKHRDKPIREQAENIIHLFTLTNLGAPAAFKYFDTTIDRKRYTSTKEVLDATLIHQSITGLYETRIDLSQLGGDGGGGSPAPGSSGGMDPLQLLQPLEAEIKGTKLKAHWNSGATITCVPQAFLEEEVPIKNIWIKTIHGEKEQPVYYLTFKIQGRKVEAEVISSPYDYILVSPSDIPWLMKKPLQLTTLVPLQEYEERLLKQTMLTGSYKEKLQSLFLKYDALWQHWENQVGHRRIKPHHIATGTVNPRPQKQYPINPKAKASIQTVINDLLKQGVLIQQNSIMNTPVYPVPKPDGKWRMVLDYREVNKTIPLIAAQNQHSAGILSSIFRGKYKTTLDLSNGFWAHSITPESYWLTAFTWLGQQYCWTRLPQGFLNSPALFTADVVDLLKEVPNVQVYVDDIYISHDDPREHLEQLEKVFSLLLNAGYVVSLKKSEIAQHEVEFLGFNITKEGRGLTETFKQKLLNITPPRDLKQLQSILGLLNFARNFIPNFSELVKPLYNIIATANGKYITWTTDNSQQLQNIISMLNSAENLEERNPEVRLIMKVNTSPSAGYIRFYNEFAKRPIMYLNYVYTKAEVKFTNTEKLLTTIHKGLIKALDLGMGQEILVYSPIVSMTKIQKTPLPERKALPIRWITWMSYLEDPRIQFHYDKTLPELQQVPTVTDDIIAKIKHPSEFSMVFYTDGSAIKHPNVNKSHNAGMGIAQVQFKPEFTVINTWSIPLGDHTAQLAEVAAVEFACKKALKIDGPVLIVTDSFYVAESVNKELPYWQSNGFFNNKKKPLKHVSKWKSIADCIQLKPDIIIIHEKGHQPTASTFHTEGNNLADKLATQGSYVVNAGKRTADGSEFEKRTADGSEFESPKKKAKVE

SEQ ID NO: 519 - protein, 2175 aa, synthetic construct
MPAAKRVKLDGGDKKYSIGLDIGTNSVGWAVITDEYKVPSKKFKVLGNTDRHSIKKNLIGALLFDSGETAEATRLKRTARRRYTRRKNRICYLQEIFSNEMAKVDDSFFHRLEESFLVEEDKKHERHPIFGNIVDEVAYHEKYPTIYHLRKKLVDSTDKADLRLIYLALAHMIKFRGHFLIEGDLNPDNSDVDKLFIQLVQTYNQLFEENPINASGVDAKAILSARLSKSRRLENLIAQLPGEKKNGLFGNLIALSLGLTPNFKSNFDLAEDAKLQLSKDTYDDDLDNLLAQIGDQYADLFLAAKNLSDAILLSDILRVNTEITKAPLSASMIKRYDEHHQDLTLLKALVRQQLPEKYKEIFFDQSKNGYAGYIDGGASQEEFYKFIKPILEKMDGTEELLVKLNREDLLRKQRTFDNGSIPHQIHLGELHAILRRQEDFYPFLKDNREKIEKILTFRIPYYVGPLARGNSRFAWMTRKSEETITPWNFEEVVDKGASAQSFIERMTNFDKNLPNEKVLPKHSLLYEYFTVYNELTKVKYVTEGMRKPAFLSGEQKKAIVDLLFKTNRKVTVKQLKEDYFKKIECFDSVEISGVEDRFNASLGTYHDLLKIIKDKDFLDNEENEDILEDIVLTLTLFEDREMIEERLKTYAHLFDDKVMKQLKRRRYTGWGRLSRKLINGIRDKQSGKTILDFLKSDGFANRNFMQLIHDDSLTFKEDIQKAQVSGQGDSLHEHIANLAGSPAIKKGILQTVKVVDELVKVMGRHKPENIVIEMARENQTTQKGQKNSRERMKRIEEGIKELGSQILKEHPVENTQLQNEKLYLYYLQNGRDMYVDQELDINRLSDYDVDHIVPQSFLKDDSIDNKVLTRSDKARGKSDNVPSEEVVKKMKNYWRQLLNAKLITQRKFDNLTKAERGGLSELDKAGFIKRQLVETRQITKHVAQILDSRMNTKYDENDKLIREVKVITLKSKLVSDFRKDFQFYKVREINNYHHAHDAYLNAVVGTALIKKYPKLESEFVYGDYKVYDVRKMIAKSEQEIGKATAKYFFYSNIMNFFKTEITLANGEIRKRPLIETNGETGEIVWDKGRDFATVRKVLSMPQVNIVKKTEVQTGGFSKESILPKRNSDKLIARKKDWDPKKYGGFDSPTVAYSVLVVAKVEKGKSKKLKSVKELLGITIMERSSFEKNPIDFLEAKGYKEVKKDLIIKLPKYSLFELENGRKRMLASAGELQKGNELALPSKYVNFLYLASHYEKLKGSPEDNEQKQLFVEQHKHYLDEIIEQISEFSKRVILADANLDKVLSAYNKHRDKPIREQAENIIHLFTLTNLGAPAAFKYFDTTIDRKRYTSTKEVLDATLIHQSITGLYETRIDLSQLGGDGGGGGGSGGGGSGGMDPLQLLQPLEAEIKGTKLKAHWNSGATITCVPQAFLEEEVPIKNIWIKTIHGEKEQPVYYLTFKIQGRKVEAEVISSPYDYILVSPSDIPWLMKKPLQLTTLVPLQEYEERLLKQTMLTGSYKEKLQSLFLKYDALWQHWENQVGHRRIKPHHIATGTVNPRPQKQYPINPKAKASIQTVINDLLKQGVLIQQNSIMNTPVYPVPKPDGKWRMVLDYREVNKTIPLIAAQNQHSAGILSSIFRGKYKTTLDLSNGFWAHSITPESYWLTAFTWLGQQYCWTRLPQGFLNSPALFTADVVDLLKEVPNVQVYVDDIYISHDDPREHLEQLEKVFSLLLNAGYVVSLKKSEIAQHEVEFLGFNITKEGRGLTETFKQKLLNITPPRDLKQLQSILGLLNFARNFIPNFSELVKPLYNIIATANGKYITWTTDNSQQLQNIISMLNSAENLEERNPEVRLIMKVNTSPSAGYIRFYNEFAKRPIMYLNYVYTKAEVKFTNTEKLLTTIHKGLIKALDLGMGQEILVYSPIVSMTKIQKTPLPERKALPIRWITWMSYLEDPRIQFHYDKTLPELQQVPTVTDDIIAKIKHPSEFSMVFYTDGSAIKHPNVNKSHNAGMGIAQVQFKPEFTVINTWSIPLGDHTAQLAEVAAVEFACKKALKIDGPVLIVTDSFYVAESVNKELPYWQSNGFFNNKKKPLKHVSKWKSIADCIQLKPDIIIIHEKGHQPTASTFHTEGNNLADKLATQGSYVVNAGKRTADGSEFEKRTADGSEFESPKKKAKVE

SEQ ID NO: 520 - protein, 2172 aa, synthetic construct
MPAAKRVKLDGGDKKYSIGLDIGTNSVGWAVITDEYKVPSKKFKVLGNTDRHSIKKNLIGALLFDSGETAEATRLKRTARRRYTRRKNRICYLQEIFSNEMAKVDDSFFHRLEESFLVEEDKKHERHPIFGNIVDEVAYHEKYPTIYHLRKKLVDSTDKADLRLIYLALAHMIKFRGHFLIEGDLNPDNSDVDKLFIQLVQTYNQLFEENPINASGVDAKAILSARLSKSRRLENLIAQLPGEKKNGLFGNLIALSLGLTPNFKSNFDLAEDAKLQLSKDTYDDDLDNLLAQIGDQYADLFLAAKNLSDAILLSDILRVNTEITKAPLSASMIKRYDEHHQDLTLLKALVRQQLPEKYKEIFFDQSKNGYAGYIDGGASQEEFYKFIKPILEKMDGTEELLVKLNREDLLRKQRTFDNGSIPHQIHLGELHAILRRQEDFYPFLKDNREKIEKILTFRIPYYVGPLARGNSRFAWMTRKSEETITPWNFEEVVDKGASAQSFIERMTNFDKNLPNEKVLPKHSLLYEYFTVYNELTKVKYVTEGMRKPAFLSGEQKKAIVDLLFKTNRKVTVKQLKEDYFKKIECFDSVEISGVEDRFNASLGTYHDLLKIIKDKDFLDNEENEDILEDIVLTLTLFEDREMIEERLKTYAHLFDDKVMKQLKRRRYTGWGRLSRKLINGIRDKQSGKTILDFLKSDGFANRNFMQLIHDDSLTFKEDIQKAQVSGQGDSLHEHIANLAGSPAIKKGILQTVKVVDELVKVMGRHKPENIVIEMARENQTTQKGQKNSRERMKRIEEGIKELGSQILKEHPVENTQLQNEKLYLYYLQNGRDMYVDQELDINRLSDYDVDHIVPQSFLKDDSIDNKVLTRSDKARGKSDNVPSEEVVKKMKNYWRQLLNAKLITQRKFDNLTKAERGGLSELDKAGFIKRQLVETRQITKHVAQILDSRMNTKYDENDKLIREVKVITLKSKLVSDFRKDFQFYKVREINNYHHAHDAYLNAVVGTALIKKYPKLESEFVYGDYKVYDVRKMIAKSEQEIGKATAKYFFYSNIMNFFKTEITLANGEIRKRPLIETNGETGEIVWDKGRDFATVRKVLSMPQVNIVKKTEVQTGGFSKESILPKRNSDKLIARKKDWDPKKYGGFDSPTVAYSVLVVAKVEKGKSKKLKSVKELLGITIMERSSFEKNPIDFLEAKGYKEVKKDLIIKLPKYSLFELENGRKRMLASAGELQKGNELALPSKYVNFLYLASHYEKLKGSPEDNEQKQLFVEQHKHYLDEIIEQISEFSKRVILADANLDKVLSAYNKHRDKPIREQAENIIHLFTLTNLGAPAAFKYFDTTIDRKRYTSTKEVLDATLIHQSITGLYETRIDLSQLGGDGGPAPAPAPGGMDPLQLLQPLEAEIKGTKLKAHWNSGATITCVPQAFLEEEVPIKNIWIKTIHGEKEQPVYYLTFKIQGRKVEAEVISSPYDYILVSPSDIPWLMKKPLQLTTLVPLQEYEERLLKQTMLTGSYKEKLQSLFLKYDALWQHWENQVGHRRIKPHHIATGTVNPRPQKQYPINPKAKASIQTVINDLLKQGVLIQQNSIMNTPVYPVPKPDGKWRMVLDYREVNKTIPLIAAQNQHSAGILSSIFRGKYKTTLDLSNGFWAHSITPESYWLTAFTWLGQQYCWTRLPQGFLNSPALFTADVVDLLKEVPNVQVYVDDIYISHDDPREHLEQLEKVFSLLLNAGYVVSLKKSEIAQHEVEFLGFNITKEGRGLTETFKQKLLNITPPRDLKQLQSILGLLNFARNFIPNFSELVKPLYNIIATANGKYITWTTDNSQQLQNIISMLNSAENLEERNPEVRLIMKVNTSPSAGYIRFYNEFAKRPIMYLNYVYTKAEVKFTNTEKLLTTIHKGLIKALDLGMGQEILVYSPIVSMTKIQKTPLPERKALPIRWITWMSYLEDPRIQFHYDKTLPELQQVPTVTDDIIAKIKHPSEFSMVFYTDGSAIKHPNVNKSHNAGMGIAQVQFKPEFTVINTWSIPLGDHTAQLAEVAAVEFACKKALKIDGPVLIVTDSFYVAESVNKELPYWQSNGFFNNKKKPLKHVSKWKSIADCIQLKPDIIIIHEKGHQPTASTFHTEGNNLADKLATQGSYVVNAGKRTADGSEFEKRTADGSEFESPKKKAKVE

SEQ ID NO: 521 - protein, 2174 aa, synthetic construct
MPAAKRVKLDGGDKKYSIGLDIGTNSVGWAVITDEYKVPSKKFKVLGNTDRHSIKKNLIGALLFDSGETAEATRLKRTARRRYTRRKNRICYLQEIFSNEMAKVDDSFFHRLEESFLVEEDKKHERHPIFGNIVDEVAYHEKYPTIYHLRKKLVDSTDKADLRLIYLALAHMIKFRGHFLIEGDLNPDNSDVDKLFIQLVQTYNQLFEENPINASGVDAKAILSARLSKSRRLENLIAQLPGEKKNGLFGNLIALSLGLTPNFKSNFDLAEDAKLQLSKDTYDDDLDNLLAQIGDQYADLFLAAKNLSDAILLSDILRVNTEITKAPLSASMIKRYDEHHQDLTLLKALVRQQLPEKYKEIFFDQSKNGYAGYIDGGASQEEFYKFIKPILEKMDGTEELLVKLNREDLLRKQRTFDNGSIPHQIHLGELHAILRRQEDFYPFLKDNREKIEKILTFRIPYYVGPLARGNSRFAWMTRKSEETITPWNFEEVVDKGASAQSFIERMTNFDKNLPNEKVLPKHSLLYEYFTVYNELTKVKYVTEGMRKPAFLSGEQKKAIVDLLFKTNRKVTVKQLKEDYFKKIECFDSVEISGVEDRFNASLGTYHDLLKIIKDKDFLDNEENEDILEDIVLTLTLFEDREMIEERLKTYAHLFDDKVMKQLKRRRYTGWGRLSRKLINGIRDKQSGKTILDFLKSDGFANRNFMQLIHDDSLTFKEDIQKAQVSGQGDSLHEHIANLAGSPAIKKGILQTVKVVDELVKVMGRHKPENIVIEMARENQTTQKGQKNSRERMKRIEEGIKELGSQILKEHPVENTQLQNEKLYLYYLQNGRDMYVDQELDINRLSDYDVDHIVPQSFLKDDSIDNKVLTRSDKARGKSDNVPSEEVVKKMKNYWRQLLNAKLITQRKFDNLTKAERGGLSELDKAGFIKRQLVETRQITKHVAQILDSRMNTKYDENDKLIREVKVITLKSKLVSDFRKDFQFYKVREINNYHHAHDAYLNAVVGTALIKKYPKLESEFVYGDYKVYDVRKMIAKSEQEIGKATAKYFFYSNIMNFFKTEITLANGEIRKRPLIETNGETGEIVWDKGRDFATVRKVLSMPQVNIVKKTEVQTGGFSKESILPKRNSDKLIARKKDWDPKKYGGFDSPTVAYSVLVVAKVEKGKSKKLKSVKELLGITIMERSSFEKNPIDFLEAKGYKEVKKDLIIKLPKYSLFELENGRKRMLASAGELQKGNELALPSKYVNFLYLASHYEKLKGSPEDNEQKQLFVEQHKHYLDEIIEQISEFSKRVILADANLDKVLSAYNKHRDKPIREQAENIIHLFTLTNLGAPAAFKYFDTTIDRKRYTSTKEVLDATLIHQSITGLYETRIDLSQLGGDGGGSSGGSGGGGGMDPLQLLQPLEAEIKGTKLKAHWNSGATITCVPQAFLEEEVPIKNIWIKTIHGEKEQPVYYLTFKIQGRKVEAEVISSPYDYILVSPSDIPWLMKKPLQLTTLVPLQEYEERLLKQTMLTGSYKEKLQSLFLKYDALWQHWENQVGHRRIKPHHIATGTVNPRPQKQYPINPKAKASIQTVINDLLKQGVLIQQNSIMNTPVYPVPKPDGKWRMVLDYREVNKTIPLIAAQNQHSAGILSSIFRGKYKTTLDLSNGFWAHSITPESYWLTAFTWLGQQYCWTRLPQGFLNSPALFTADVVDLLKEVPNVQVYVDDIYISHDDPREHLEQLEKVFSLLLNAGYVVSLKKSEIAQHEVEFLGFNITKEGRGLTETFKQKLLNITPPRDLKQLQSILGLLNFARNFIPNFSELVKPLYNIIATANGKYITWTTDNSQQLQNIISMLNSAENLEERNPEVRLIMKVNTSPSAGYIRFYNEFAKRPIMYLNYVYTKAEVKFTNTEKLLTTIHKGLIKALDLGMGQEILVYSPIVSMTKIQKTPLPERKALPIRWITWMSYLEDPRIQFHYDKTLPELQQVPTVTDDIIAKIKHPSEFSMVFYTDGSAIKHPNVNKSHNAGMGIAQVQFKPEFTVINTWSIPLGDHTAQLAEVAAVEFACKKALKIDGPVLIVTDSFYVAESVNKELPYWQSNGFFNNKKKPLKHVSKWKSIADCIQLKPDIIIIHEKGHQPTASTFHTEGNNLADKLATQGSYVVNAGKRTADGSEFEKRTADGSEFESPKKKAKVE

SEQ ID NO: 522 - protein, 2010 aa, synthetic construct
MPAAKRVKLDGGDKKYSIGLDIGTNSVGWAVITDEYKVPSKKFKVLGNTDRHSIKKNLIGALLFDSGETAEATRLKRTARRRYTRRKNRICYLQEIFSNEMAKVDDSFFHRLEESFLVEEDKKHERHPIFGNIVDEVAYHEKYPTIYHLRKKLVDSTDKADLRLIYLALAHMIKFRGHFLIEGDLNPDNSDVDKLFIQLVQTYNQLFEENPINASGVDAKAILSARLSKSRRLENLIAQLPGEKKNGLFGNLIALSLGLTPNFKSNFDLAEDAKLQLSKDTYDDDLDNLLAQIGDQYADLFLAAKNLSDAILLSDILRVNTEITKAPLSASMIKRYDEHHQDLTLLKALVRQQLPEKYKEIFFDQSKNGYAGYIDGGASQEEFYKFIKPILEKMDGTEELLVKLNREDLLRKQRTFDNGSIPHQIHLGELHAILRRQEDFYPFLKDNREKIEKILTFRIPYYVGPLARGNSRFAWMTRKSEETITPWNFEEVVDKGASAQSFIERMTNFDKNLPNEKVLPKHSLLYEYFTVYNELTKVKYVTEGMRKPAFLSGEQKKAIVDLLFKTNRKVTVKQLKEDYFKKIECFDSVEISGVEDRFNASLGTYHDLLKIIKDKDFLDNEENEDILEDIVLTLTLFEDREMIEERLKTYAHLFDDKVMKQLKRRRYTGWGRLSRKLINGIRDKQSGKTILDFLKSDGFANRNFMQLIHDDSLTFKEDIQKAQVSGQGDSLHEHIANLAGSPAIKKGILQTVKVVDELVKVMGRHKPENIVIEMARENQTTQKGQKNSRERMKRIEEGIKELGSQILKEHPVENTQLQNEKLYLYYLQNGRDMYVDQELDINRLSDYDVDHIVPQSFLKDDSIDNKVLTRSDKARGKSDNVPSEEVVKKMKNYWRQLLNAKLITQRKFDNLTKAERGGLSELDKAGFIKRQLVETRQITKHVAQILDSRMNTKYDENDKLIREVKVITLKSKLVSDFRKDFQFYKVREINNYHHAHDAYLNAVVGTALIKKYPKLESEFVYGDYKVYDVRKMIAKSEQEIGKATAKYFFYSNIMNFFKTEITLANGEIRKRPLIETNGETGEIVWDKGRDFATVRKVLSMPQVNIVKKTEVQTGGFSKESILPKRNSDKLIARKKDWDPKKYGGFDSPTVAYSVLVVAKVEKGKSKKLKSVKELLGITIMERSSFEKNPIDFLEAKGYKEVKKDLIIKLPKYSLFELENGRKRMLASAGELQKGNELALPSKYVNFLYLASHYEKLKGSPEDNEQKQLFVEQHKHYLDEIIEQISEFSKRVILADANLDKVLSAYNKHRDKPIREQAENIIHLFTLTNLGAPAAFKYFDTTIDRKRYTSTKEVLDATLIHQSITGLYETRIDLSQLGGDGGGGGGSGGGGSGGGGSGGGGSGGGVLDTPPSHIGLEHLPPPPEVPQFPLNLERLQALQDLVHRSLEAGYISPWDGPGNNPVFPVRKPNGAWRFVHDLRATNALTKPIPALSPGPPDLTAPPTHPPHIICLDLKDAFFQIPVEDRFRFYLSFTLPSPGGLQPHRRFAWRVLPQGFINSPALFQRALQEPLRQVSAAFSQSLLVSYMDDILYASPTEEQRSQCYQALAARLRDLGFQVASEKTSQTPSPVPFLGQMVHEQIVTYQSLPTLQISSPISLHQLQAVLGDLQWVSRGTPTTRRPLQLLYSSLKRHHDPRAIIQLSPEQLQGIAELRQALSHNARSRYNEQEPLLAYVHLTRAGSTLVLFQKGAQFPLAYFQTPLTDNQASPWGLLLLLGCQYLQTQALSSYAKPILKYYHNLPKTSLDNWIQSSEDPRVQELLQLWPQISSQGIQPPGPWKTLITRAEVFLTPQFSPDPIPAALCLFSDGATGRGAYCLWKDHLLDFQAVPAPESAQKGELAGLLAGLAAAPPEPVNIWVDSKYLYSLLRTWVLGAWLQPDPVPSYALLYKSLLRHPAIVVGHVRSHSSASHPIASLNNYVDQLAGKRTADGSEFEKRTADGSEFESPKKKAKVE

SEQ ID NO: 523 - protein, 1995 aa, synthetic construct
MPAAKRVKLDGGDKKYSIGLDIGTNSVGWAVITDEYKVPSKKFKVLGNTDRHSIKKNLIGALLFDSGETAEATRLKRTARRRYTRRKNRICYLQEIFSNEMAKVDDSFFHRLEESFLVEEDKKHERHPIFGNIVDEVAYHEKYPTIYHLRKKLVDSTDKADLRLIYLALAHMIKFRGHFLIEGDLNPDNSDVDKLFIQLVQTYNQLFEENPINASGVDAKAILSARLSKSRRLENLIAQLPGEKKNGLFGNLIALSLGLTPNFKSNFDLAEDAKLQLSKDTYDDDLDNLLAQIGDQYADLFLAAKNLSDAILLSDILRVNTEITKAPLSASMIKRYDEHHQDLTLLKALVRQQLPEKYKEIFFDQSKNGYAGYIDGGASQEEFYKFIKPILEKMDGTEELLVKLNREDLLRKQRTFDNGSIPHQIHLGELHAILRRQEDFYPFLKDNREKIEKILTFRIPYYVGPLARGNSRFAWMTRKSEETITPWNFEEVVDKGASAQSFIERMTNFDKNLPNEKVLPKHSLLYEYFTVYNELTKVKYVTEGMRKPAFLSGEQKKAIVDLLFKTNRKVTVKQLKEDYFKKIECFDSVEISGVEDRFNASLGTYHDLLKIIKDKDFLDNEENEDILEDIVLTLTLFEDREMIEERLKTYAHLFDDKVMKQLKRRRYTGWGRLSRKLINGIRDKQSGKTILDFLKSDGFANRNFMQLIHDDSLTFKEDIQKAQVSGQGDSLHEHIANLAGSPAIKKGILQTVKVVDELVKVMGRHKPENIVIEMARENQTTQKGQKNSRERMKRIEEGIKELGSQILKEHPVENTQLQNEKLYLYYLQNGRDMYVDQELDINRLSDYDVDHIVPQSFLKDDSIDNKVLTRSDKARGKSDNVPSEEVVKKMKNYWRQLLNAKLITQRKFDNLTKAERGGLSELDKAGFIKRQLVETRQITKHVAQILDSRMNTKYDENDKLIREVKVITLKSKLVSDFRKDFQFYKVREINNYHHAHDAYLNAVVGTALIKKYPKLESEFVYGDYKVYDVRKMIAKSEQEIGKATAKYFFYSNIMNFFKTEITLANGEIRKRPLIETNGETGEIVWDKGRDFATVRKVLSMPQVNIVKKTEVQTGGFSKESILPKRNSDKLIARKKDWDPKKYGGFDSPTVAYSVLVVAKVEKGKSKKLKSVKELLGITIMERSSFEKNPIDFLEAKGYKEVKKDLIIKLPKYSLFELENGRKRMLASAGELQKGNELALPSKYVNFLYLASHYEKLKGSPEDNEQKQLFVEQHKHYLDEIIEQISEFSKRVILADANLDKVLSAYNKHRDKPIREQAENIIHLFTLTNLGAPAAFKYFDTTIDRKRYTSTKEVLDATLIHQSITGLYETRIDLSQLGGDGGGGGGGGGGVLDTPPSHIGLEHLPPPPEVPQFPLNLERLQALQDLVHRSLEAGYISPWDGPGNNPVFPVRKPNGAWRFVHDLRATNALTKPIPALSPGPPDLTAPPTHPPHIICLDLKDAFFQIPVEDRFRFYLSFTLPSPGGLQPHRRFAWRVLPQGFINSPALFQRALQEPLRQVSAAFSQSLLVSYMDDILYASPTEEQRSQCYQALAARLRDLGFQVASEKTSQTPSPVPFLGQMVHEQIVTYQSLPTLQISSPISLHQLQAVLGDLQWVSRGTPTTRRPLQLLYSSLKRHHDPRAIIQLSPEQLQGIAELRQALSHNARSRYNEQEPLLAYVHLTRAGSTLVLFQKGAQFPLAYFQTPLTDNQASPWGLLLLLGCQYLQTQALSSYAKPILKYYHNLPKTSLDNWIQSSEDPRVQELLQLWPQISSQGIQPPGPWKTLITRAEVFLTPQFSPDPIPAALCLFSDGATGRGAYCLWKDHLLDFQAVPAPESAQKGELAGLLAGLAAAPPEPVNIWVDSKYLYSLLRTWVLGAWLQPDPVPSYALLYKSLLRHPAIVVGHVRSHSSASHPIASLNNYVDQLAGKRTADGSEFEKRTADGSEFESPKKKAKVE

SEQ ID NO: 524 - protein, 2122 aa, synthetic construct
MPAAKRVKLDGGDKKYSIGLDIGTNSVGWAVITDEYKVPSKKFKVLGNTDRHSIKKNLIGALLFDSGETAEATRLKRTARRRYTRRKNRICYLQEIFSNEMAKVDDSFFHRLEESFLVEEDKKHERHPIFGNIVDEVAYHEKYPTIYHLRKKLVDSTDKADLRLIYLALAHMIKFRGHFLIEGDLNPDNSDVDKLFIQLVQTYNQLFEENPINASGVDAKAILSARLSKSRRLENLIAQLPGEKKNGLFGNLIALSLGLTPNFKSNFDLAEDAKLQLSKDTYDDDLDNLLAQIGDQYADLFLAAKNLSDAILLSDILRVNTEITKAPLSASMIKRYDEHHQDLTLLKALVRQQLPEKYKEIFFDQSKNGYAGYIDGGASQEEFYKFIKPILEKMDGTEELLVKLNREDLLRKQRTFDNGSIPHQIHLGELHAILRRQEDFYPFLKDNREKIEKILTFRIPYYVGPLARGNSRFAWMTRKSEETITPWNFEEVVDKGASAQSFIERMTNFDKNLPNEKVLPKHSLLYEYFTVYNELTKVKYVTEGMRKPAFLSGEQKKAIVDLLFKTNRKVTVKQLKEDYFKKIECFDSVEISGVEDRFNASLGTYHDLLKIIKDKDFLDNEENEDILEDIVLTLTLFEDREMIEERLKTYAHLFDDKVMKQLKRRRYTGWGRLSRKLINGIRDKQSGKTILDFLKSDGFANRNFMQLIHDDSLTFKEDIQKAQVSGQGDSLHEHIANLAGSPAIKKGILQTVKVVDELVKVMGRHKPENIVIEMARENQTTQKGQKNSRERMKRIEEGIKELGSQILKEHPVENTQLQNEKLYLYYLQNGRDMYVDQELDINRLSDYDVDHIVPQSFLKDDSIDNKVLTRSDKARGKSDNVPSEEVVKKMKNYWRQLLNAKLITQRKFDNLTKAERGGLSELDKAGFIKRQLVETRQITKHVAQILDSRMNTKYDENDKLIREVKVITLKSKLVSDFRKDFQFYKVREINNYHHAHDAYLNAVVGTALIKKYPKLESEFVYGDYKVYDVRKMIAKSEQEIGKATAKYFFYSNIMNFFKTEITLANGEIRKRPLIETNGETGEIVWDKGRDFATVRKVLSMPQVNIVKKTEVQTGGFSKESILPKRNSDKLIARKKDWDPKKYGGFDSPTVAYSVLVVAKVEKGKSKKLKSVKELLGITIMERSSFEKNPIDFLEAKGYKEVKKDLIIKLPKYSLFELENGRKRMLASAGELQKGNELALPSKYVNFLYLASHYEKLKGSPEDNEQKQLFVEQHKHYLDEIIEQISEFSKRVILADANLDKVLSAYNKHRDKPIREQAENIIHLFTLTNLGAPAAFKYFDTTIDRKRYTSTKEVLDATLIHQSITGLYETRIDLSQLGGDGGAEAAAKEAAAKEAAAKEAAAKALEAEAAAKEAAAKEAAAKEAAAKAGGIPWLMKKPLQLTTLVPLQEYEERLLKQTMLTGSYKEKLQSLFLKYDALWQHWENQVGHRRIKPHHIATGTVNPRPQKQYPINPKAKASIQTVINDLLKQGVLIQQNSIMNTPVYPVPKPDGKWRMVLDYREVNKTIPLIAAQNQHSAGILSSIFRGKYKTTLDLSNGFWAHSITPESYWLTAFTWLGQQYCWTRLPQGFLNSPALFTADVVDLLKEVPNVQVYVDDIYISHDDPREHLEQLEKVFSLLLNAGYVVSLKKSEIAQHEVEFLGFNITKEGRGLTETFKQKLLNITPPRDLKQLQSILGLLNFARNFIPNFSELVKPLYNIIATANGKYITWTTDNSQQLQNIISMLNSAENLEERNPEVRLIMKVNTSPSAGYIRFYNEFAKRPIMYLNYVYTKAEVKFTNTEKLLTTIHKGLIKALDLGMGQEILVYSPIVSMTKIQKTPLPERKALPIRWITWMSYLEDPRIQFHYDKTLPELQQVPTVTDDIIAKIKHPSEFSMVFYTDGSAIKHPNVNKSHNAGMGIAQVQFKPEFTVINTWSIPLGDHTAQLAEVAAVEFACKKALKIDGPVLIVTDSFYVAESVNKELPYWQSNGFFNNKKKPLKHVSKWKSIADCIQLKPDIIIIHEKGHQPTASTFHTEGNNLADKLATQGSYVVNAGKRTADGSEFEKRTADGSEFESPKKKAKVE

SEQ ID NO: 525 - protein, 2096 aa, synthetic construct
MPAAKRVKLDGGDKKYSIGLDIGTNSVGWAVITDEYKVPSKKFKVLGNTDRHSIKKNLIGALLFDSGETAEATRLKRTARRRYTRRKNRICYLQEIFSNEMAKVDDSFFHRLEESFLVEEDKKHERHPIFGNIVDEVAYHEKYPTIYHLRKKLVDSTDKADLRLIYLALAHMIKFRGHFLIEGDLNPDNSDVDKLFIQLVQTYNQLFEENPINASGVDAKAILSARLSKSRRLENLIAQLPGEKKNGLFGNLIALSLGLTPNFKSNFDLAEDAKLQLSKDTYDDDLDNLLAQIGDQYADLFLAAKNLSDAILLSDILRVNTEITKAPLSASMIKRYDEHHQDLTLLKALVRQQLPEKYKEIFFDQSKNGYAGYIDGGASQEEFYKFIKPILEKMDGTEELLVKLNREDLLRKQRTFDNGSIPHQIHLGELHAILRRQEDFYPFLKDNREKIEKILTFRIPYYVGPLARGNSRFAWMTRKSEETITPWNFEEVVDKGASAQSFIERMTNFDKNLPNEKVLPKHSLLYEYFTVYNELTKVKYVTEGMRKPAFLSGEQKKAIVDLLFKTNRKVTVKQLKEDYFKKIECFDSVEISGVEDRFNASLGTYHDLLKIIKDKDFLDNEENEDILEDIVLTLTLFEDREMIEERLKTYAHLFDDKVMKQLKRRRYTGWGRLSRKLINGIRDKQSGKTILDFLKSDGFANRNFMQLIHDDSLTFKEDIQKAQVSGQGDSLHEHIANLAGSPAIKKGILQTVKVVDELVKVMGRHKPENIVIEMARENQTTQKGQKNSRERMKRIEEGIKELGSQILKEHPVENTQLQNEKLYLYYLQNGRDMYVDQELDINRLSDYDVDHIVPQSFLKDDSIDNKVLTRSDKARGKSDNVPSEEVVKKMKNYWRQLLNAKLITQRKFDNLTKAERGGLSELDKAGFIKRQLVETRQITKHVAQILDSRMNTKYDENDKLIREVKVITLKSKLVSDFRKDFQFYKVREINNYHHAHDAYLNAVVGTALIKKYPKLESEFVYGDYKVYDVRKMIAKSEQEIGKATAKYFFYSNIMNFFKTEITLANGEIRKRPLIETNGETGEIVWDKGRDFATVRKVLSMPQVNIVKKTEVQTGGFSKESILPKRNSDKLIARKKDWDPKKYGGFDSPTVAYSVLVVAKVEKGKSKKLKSVKELLGITIMERSSFEKNPIDFLEAKGYKEVKKDLIIKLPKYSLFELENGRKRMLASAGELQKGNELALPSKYVNFLYLASHYEKLKGSPEDNEQKQLFVEQHKHYLDEIIEQISEFSKRVILADANLDKVLSAYNKHRDKPIREQAENIIHLFTLTNLGAPAAFKYFDTTIDRKRYTSTKEVLDATLIHQSITGLYETRIDLSQLGGDGGEAAAKEAAAKEAAAKEAAAKGGIPWLMKKPLQLTTLVPLQEYEERLLKQTMLTGSYKEKLQSLFLKYDALWQHWENQVGHRRIKPHHIATGTVNPRPQKQYPINPKAKASIQTVINDLLKQGVLIQQNSIMNTPVYPVPKPDGKWRMVLDYREVNKTIPLIAAQNQHSAGILSSIFRGKYKTTLDLSNGFWAHSITPESYWLTAFTWLGQQYCWTRLPQGFLNSPALFTADVVDLLKEVPNVQVYVDDIYISHDDPREHLEQLEKVFSLLLNAGYVVSLKKSEIAQHEVEFLGFNITKEGRGLTETFKQKLLNITPPRDLKQLQSILGLLNFARNFIPNFSELVKPLYNIIATANGKYITWTTDNSQQLQNIISMLNSAENLEERNPEVRLIMKVNTSPSAGYIRFYNEFAKRPIMYLNYVYTKAEVKFTNTEKLLTTIHKGLIKALDLGMGQEILVYSPIVSMTKIQKTPLPERKALPIRWITWMSYLEDPRIQFHYDKTLPELQQVPTVTDDIIAKIKHPSEFSMVFYTDGSAIKHPNVNKSHNAGMGIAQVQFKPEFTVINTWSIPLGDHTAQLAEVAAVEFACKKALKIDGPVLIVTDSFYVAESVNKELPYWQSNGFFNNKKKPLKHVSKWKSIADCIQLKPDIIIIHEKGHQPTASTFHTEGNNLADKLATQGSYVVNAGKRTADGSEFEKRTADGSEFESPKKKAKVE

SEQ ID NO: 526 - protein, 2087 aa, synthetic construct
MPAAKRVKLDGGDKKYSIGLDIGTNSVGWAVITDEYKVPSKKFKVLGNTDRHSIKKNLIGALLFDSGETAEATRLKRTARRRYTRRKNRICYLQEIFSNEMAKVDDSFFHRLEESFLVEEDKKHERHPIFGNIVDEVAYHEKYPTIYHLRKKLVDSTDKADLRLIYLALAHMIKFRGHFLIEGDLNPDNSDVDKLFIQLVQTYNQLFEENPINASGVDAKAILSARLSKSRRLENLIAQLPGEKKNGLFGNLIALSLGLTPNFKSNFDLAEDAKLQLSKDTYDDDLDNLLAQIGDQYADLFLAAKNLSDAILLSDILRVNTEITKAPLSASMIKRYDEHHQDLTLLKALVRQQLPEKYKEIFFDQSKNGYAGYIDGGASQEEFYKFIKPILEKMDGTEELLVKLNREDLLRKQRTFDNGSIPHQIHLGELHAILRRQEDFYPFLKDNREKIEKILTFRIPYYVGPLARGNSRFAWMTRKSEETITPWNFEEVVDKGASAQSFIERMTNFDKNLPNEKVLPKHSLLYEYFTVYNELTKVKYVTEGMRKPAFLSGEQKKAIVDLLFKTNRKVTVKQLKEDYFKKIECFDSVEISGVEDRFNASLGTYHDLLKIIKDKDFLDNEENEDILEDIVLTLTLFEDREMIEERLKTYAHLFDDKVMKQLKRRRYTGWGRLSRKLINGIRDKQSGKTILDFLKSDGFANRNFMQLIHDDSLTFKEDIQKAQVSGQGDSLHEHIANLAGSPAIKKGILQTVKVVDELVKVMGRHKPENIVIEMARENQTTQKGQKNSRERMKRIEEGIKELGSQILKEHPVENTQLQNEKLYLYYLQNGRDMYVDQELDINRLSDYDVDHIVPQSFLKDDSIDNKVLTRSDKARGKSDNVPSEEVVKKMKNYWRQLLNAKLITQRKFDNLTKAERGGLSELDKAGFIKRQLVETRQITKHVAQILDSRMNTKYDENDKLIREVKVITLKSKLVSDFRKDFQFYKVREINNYHHAHDAYLNAVVGTALIKKYPKLESEFVYGDYKVYDVRKMIAKSEQEIGKATAKYFFYSNIMNFFKTEITLANGEIRKRPLIETNGETGEIVWDKGRDFATVRKVLSMPQVNIVKKTEVQTGGFSKESILPKRNSDKLIARKKDWDPKKYGGFDSPTVAYSVLVVAKVEKGKSKKLKSVKELLGITIMERSSFEKNPIDFLEAKGYKEVKKDLIIKLPKYSLFELENGRKRMLASAGELQKGNELALPSKYVNFLYLASHYEKLKGSPEDNEQKQLFVEQHKHYLDEIIEQISEFSKRVILADANLDKVLSAYNKHRDKPIREQAENIIHLFTLTNLGAPAAFKYFDTTIDRKRYTSTKEVLDATLIHQSITGLYETRIDLSQLGGDGGGGSEAAAKPAPGGIPWLMKKPLQLTTLVPLQEYEERLLKQTMLTGSYKEKLQSLFLKYDALWQHWENQVGHRRIKPHHIATGTVNPRPQKQYPINPKAKASIQTVINDLLKQGVLIQQNSIMNTPVYPVPKPDGKWRMVLDYREVNKTIPLIAAQNQHSAGILSSIFRGKYKTTLDLSNGFWAHSITPESYWLTAFTWLGQQYCWTRLPQGFLNSPALFTADVVDLLKEVPNVQVYVDDIYISHDDPREHLEQLEKVFSLLLNAGYVVSLKKSEIAQHEVEFLGFNITKEGRGLTETFKQKLLNITPPRDLKQLQSILGLLNFARNFIPNFSELVKPLYNIIATANGKYITWTTDNSQQLQNIISMLNSAENLEERNPEVRLIMKVNTSPSAGYIRFYNEFAKRPIMYLNYVYTKAEVKFTNTEKLLTTIHKGLIKALDLGMGQEILVYSPIVSMTKIQKTPLPERKALPIRWITWMSYLEDPRIQFHYDKTLPELQQVPTVTDDIIAKIKHPSEFSMVFYTDGSAIKHPNVNKSHNAGMGIAQVQFKPEFTVINTWSIPLGDHTAQLAEVAAVEFACKKALKIDGPVLIVTDSFYVAESVNKELPYWQSNGFFNNKKKPLKHVSKWKSIADCIQLKPDIIIIHEKGHQPTASTFHTEGNNLADKLATQGSYVVNAGKRTADGSEFEKRTADGSEFESPKKKAKVE

SEQ ID NO: 527 - protein, 2109 aa, synthetic construct
MPAAKRVKLDGGDKKYSIGLDIGTNSVGWAVITDEYKVPSKKFKVLGNTDRHSIKKNLIGALLFDSGETAEATRLKRTARRRYTRRKNRICYLQEIFSNEMAKVDDSFFHRLEESFLVEEDKKHERHPIFGNIVDEVAYHEKYPTIYHLRKKLVDSTDKADLRLIYLALAHMIKFRGHFLIEGDLNPDNSDVDKLFIQLVQTYNQLFEENPINASGVDAKAILSARLSKSRRLENLIAQLPGEKKNGLFGNLIALSLGLTPNFKSNFDLAEDAKLQLSKDTYDDDLDNLLAQIGDQYADLFLAAKNLSDAILLSDILRVNTEITKAPLSASMIKRYDEHHQDLTLLKALVRQQLPEKYKEIFFDQSKNGYAGYIDGGASQEEFYKFIKPILEKMDGTEELLVKLNREDLLRKQRTFDNGSIPHQIHLGELHAILRRQEDFYPFLKDNREKIEKILTFRIPYYVGPLARGNSRFAWMTRKSEETITPWNFEEVVDKGASAQSFIERMTNFDKNLPNEKVLPKHSLLYEYFTVYNELTKVKYVTEGMRKPAFLSGEQKKAIVDLLFKTNRKVTVKQLKEDYFKKIECFDSVEISGVEDRFNASLGTYHDLLKIIKDKDFLDNEENEDILEDIVLTLTLFEDREMIEERLKTYAHLFDDKVMKQLKRRRYTGWGRLSRKLINGIRDKQSGKTILDFLKSDGFANRNFMQLIHDDSLTFKEDIQKAQVSGQGDSLHEHIANLAGSPAIKKGILQTVKVVDELVKVMGRHKPENIVIEMARENQTTQKGQKNSRERMKRIEEGIKELGSQILKEHPVENTQLQNEKLYLYYLQNGRDMYVDQELDINRLSDYDVDHIVPQSFLKDDSIDNKVLTRSDKARGKSDNVPSEEVVKKMKNYWRQLLNAKLITQRKFDNLTKAERGGLSELDKAGFIKRQLVETRQITKHVAQILDSRMNTKYDENDKLIREVKVITLKSKLVSDFRKDFQFYKVREINNYHHAHDAYLNAVVGTALIKKYPKLESEFVYGDYKVYDVRKMIAKSEQEIGKATAKYFFYSNIMNFFKTEITLANGEIRKRPLIETNGETGEIVWDKGRDFATVRKVLSMPQVNIVKKTEVQTGGFSKESILPKRNSDKLIARKKDWDPKKYGGFDSPTVAYSVLVVAKVEKGKSKKLKSVKELLGITIMERSSFEKNPIDFLEAKGYKEVKKDLIIKLPKYSLFELENGRKRMLASAGELQKGNELALPSKYVNFLYLASHYEKLKGSPEDNEQKQLFVEQHKHYLDEIIEQISEFSKRVILADANLDKVLSAYNKHRDKPIREQAENIIHLFTLTNLGAPAAFKYFDTTIDRKRYTSTKEVLDATLIHQSITGLYETRIDLSQLGGDGGSGGSSGGSSGSETPGTSESATPESSGGSSGGSSGGIPWLMKKPLQLTTLVPLQEYEERLLKQTMLTGSYKEKLQSLFLKYDALWQHWENQVGHRRIKPHHIATGTVNPRPQKQYPINPKAKASIQTVINDLLKQGVLIQQNSIMNTPVYPVPKPDGKWRMVLDYREVNKTIPLIAAQNQHSAGILSSIFRGKYKTTLDLSNGFWAHSITPESYWLTAFTWLGQQYCWTRLPQGFLNSPALFTADVVDLLKEVPNVQVYVDDIYISHDDPREHLEQLEKVFSLLLNAGYVVSLKKSEIAQHEVEFLGFNITKEGRGLTETFKQKLLNITPPRDLKQLQSILGLLNFARNFIPNFSELVKPLYNIIATANGKYITWTTDNSQQLQNIISMLNSAENLEERNPEVRLIMKVNTSPSAGYIRFYNEFAKRPIMYLNYVYTKAEVKFTNTEKLLTTIHKGLIKALDLGMGQEILVYSPIVSMTKIQKTPLPERKALPIRWITWMSYLEDPRIQFHYDKTLPELQQVPTVTDDIIAKIKHPSEFSMVFYTDGSAIKHPNVNKSHNAGMGIAQVQFKPEFTVINTWSIPLGDHTAQLAEVAAVEFACKKALKIDGPVLIVTDSFYVAESVNKELPYWQSNGFFNNKKKPLKHVSKWKSIADCIQLKPDIIIIHEKGHQPTASTFHTEGNNLADKLATQGSYVVNAGKRTADGSEFEKRTADGSEFESPKKKAKVE

SEQ ID NO: 528 - protein, 2106 aa, synthetic construct
MPAAKRVKLDGGDKKYSIGLDIGTNSVGWAVITDEYKVPSKKFKVLGNTDRHSIKKNLIGALLFDSGETAEATRLKRTARRRYTRRKNRICYLQEIFSNEMAKVDDSFFHRLEESFLVEEDKKHERHPIFGNIVDEVAYHEKYPTIYHLRKKLVDSTDKADLRLIYLALAHMIKFRGHFLIEGDLNPDNSDVDKLFIQLVQTYNQLFEENPINASGVDAKAILSARLSKSRRLENLIAQLPGEKKNGLFGNLIALSLGLTPNFKSNFDLAEDAKLQLSKDTYDDDLDNLLAQIGDQYADLFLAAKNLSDAILLSDILRVNTEITKAPLSASMIKRYDEHHQDLTLLKALVRQQLPEKYKEIFFDQSKNGYAGYIDGGASQEEFYKFIKPILEKMDGTEELLVKLNREDLLRKQRTFDNGSIPHQIHLGELHAILRRQEDFYPFLKDNREKIEKILTFRIPYYVGPLARGNSRFAWMTRKSEETITPWNFEEVVDKGASAQSFIERMTNFDKNLPNEKVLPKHSLLYEYFTVYNELTKVKYVTEGMRKPAFLSGEQKKAIVDLLFKTNRKVTVKQLKEDYFKKIECFDSVEISGVEDRFNASLGTYHDLLKIIKDKDFLDNEENEDILEDIVLTLTLFEDREMIEERLKTYAHLFDDKVMKQLKRRRYTGWGRLSRKLINGIRDKQSGKTILDFLKSDGFANRNFMQLIHDDSLTFKEDIQKAQVSGQGDSLHEHIANLAGSPAIKKGILQTVKVVDELVKVMGRHKPENIVIEMARENQTTQKGQKNSRERMKRIEEGIKELGSQILKEHPVENTQLQNEKLYLYYLQNGRDMYVDQELDINRLSDYDVDHIVPQSFLKDDSIDNKVLTRSDKARGKSDNVPSEEVVKKMKNYWRQLLNAKLITQRKFDNLTKAERGGLSELDKAGFIKRQLVETRQITKHVAQILDSRMNTKYDENDKLIREVKVITLKSKLVSDFRKDFQFYKVREINNYHHAHDAYLNAVVGTALIKKYPKLESEFVYGDYKVYDVRKMIAKSEQEIGKATAKYFFYSNIMNFFKTEITLANGEIRKRPLIETNGETGEIVWDKGRDFATVRKVLSMPQVNIVKKTEVQTGGFSKESILPKRNSDKLIARKKDWDPKKYGGFDSPTVAYSVLVVAKVEKGKSKKLKSVKELLGITIMERSSFEKNPIDFLEAKGYKEVKKDLIIKLPKYSLFELENGRKRMLASAGELQKGNELALPSKYVNFLYLASHYEKLKGSPEDNEQKQLFVEQHKHYLDEIIEQISEFSKRVILADANLDKVLSAYNKHRDKPIREQAENIIHLFTLTNLGAPAAFKYFDTTIDRKRYTSTKEVLDATLIHQSITGLYETRIDLSQLGGDGGGGGGSGGGGSGGGGSGGGGSGGGGSGGGGSGGIPWLMKKPLQLTTLVPLQEYEERLLKQTMLTGSYKEKLQSLFLKYDALWQHWENQVGHRRIKPHHIATGTVNPRPQKQYPINPKAKASIQTVINDLLKQGVLIQQNSIMNTPVYPVPKPDGKWRMVLDYREVNKTIPLIAAQNQHSAGILSSIFRGKYKTTLDLSNGFWAHSITPESYWLTAFTWLGQQYCWTRLPQGFLNSPALFTADVVDLLKEVPNVQVYVDDIYISHDDPREHLEQLEKVFSLLLNAGYVVSLKKSEIAQHEVEFLGFNITKEGRGLTETFKQKLLNITPPRDLKQLQSILGLLNFARNFIPNFSELVKPLYNIIATANGKYITWTTDNSQQLQNIISMLNSAENLEERNPEVRLIMKVNTSPSAGYIRFYNEFAKRPIMYLNYVYTKAEVKFTNTEKLLTTIHKGLIKALDLGMGQEILVYSPIVSMTKIQKTPLPERKALPIRWITWMSYLEDPRIQFHYDKTLPELQQVPTVTDDIIAKIKHPSEFSMVFYTDGSAIKHPNVNKSHNAGMGIAQVQFKPEFTVINTWSIPLGDHTAQLAEVAAVEFACKKALKIDGPVLIVTDSFYVAESVNKELPYWQSNGFFNNKKKPLKHVSKWKSIADCIQLKPDIIIIHEKGHQPTASTFHTEGNNLADKLATQGSYVVNAGKRTADGSEFEKRTADGSEFESPKKKAKVE

SEQ ID NO: 529 - protein, 2082 aa, synthetic construct
MPAAKRVKLDGGDKKYSIGLDIGTNSVGWAVITDEYKVPSKKFKVLGNTDRHSIKKNLIGALLFDSGETAEATRLKRTARRRYTRRKNRICYLQEIFSNEMAKVDDSFFHRLEESFLVEEDKKHERHPIFGNIVDEVAYHEKYPTIYHLRKKLVDSTDKADLRLIYLALAHMIKFRGHFLIEGDLNPDNSDVDKLFIQLVQTYNQLFEENPINASGVDAKAILSARLSKSRRLENLIAQLPGEKKNGLFGNLIALSLGLTPNFKSNFDLAEDAKLQLSKDTYDDDLDNLLAQIGDQYADLFLAAKNLSDAILLSDILRVNTEITKAPLSASMIKRYDEHHQDLTLLKALVRQQLPEKYKEIFFDQSKNGYAGYIDGGASQEEFYKFIKPILEKMDGTEELLVKLNREDLLRKQRTFDNGSIPHQIHLGELHAILRRQEDFYPFLKDNREKIEKILTFRIPYYVGPLARGNSRFAWMTRKSEETITPWNFEEVVDKGASAQSFIERMTNFDKNLPNEKVLPKHSLLYEYFTVYNELTKVKYVTEGMRKPAFLSGEQKKAIVDLLFKTNRKVTVKQLKEDYFKKIECFDSVEISGVEDRFNASLGTYHDLLKIIKDKDFLDNEENEDILEDIVLTLTLFEDREMIEERLKTYAHLFDDKVMKQLKRRRYTGWGRLSRKLINGIRDKQSGKTILDFLKSDGFANRNFMQLIHDDSLTFKEDIQKAQVSGQGDSLHEHIANLAGSPAIKKGILQTVKVVDELVKVMGRHKPENIVIEMARENQTTQKGQKNSRERMKRIEEGIKELGSQILKEHPVENTQLQNEKLYLYYLQNGRDMYVDQELDINRLSDYDVDHIVPQSFLKDDSIDNKVLTRSDKARGKSDNVPSEEVVKKMKNYWRQLLNAKLITQRKFDNLTKAERGGLSELDKAGFIKRQLVETRQITKHVAQILDSRMNTKYDENDKLIREVKVITLKSKLVSDFRKDFQFYKVREINNYHHAHDAYLNAVVGTALIKKYPKLESEFVYGDYKVYDVRKMIAKSEQEIGKATAKYFFYSNIMNFFKTEITLANGEIRKRPLIETNGETGEIVWDKGRDFATVRKVLSMPQVNIVKKTEVQTGGFSKESILPKRNSDKLIARKKDWDPKKYGGFDSPTVAYSVLVVAKVEKGKSKKLKSVKELLGITIMERSSFEKNPIDFLEAKGYKEVKKDLIIKLPKYSLFELENGRKRMLASAGELQKGNELALPSKYVNFLYLASHYEKLKGSPEDNEQKQLFVEQHKHYLDEIIEQISEFSKRVILADANLDKVLSAYNKHRDKPIREQAENIIHLFTLTNLGAPAAFKYFDTTIDRKRYTSTKEVLDATLIHQSITGLYETRIDLSQLGGDGGGGGGGGGGIPWLMKKPLQLTTLVPLQEYEERLLKQTMLTGSYKEKLQSLFLKYDALWQHWENQVGHRRIKPHHIATGTVNPRPQKQYPINPKAKASIQTVINDLLKQGVLIQQNSIMNTPVYPVPKPDGKWRMVLDYREVNKTIPLIAAQNQHSAGILSSIFRGKYKTTLDLSNGFWAHSITPESYWLTAFTWLGQQYCWTRLPQGFLNSPALFTADVVDLLKEVPNVQVYVDDIYISHDDPREHLEQLEKVFSLLLNAGYVVSLKKSEIAQHEVEFLGFNITKEGRGLTETFKQKLLNITPPRDLKQLQSILGLLNFARNFIPNFSELVKPLYNIIATANGKYITWTTDNSQQLQNIISMLNSAENLEERNPEVRLIMKVNTSPSAGYIRFYNEFAKRPIMYLNYVYTKAEVKFTNTEKLLTTIHKGLIKALDLGMGQEILVYSPIVSMTKIQKTPLPERKALPIRWITWMSYLEDPRIQFHYDKTLPELQQVPTVTDDIIAKIKHPSEFSMVFYTDGSAIKHPNVNKSHNAGMGIAQVQFKPEFTVINTWSIPLGDHTAQLAEVAAVEFACKKALKIDGPVLIVTDSFYVAESVNKELPYWQSNGFFNNKKKPLKHVSKWKSIADCIQLKPDIIIIHEKGHQPTASTFHTEGNNLADKLATQGSYVVNAGKRTADGSEFEKRTADGSEFESPKKKAKVE

SEQ ID NO: 530 - protein, 2087 aa, synthetic construct
MPAAKRVKLDGGDKKYSIGLDIGTNSVGWAVITDEYKVPSKKFKVLGNTDRHSIKKNLIGALLFDSGETAEATRLKRTARRRYTRRKNRICYLQEIFSNEMAKVDDSFFHRLEESFLVEEDKKHERHPIFGNIVDEVAYHEKYPTIYHLRKKLVDSTDKADLRLIYLALAHMIKFRGHFLIEGDLNPDNSDVDKLFIQLVQTYNQLFEENPINASGVDAKAILSARLSKSRRLENLIAQLPGEKKNGLFGNLIALSLGLTPNFKSNFDLAEDAKLQLSKDTYDDDLDNLLAQIGDQYADLFLAAKNLSDAILLSDILRVNTEITKAPLSASMIKRYDEHHQDLTLLKALVRQQLPEKYKEIFFDQSKNGYAGYIDGGASQEEFYKFIKPILEKMDGTEELLVKLNREDLLRKQRTFDNGSIPHQIHLGELHAILRRQEDFYPFLKDNREKIEKILTFRIPYYVGPLARGNSRFAWMTRKSEETITPWNFEEVVDKGASAQSFIERMTNFDKNLPNEKVLPKHSLLYEYFTVYNELTKVKYVTEGMRKPAFLSGEQKKAIVDLLFKTNRKVTVKQLKEDYFKKIECFDSVEISGVEDRFNASLGTYHDLLKIIKDKDFLDNEENEDILEDIVLTLTLFEDREMIEERLKTYAHLFDDKVMKQLKRRRYTGWGRLSRKLINGIRDKQSGKTILDFLKSDGFANRNFMQLIHDDSLTFKEDIQKAQVSGQGDSLHEHIANLAGSPAIKKGILQTVKVVDELVKVMGRHKPENIVIEMARENQTTQKGQKNSRERMKRIEEGIKELGSQILKEHPVENTQLQNEKLYLYYLQNGRDMYVDQELDINRLSDYDVDHIVPQSFLKDDSIDNKVLTRSDKARGKSDNVPSEEVVKKMKNYWRQLLNAKLITQRKFDNLTKAERGGLSELDKAGFIKRQLVETRQITKHVAQILDSRMNTKYDENDKLIREVKVITLKSKLVSDFRKDFQFYKVREINNYHHAHDAYLNAVVGTALIKKYPKLESEFVYGDYKVYDVRKMIAKSEQEIGKATAKYFFYSNIMNFFKTEITLANGEIRKRPLIETNGETGEIVWDKGRDFATVRKVLSMPQVNIVKKTEVQTGGFSKESILPKRNSDKLIARKKDWDPKKYGGFDSPTVAYSVLVVAKVEKGKSKKLKSVKELLGITIMERSSFEKNPIDFLEAKGYKEVKKDLIIKLPKYSLFELENGRKRMLASAGELQKGNELALPSKYVNFLYLASHYEKLKGSPEDNEQKQLFVEQHKHYLDEIIEQISEFSKRVILADANLDKVLSAYNKHRDKPIREQAENIIHLFTLTNLGAPAAFKYFDTTIDRKRYTSTKEVLDATLIHQSITGLYETRIDLSQLGGDGGGSSGGGEAAAKGGIPWLMKKPLQLTTLVPLQEYEERLLKQTMLTGSYKEKLQSLFLKYDALWQHWENQVGHRRIKPHHIATGTVNPRPQKQYPINPKAKASIQTVINDLLKQGVLIQQNSIMNTPVYPVPKPDGKWRMVLDYREVNKTIPLIAAQNQHSAGILSSIFRGKYKTTLDLSNGFWAHSITPESYWLTAFTWLGQQYCWTRLPQGFLNSPALFTADVVDLLKEVPNVQVYVDDIYISHDDPREHLEQLEKVFSLLLNAGYVVSLKKSEIAQHEVEFLGFNITKEGRGLTETFKQKLLNITPPRDLKQLQSILGLLNFARNFIPNFSELVKPLYNIIATANGKYITWTTDNSQQLQNIISMLNSAENLEERNPEVRLIMKVNTSPSAGYIRFYNEFAKRPIMYLNYVYTKAEVKFTNTEKLLTTIHKGLIKALDLGMGQEILVYSPIVSMTKIQKTPLPERKALPIRWITWMSYLEDPRIQFHYDKTLPELQQVPTVTDDIIAKIKHPSEFSMVFYTDGSAIKHPNVNKSHNAGMGIAQVQFKPEFTVINTWSIPLGDHTAQLAEVAAVEFACKKALKIDGPVLIVTDSFYVAESVNKELPYWQSNGFFNNKKKPLKHVSKWKSIADCIQLKPDIIIIHEKGHQPTASTFHTEGNNLADKLATQGSYVVNAGKRTADGSEFEKRTADGSEFESPKKKAKVE

SEQ ID NO: 531 - protein, 2082 aa, synthetic construct
MPAAKRVKLDGGDKKYSIGLDIGTNSVGWAVITDEYKVPSKKFKVLGNTDRHSIKKNLIGALLFDSGETAEATRLKRTARRRYTRRKNRICYLQEIFSNEMAKVDDSFFHRLEESFLVEEDKKHERHPIFGNIVDEVAYHEKYPTIYHLRKKLVDSTDKADLRLIYLALAHMIKFRGHFLIEGDLNPDNSDVDKLFIQLVQTYNQLFEENPINASGVDAKAILSARLSKSRRLENLIAQLPGEKKNGLFGNLIALSLGLTPNFKSNFDLAEDAKLQLSKDTYDDDLDNLLAQIGDQYADLFLAAKNLSDAILLSDILRVNTEITKAPLSASMIKRYDEHHQDLTLLKALVRQQLPEKYKEIFFDQSKNGYAGYIDGGASQEEFYKFIKPILEKMDGTEELLVKLNREDLLRKQRTFDNGSIPHQIHLGELHAILRRQEDFYPFLKDNREKIEKILTFRIPYYVGPLARGNSRFAWMTRKSEETITPWNFEEVVDKGASAQSFIERMTNFDKNLPNEKVLPKHSLLYEYFTVYNELTKVKYVTEGMRKPAFLSGEQKKAIVDLLFKTNRKVTVKQLKEDYFKKIECFDSVEISGVEDRFNASLGTYHDLLKIIKDKDFLDNEENEDILEDIVLTLTLFEDREMIEERLKTYAHLFDDKVMKQLKRRRYTGWGRLSRKLINGIRDKQSGKTILDFLKSDGFANRNFMQLIHDDSLTFKEDIQKAQVSGQGDSLHEHIANLAGSPAIKKGILQTVKVVDELVKVMGRHKPENIVIEMARENQTTQKGQKNSRERMKRIEEGIKELGSQILKEHPVENTQLQNEKLYLYYLQNGRDMYVDQELDINRLSDYDVDHIVPQSFLKDDSIDNKVLTRSDKARGKSDNVPSEEVVKKMKNYWRQLLNAKLITQRKFDNLTKAERGGLSELDKAGFIKRQLVETRQITKHVAQILDSRMNTKYDENDKLIREVKVITLKSKLVSDFRKDFQFYKVREINNYHHAHDAYLNAVVGTALIKKYPKLESEFVYGDYKVYDVRKMIAKSEQEIGKATAKYFFYSNIMNFFKTEITLANGEIRKRPLIETNGETGEIVWDKGRDFATVRKVLSMPQVNIVKKTEVQTGGFSKESILPKRNSDKLIARKKDWDPKKYGGFDSPTVAYSVLVVAKVEKGKSKKLKSVKELLGITIMERSSFEKNPIDFLEAKGYKEVKKDLIIKLPKYSLFELENGRKRMLASAGELQKGNELALPSKYVNFLYLASHYEKLKGSPEDNEQKQLFVEQHKHYLDEIIEQISEFSKRVILADANLDKVLSAYNKHRDKPIREQAENIIHLFTLTNLGAPAAFKYFDTTIDRKRYTSTKEVLDATLIHQSITGLYETRIDLSQLGGDGGGGSGGSGGIPWLMKKPLQLTTLVPLQEYEERLLKQTMLTGSYKEKLQSLFLKYDALWQHWENQVGHRRIKPHHIATGTVNPRPQKQYPINPKAKASIQTVINDLLKQGVLIQQNSIMNTPVYPVPKPDGKWRMVLDYREVNKTIPLIAAQNQHSAGILSSIFRGKYKTTLDLSNGFWAHSITPESYWLTAFTWLGQQYCWTRLPQGFLNSPALFTADVVDLLKEVPNVQVYVDDIYISHDDPREHLEQLEKVFSLLLNAGYVVSLKKSEIAQHEVEFLGFNITKEGRGLTETFKQKLLNITPPRDLKQLQSILGLLNFARNFIPNFSELVKPLYNIIATANGKYITWTTDNSQQLQNIISMLNSAENLEERNPEVRLIMKVNTSPSAGYIRFYNEFAKRPIMYLNYVYTKAEVKFTNTEKLLTTIHKGLIKALDLGMGQEILVYSPIVSMTKIQKTPLPERKALPIRWITWMSYLEDPRIQFHYDKTLPELQQVPTVTDDIIAKIKHPSEFSMVFYTDGSAIKHPNVNKSHNAGMGIAQVQFKPEFTVINTWSIPLGDHTAQLAEVAAVEFACKKALKIDGPVLIVTDSFYVAESVNKELPYWQSNGFFNNKKKPLKHVSKWKSIADCIQLKPDIIIIHEKGHQPTASTFHTEGNNLADKLATQGSYVVNAGKRTADGSEFEKRTADGSEFESPKKKAKVE

SEQ ID NO: 532 - protein, 2085 aa, synthetic construct
MPAAKRVKLDGGDKKYSIGLDIGTNSVGWAVITDEYKVPSKKFKVLGNTDRHSIKKNLIGALLFDSGETAEATRLKRTARRRYTRRKNRICYLQEIFSNEMAKVDDSFFHRLEESFLVEEDKKHERHPIFGNIVDEVAYHEKYPTIYHLRKKLVDSTDKADLRLIYLALAHMIKFRGHFLIEGDLNPDNSDVDKLFIQLVQTYNQLFEENPINASGVDAKAILSARLSKSRRLENLIAQLPGEKKNGLFGNLIALSLGLTPNFKSNFDLAEDAKLQLSKDTYDDDLDNLLAQIGDQYADLFLAAKNLSDAILLSDILRVNTEITKAPLSASMIKRYDEHHQDLTLLKALVRQQLPEKYKEIFFDQSKNGYAGYIDGGASQEEFYKFIKPILEKMDGTEELLVKLNREDLLRKQRTFDNGSIPHQIHLGELHAILRRQEDFYPFLKDNREKIEKILTFRIPYYVGPLARGNSRFAWMTRKSEETITPWNFEEVVDKGASAQSFIERMTNFDKNLPNEKVLPKHSLLYEYFTVYNELTKVKYVTEGMRKPAFLSGEQKKAIVDLLFKTNRKVTVKQLKEDYFKKIECFDSVEISGVEDRFNASLGTYHDLLKIIKDKDFLDNEENEDILEDIVLTLTLFEDREMIEERLKTYAHLFDDKVMKQLKRRRYTGWGRLSRKLINGIRDKQSGKTILDFLKSDGFANRNFMQLIHDDSLTFKEDIQKAQVSGQGDSLHEHIANLAGSPAIKKGILQTVKVVDELVKVMGRHKPENIVIEMARENQTTQKGQKNSRERMKRIEEGIKELGSQILKEHPVENTQLQNEKLYLYYLQNGRDMYVDQELDINRLSDYDVDHIVPQSFLKDDSIDNKVLTRSDKARGKSDNVPSEEVVKKMKNYWRQLLNAKLITQRKFDNLTKAERGGLSELDKAGFIKRQLVETRQITKHVAQILDSRMNTKYDENDKLIREVKVITLKSKLVSDFRKDFQFYKVREINNYHHAHDAYLNAVVGTALIKKYPKLESEFVYGDYKVYDVRKMIAKSEQEIGKATAKYFFYSNIMNFFKTEITLANGEIRKRPLIETNGETGEIVWDKGRDFATVRKVLSMPQVNIVKKTEVQTGGFSKESILPKRNSDKLIARKKDWDPKKYGGFDSPTVAYSVLVVAKVEKGKSKKLKSVKELLGITIMERSSFEKNPIDFLEAKGYKEVKKDLIIKLPKYSLFELENGRKRMLASAGELQKGNELALPSKYVNFLYLASHYEKLKGSPEDNEQKQLFVEQHKHYLDEIIEQISEFSKRVILADANLDKVLSAYNKHRDKPIREQAENIIHLFTLTNLGAPAAFKYFDTTIDRKRYTSTKEVLDATLIHQSITGLYETRIDLSQLGGDGGPAPGGGGGSGGIPWLMKKPLQLTTLVPLQEYEERLLKQTMLTGSYKEKLQSLFLKYDALWQHWENQVGHRRIKPHHIATGTVNPRPQKQYPINPKAKASIQTVINDLLKQGVLIQQNSIMNTPVYPVPKPDGKWRMVLDYREVNKTIPLIAAQNQHSAGILSSIFRGKYKTTLDLSNGFWAHSITPESYWLTAFTWLGQQYCWTRLPQGFLNSPALFTADVVDLLKEVPNVQVYVDDIYISHDDPREHLEQLEKVFSLLLNAGYVVSLKKSEIAQHEVEFLGFNITKEGRGLTETFKQKLLNITPPRDLKQLQSILGLLNFARNFIPNFSELVKPLYNIIATANGKYITWTTDNSQQLQNIISMLNSAENLEERNPEVRLIMKVNTSPSAGYIRFYNEFAKRPIMYLNYVYTKAEVKFTNTEKLLTTIHKGLIKALDLGMGQEILVYSPIVSMTKIQKTPLPERKALPIRWITWMSYLEDPRIQFHYDKTLPELQQVPTVTDDIIAKIKHPSEFSMVFYTDGSAIKHPNVNKSHNAGMGIAQVQFKPEFTVINTWSIPLGDHTAQLAEVAAVEFACKKALKIDGPVLIVTDSFYVAESVNKELPYWQSNGFFNNKKKPLKHVSKWKSIADCIQLKPDIIIIHEKGHQPTASTFHTEGNNLADKLATQGSYVVNAGKRTADGSEFEKRTADGSEFESPKKKAKVE

SEQ ID NO: 533 - protein, 2087 aa, synthetic construct
MPAAKRVKLDGGDKKYSIGLDIGTNSVGWAVITDEYKVPSKKFKVLGNTDRHSIKKNLIGALLFDSGETAEATRLKRTARRRYTRRKNRICYLQEIFSNEMAKVDDSFFHRLEESFLVEEDKKHERHPIFGNIVDEVAYHEKYPTIYHLRKKLVDSTDKADLRLIYLALAHMIKFRGHFLIEGDLNPDNSDVDKLFIQLVQTYNQLFEENPINASGVDAKAILSARLSKSRRLENLIAQLPGEKKNGLFGNLIALSLGLTPNFKSNFDLAEDAKLQLSKDTYDDDLDNLLAQIGDQYADLFLAAKNLSDAILLSDILRVNTEITKAPLSASMIKRYDEHHQDLTLLKALVRQQLPEKYKEIFFDQSKNGYAGYIDGGASQEEFYKFIKPILEKMDGTEELLVKLNREDLLRKQRTFDNGSIPHQIHLGELHAILRRQEDFYPFLKDNREKIEKILTFRIPYYVGPLARGNSRFAWMTRKSEETITPWNFEEVVDKGASAQSFIERMTNFDKNLPNEKVLPKHSLLYEYFTVYNELTKVKYVTEGMRKPAFLSGEQKKAIVDLLFKTNRKVTVKQLKEDYFKKIECFDSVEISGVEDRFNASLGTYHDLLKIIKDKDFLDNEENEDILEDIVLTLTLFEDREMIEERLKTYAHLFDDKVMKQLKRRRYTGWGRLSRKLINGIRDKQSGKTILDFLKSDGFANRNFMQLIHDDSLTFKEDIQKAQVSGQGDSLHEHIANLAGSPAIKKGILQTVKVVDELVKVMGRHKPENIVIEMARENQTTQKGQKNSRERMKRIEEGIKELGSQILKEHPVENTQLQNEKLYLYYLQNGRDMYVDQELDINRLSDYDVDHIVPQSFLKDDSIDNKVLTRSDKARGKSDNVPSEEVVKKMKNYWRQLLNAKLITQRKFDNLTKAERGGLSELDKAGFIKRQLVETRQITKHVAQILDSRMNTKYDENDKLIREVKVITLKSKLVSDFRKDFQFYKVREINNYHHAHDAYLNAVVGTALIKKYPKLESEFVYGDYKVYDVRKMIAKSEQEIGKATAKYFFYSNIMNFFKTEITLANGEIRKRPLIETNGETGEIVWDKGRDFATVRKVLSMPQVNIVKKTEVQTGGFSKESILPKRNSDKLIARKKDWDPKKYGGFDSPTVAYSVLVVAKVEKGKSKKLKSVKELLGITIMERSSFEKNPIDFLEAKGYKEVKKDLIIKLPKYSLFELENGRKRMLASAGELQKGNELALPSKYVNFLYLASHYEKLKGSPEDNEQKQLFVEQHKHYLDEIIEQISEFSKRVILADANLDKVLSAYNKHRDKPIREQAENIIHLFTLTNLGAPAAFKYFDTTIDRKRYTSTKEVLDATLIHQSITGLYETRIDLSQLGGDGGGGSGGGEAAAKGGIPWLMKKPLQLTTLVPLQEYEERLLKQTMLTGSYKEKLQSLFLKYDALWQHWENQVGHRRIKPHHIATGTVNPRPQKQYPINPKAKASIQTVINDLLKQGVLIQQNSIMNTPVYPVPKPDGKWRMVLDYREVNKTIPLIAAQNQHSAGILSSIFRGKYKTTLDLSNGFWAHSITPESYWLTAFTWLGQQYCWTRLPQGFLNSPALFTADVVDLLKEVPNVQVYVDDIYISHDDPREHLEQLEKVFSLLLNAGYVVSLKKSEIAQHEVEFLGFNITKEGRGLTETFKQKLLNITPPRDLKQLQSILGLLNFARNFIPNFSELVKPLYNIIATANGKYITWTTDNSQQLQNIISMLNSAENLEERNPEVRLIMKVNTSPSAGYIRFYNEFAKRPIMYLNYVYTKAEVKFTNTEKLLTTIHKGLIKALDLGMGQEILVYSPIVSMTKIQKTPLPERKALPIRWITWMSYLEDPRIQFHYDKTLPELQQVPTVTDDIIAKIKHPSEFSMVFYTDGSAIKHPNVNKSHNAGMGIAQVQFKPEFTVINTWSIPLGDHTAQLAEVAAVEFACKKALKIDGPVLIVTDSFYVAESVNKELPYWQSNGFFNNKKKPLKHVSKWKSIADCIQLKPDIIIIHEKGHQPTASTFHTEGNNLADKLATQGSYVVNAGKRTADGSEFEKRTADGSEFESPKKKAKVE

SEQ ID NO: 534 - protein, 2079 aa, synthetic construct
MPAAKRVKLDGGDKKYSIGLDIGTNSVGWAVITDEYKVPSKKFKVLGNTDRHSIKKNLIGALLFDSGETAEATRLKRTARRRYTRRKNRICYLQEIFSNEMAKVDDSFFHRLEESFLVEEDKKHERHPIFGNIVDEVAYHEKYPTIYHLRKKLVDSTDKADLRLIYLALAHMIKFRGHFLIEGDLNPDNSDVDKLFIQLVQTYNQLFEENPINASGVDAKAILSARLSKSRRLENLIAQLPGEKKNGLFGNLIALSLGLTPNFKSNFDLAEDAKLQLSKDTYDDDLDNLLAQIGDQYADLFLAAKNLSDAILLSDILRVNTEITKAPLSASMIKRYDEHHQDLTLLKALVRQQLPEKYKEIFFDQSKNGYAGYIDGGASQEEFYKFIKPILEKMDGTEELLVKLNREDLLRKQRTFDNGSIPHQIHLGELHAILRRQEDFYPFLKDNREKIEKILTFRIPYYVGPLARGNSRFAWMTRKSEETITPWNFEEVVDKGASAQSFIERMTNFDKNLPNEKVLPKHSLLYEYFTVYNELTKVKYVTEGMRKPAFLSGEQKKAIVDLLFKTNRKVTVKQLKEDYFKKIECFDSVEISGVEDRFNASLGTYHDLLKIIKDKDFLDNEENEDILEDIVLTLTLFEDREMIEERLKTYAHLFDDKVMKQLKRRRYTGWGRLSRKLINGIRDKQSGKTILDFLKSDGFANRNFMQLIHDDSLTFKEDIQKAQVSGQGDSLHEHIANLAGSPAIKKGILQTVKVVDELVKVMGRHKPENIVIEMARENQTTQKGQKNSRERMKRIEEGIKELGSQILKEHPVENTQLQNEKLYLYYLQNGRDMYVDQELDINRLSDYDVDHIVPQSFLKDDSIDNKVLTRSDKARGKSDNVPSEEVVKKMKNYWRQLLNAKLITQRKFDNLTKAERGGLSELDKAGFIKRQLVETRQITKHVAQILDSRMNTKYDENDKLIREVKVITLKSKLVSDFRKDFQFYKVREINNYHHAHDAYLNAVVGTALIKKYPKLESEFVYGDYKVYDVRKMIAKSEQEIGKATAKYFFYSNIMNFFKTEITLANGEIRKRPLIETNGETGEIVWDKGRDFATVRKVLSMPQVNIVKKTEVQTGGFSKESILPKRNSDKLIARKKDWDPKKYGGFDSPTVAYSVLVVAKVEKGKSKKLKSVKELLGITIMERSSFEKNPIDFLEAKGYKEVKKDLIIKLPKYSLFELENGRKRMLASAGELQKGNELALPSKYVNFLYLASHYEKLKGSPEDNEQKQLFVEQHKHYLDEIIEQISEFSKRVILADANLDKVLSAYNKHRDKPIREQAENIIHLFTLTNLGAPAAFKYFDTTIDRKRYTSTKEVLDATLIHQSITGLYETRIDLSQLGGDGGGSSGGIPWLMKKPLQLTTLVPLQEYEERLLKQTMLTGSYKEKLQSLFLKYDALWQHWENQVGHRRIKPHHIATGTVNPRPQKQYPINPKAKASIQTVINDLLKQGVLIQQNSIMNTPVYPVPKPDGKWRMVLDYREVNKTIPLIAAQNQHSAGILSSIFRGKYKTTLDLSNGFWAHSITPESYWLTAFTWLGQQYCWTRLPQGFLNSPALFNADVVDLLKEVPNVQVYVDDIYISHDDPREHLEQLEKVFSLLLNAGYVVSLKKSEIAQHEVEFLGFNITKEGRGLTETFKQKLLNITPPRDLKQLQSILGLLNFARNFIPNFSELVKPLYNIIATAPGKYITWTTDNSQQLQNIISMLNSAENLEERNPEVRLIMKVNTSPSAGYIRFYNEFAKRPIMYLNYVYTKAEVKFTNTEKLLTTIHKGLIKALDLGMGQEILVYSPIVSMTKIQKTPLPERKALPIRWITWMSYLEDPRIQFHYDKTLPELQQVPTVTDDIIAKIKHPSEFSMVFYTDGSAIKHPNVNKSHNAGMGIAQVQFKPEFTVINTWSIPLGDHTAQLAEVAAVEFACKKALKIDGPVLIVTDSFYVAESVNKELPYWQSNGFFNNKKKPLKHVSKWKSIADCIQLKPDIIIIHEKGHQPTASTFHTEGNNLADKLATQGSYVVNAGKRTADGSEFEKRTADGSEFESPKKKAKVE

SEQ ID NO: 535 - protein, 2082 aa, synthetic construct
MPAAKRVKLDGGDKKYSIGLDIGTNSVGWAVITDEYKVPSKKFKVLGNTDRHSIKKNLIGALLFDSGETAEATRLKRTARRRYTRRKNRICYLQEIFSNEMAKVDDSFFHRLEESFLVEEDKKHERHPIFGNIVDEVAYHEKYPTIYHLRKKLVDSTDKADLRLIYLALAHMIKFRGHFLIEGDLNPDNSDVDKLFIQLVQTYNQLFEENPINASGVDAKAILSARLSKSRRLENLIAQLPGEKKNGLFGNLIALSLGLTPNFKSNFDLAEDAKLQLSKDTYDDDLDNLLAQIGDQYADLFLAAKNLSDAILLSDILRVNTEITKAPLSASMIKRYDEHHQDLTLLKALVRQQLPEKYKEIFFDQSKNGYAGYIDGGASQEEFYKFIKPILEKMDGTEELLVKLNREDLLRKQRTFDNGSIPHQIHLGELHAILRRQEDFYPFLKDNREKIEKILTFRIPYYVGPLARGNSRFAWMTRKSEETITPWNFEEVVDKGASAQSFIERMTNFDKNLPNEKVLPKHSLLYEYFTVYNELTKVKYVTEGMRKPAFLSGEQKKAIVDLLFKTNRKVTVKQLKEDYFKKIECFDSVEISGVEDRFNASLGTYHDLLKIIKDKDFLDNEENEDILEDIVLTLTLFEDREMIEERLKTYAHLFDDKVMKQLKRRRYTGWGRLSRKLINGIRDKQSGKTILDFLKSDGFANRNFMQLIHDDSLTFKEDIQKAQVSGQGDSLHEHIANLAGSPAIKKGILQTVKVVDELVKVMGRHKPENIVIEMARENQTTQKGQKNSRERMKRIEEGIKELGSQILKEHPVENTQLQNEKLYLYYLQNGRDMYVDQELDINRLSDYDVDHIVPQSFLKDDSIDNKVLTRSDKARGKSDNVPSEEVVKKMKNYWRQLLNAKLITQRKFDNLTKAERGGLSELDKAGFIKRQLVETRQITKHVAQILDSRMNTKYDENDKLIREVKVITLKSKLVSDFRKDFQFYKVREINNYHHAHDAYLNAVVGTALIKKYPKLESEFVYGDYKVYDVRKMIAKSEQEIGKATAKYFFYSNIMNFFKTEITLANGEIRKRPLIETNGETGEIVWDKGRDFATVRKVLSMPQVNIVKKTEVQTGGFSKESILPKRNSDKLIARKKDWDPKKYGGFDSPTVAYSVLVVAKVEKGKSKKLKSVKELLGITIMERSSFEKNPIDFLEAKGYKEVKKDLIIKLPKYSLFELENGRKRMLASAGELQKGNELALPSKYVNFLYLASHYEKLKGSPEDNEQKQLFVEQHKHYLDEIIEQISEFSKRVILADANLDKVLSAYNKHRDKPIREQAENIIHLFTLTNLGAPAAFKYFDTTIDRKRYTSTKEVLDATLIHQSITGLYETRIDLSQLGGDGGPAPGSSGGIPWLMKKPLQLTTLVPLQEYEERLLKQTMLTGSYKEKLQSLFLKYDALWQHWENQVGHRRIKPHHIATGTVNPRPQKQYPINPKAKASIQTVINDLLKQGVLIQQNSIMNTPVYPVPKPDGKWRMVLDYREVNKTIPLIAAQNQHSAGILSSIFRGKYKTTLDLSNGFWAHSITPESYWLTAFTWLGQQYCWTRLPQGFLNSPALFNADVVDLLKEVPNVQVYVDDIYISHDDPREHLEQLEKVFSLLLNAGYVVSLKKSEIAQHEVEFLGFNITKEGRGLTETFKQKLLNITPPRDLKQLQSILGLLNFARNFIPNFSELVKPLYNIIATAPGKYITWTTDNSQQLQNIISMLNSAENLEERNPEVRLIMKVNTSPSAGYIRFYNEFAKRPIMYLNYVYTKAEVKFTNTEKLLTTIHKGLIKALDLGMGQEILVYSPIVSMTKIQKTPLPERKALPIRWITWMSYLEDPRIQFHYDKTLPELQQVPTVTDDIIAKIKHPSEFSMVFYTDGSAIKHPNVNKSHNAGMGIAQVQFKPEFTVINTWSIPLGDHTAQLAEVAAVEFACKKALKIDGPVLIVTDSFYVAESVNKELPYWQSNGFFNNKKKPLKHVSKWKSIADCIQLKPDIIIIHEKGHQPTASTFHTEGNNLADKLATQGSYVVNAGKRTADGSEFEKRTADGSEFESPKKKAKVE

SEQ ID NO: 536 - protein, 2087 aa, synthetic construct
MPAAKRVKLDGGDKKYSIGLDIGTNSVGWAVITDEYKVPSKKFKVLGNTDRHSIKKNLIGALLFDSGETAEATRLKRTARRRYTRRKNRICYLQEIFSNEMAKVDDSFFHRLEESFLVEEDKKHERHPIFGNIVDEVAYHEKYPTIYHLRKKLVDSTDKADLRLIYLALAHMIKFRGHFLIEGDLNPDNSDVDKLFIQLVQTYNQLFEENPINASGVDAKAILSARLSKSRRLENLIAQLPGEKKNGLFGNLIALSLGLTPNFKSNFDLAEDAKLQLSKDTYDDDLDNLLAQIGDQYADLFLAAKNLSDAILLSDILRVNTEITKAPLSASMIKRYDEHHQDLTLLKALVRQQLPEKYKEIFFDQSKNGYAGYIDGGASQEEFYKFIKPILEKMDGTEELLVKLNREDLLRKQRTFDNGSIPHQIHLGELHAILRRQEDFYPFLKDNREKIEKILTFRIPYYVGPLARGNSRFAWMTRKSEETITPWNFEEVVDKGASAQSFIERMTNFDKNLPNEKVLPKHSLLYEYFTVYNELTKVKYVTEGMRKPAFLSGEQKKAIVDLLFKTNRKVTVKQLKEDYFKKIECFDSVEISGVEDRFNASLGTYHDLLKIIKDKDFLDNEENEDILEDIVLTLTLFEDREMIEERLKTYAHLFDDKVMKQLKRRRYTGWGRLSRKLINGIRDKQSGKTILDFLKSDGFANRNFMQLIHDDSLTFKEDIQKAQVSGQGDSLHEHIANLAGSPAIKKGILQTVKVVDELVKVMGRHKPENIVIEMARENQTTQKGQKNSRERMKRIEEGIKELGSQILKEHPVENTQLQNEKLYLYYLQNGRDMYVDQELDINRLSDYDVDHIVPQSFLKDDSIDNKVLTRSDKARGKSDNVPSEEVVKKMKNYWRQLLNAKLITQRKFDNLTKAERGGLSELDKAGFIKRQLVETRQITKHVAQILDSRMNTKYDENDKLIREVKVITLKSKLVSDFRKDFQFYKVREINNYHHAHDAYLNAVVGTALIKKYPKLESEFVYGDYKVYDVRKMIAKSEQEIGKATAKYFFYSNIMNFFKTEITLANGEIRKRPLIETNGETGEIVWDKGRDFATVRKVLSMPQVNIVKKTEVQTGGFSKESILPKRNSDKLIARKKDWDPKKYGGFDSPTVAYSVLVVAKVEKGKSKKLKSVKELLGITIMERSSFEKNPIDFLEAKGYKEVKKDLIIKLPKYSLFELENGRKRMLASAGELQKGNELALPSKYVNFLYLASHYEKLKGSPEDNEQKQLFVEQHKHYLDEIIEQISEFSKRVILADANLDKVLSAYNKHRDKPIREQAENIIHLFTLTNLGAPAAFKYFDTTIDRKRYTSTKEVLDATLIHQSITGLYETRIDLSQLGGDGGGSSGGSEAAAKGGIPWLMKKPLQLTTLVPLQEYEERLLKQTMLTGSYKEKLQSLFLKYDALWQHWENQVGHRRIKPHHIATGTVNPRPQKQYPINPKAKASIQTVINDLLKQGVLIQQNSIMNTPVYPVPKPDGKWRMVLDYREVNKTIPLIAAQNQHSAGILSSIFRGKYKTTLDLSNGFWAHSITPESYWLTAFTWLGQQYCWTRLPQGFLNSPALFNADVVDLLKEVPNVQVYVDDIYISHDDPREHLEQLEKVFSLLLNAGYVVSLKKSEIAQHEVEFLGFNITKEGRGLTETFKQKLLNITPPRDLKQLQSILGLLNFARNFIPNFSELVKPLYNIIATAPGKYITWTTDNSQQLQNIISMLNSAENLEERNPEVRLIMKVNTSPSAGYIRFYNEFAKRPIMYLNYVYTKAEVKFTNTEKLLTTIHKGLIKALDLGMGQEILVYSPIVSMTKIQKTPLPERKALPIRWITWMSYLEDPRIQFHYDKTLPELQQVPTVTDDIIAKIKHPSEFSMVFYTDGSAIKHPNVNKSHNAGMGIAQVQFKPEFTVINTWSIPLGDHTAQLAEVAAVEFACKKALKIDGPVLIVTDSFYVAESVNKELPYWQSNGFFNNKKKPLKHVSKWKSIADCIQLKPDIIIIHEKGHQPTASTFHTEGNNLADKLATQGSYVVNAGKRTADGSEFEKRTADGSEFESPKKKAKVE

SEQ ID NO: 537 - protein, 2087 aa, synthetic construct
MPAAKRVKLDGGDKKYSIGLDIGTNSVGWAVITDEYKVPSKKFKVLGNTDRHSIKKNLIGALLFDSGETAEATRLKRTARRRYTRRKNRICYLQEIFSNEMAKVDDSFFHRLEESFLVEEDKKHERHPIFGNIVDEVAYHEKYPTIYHLRKKLVDSTDKADLRLIYLALAHMIKFRGHFLIEGDLNPDNSDVDKLFIQLVQTYNQLFEENPINASGVDAKAILSARLSKSRRLENLIAQLPGEKKNGLFGNLIALSLGLTPNFKSNFDLAEDAKLQLSKDTYDDDLDNLLAQIGDQYADLFLAAKNLSDAILLSDILRVNTEITKAPLSASMIKRYDEHHQDLTLLKALVRQQLPEKYKEIFFDQSKNGYAGYIDGGASQEEFYKFIKPILEKMDGTEELLVKLNREDLLRKQRTFDNGSIPHQIHLGELHAILRRQEDFYPFLKDNREKIEKILTFRIPYYVGPLARGNSRFAWMTRKSEETITPWNFEEVVDKGASAQSFIERMTNFDKNLPNEKVLPKHSLLYEYFTVYNELTKVKYVTEGMRKPAFLSGEQKKAIVDLLFKTNRKVTVKQLKEDYFKKIECFDSVEISGVEDRFNASLGTYHDLLKIIKDKDFLDNEENEDILEDIVLTLTLFEDREMIEERLKTYAHLFDDKVMKQLKRRRYTGWGRLSRKLINGIRDKQSGKTILDFLKSDGFANRNFMQLIHDDSLTFKEDIQKAQVSGQGDSLHEHIANLAGSPAIKKGILQTVKVVDELVKVMGRHKPENIVIEMARENQTTQKGQKNSRERMKRIEEGIKELGSQILKEHPVENTQLQNEKLYLYYLQNGRDMYVDQELDINRLSDYDVDHIVPQSFLKDDSIDNKVLTRSDKARGKSDNVPSEEVVKKMKNYWRQLLNAKLITQRKFDNLTKAERGGLSELDKAGFIKRQLVETRQITKHVAQILDSRMNTKYDENDKLIREVKVITLKSKLVSDFRKDFQFYKVREINNYHHAHDAYLNAVVGTALIKKYPKLESEFVYGDYKVYDVRKMIAKSEQEIGKATAKYFFYSNIMNFFKTEITLANGEIRKRPLIETNGETGEIVWDKGRDFATVRKVLSMPQVNIVKKTEVQTGGFSKESILPKRNSDKLIARKKDWDPKKYGGFDSPTVAYSVLVVAKVEKGKSKKLKSVKELLGITIMERSSFEKNPIDFLEAKGYKEVKKDLIIKLPKYSLFELENGRKRMLASAGELQKGNELALPSKYVNFLYLASHYEKLKGSPEDNEQKQLFVEQHKHYLDEIIEQISEFSKRVILADANLDKVLSAYNKHRDKPIREQAENIIHLFTLTNLGAPAAFKYFDTTIDRKRYTSTKEVLDATLIHQSITGLYETRIDLSQLGGDGGGSSPAPEAAAKGGIPWLMKKPLQLTTLVPLQEYEERLLKQTMLTGSYKEKLQSLFLKYDALWQHWENQVGHRRIKPHHIATGTVNPRPQKQYPINPKAKASIQTVINDLLKQGVLIQQNSIMNTPVYPVPKPDGKWRMVLDYREVNKTIPLIAAQNQHSAGILSSIFRGKYKTTLDLSNGFWAHSITPESYWLTAFTWLGQQYCWTRLPQGFLNSPALFNADVVDLLKEVPNVQVYVDDIYISHDDPREHLEQLEKVFSLLLNAGYVVSLKKSEIAQHEVEFLGFNITKEGRGLTETFKQKLLNITPPRDLKQLQSILGLLNFARNFIPNFSELVKPLYNIIATAPGKYITWTTDNSQQLQNIISMLNSAENLEERNPEVRLIMKVNTSPSAGYIRFYNEFAKRPIMYLNYVYTKAEVKFTNTEKLLTTIHKGLIKALDLGMGQEILVYSPIVSMTKIQKTPLPERKALPIRWITWMSYLEDPRIQFHYDKTLPELQQVPTVTDDIIAKIKHPSEFSMVFYTDGSAIKHPNVNKSHNAGMGIAQVQFKPEFTVINTWSIPLGDHTAQLAEVAAVEFACKKALKIDGPVLIVTDSFYVAESVNKELPYWQSNGFFNNKKKPLKHVSKWKSIADCIQLKPDIIIIHEKGHQPTASTFHTEGNNLADKLATQGSYVVNAGKRTADGSEFEKRTADGSEFESPKKKAKVE

SEQ ID NO: 538 - protein, 2087 aa, synthetic construct
MPAAKRVKLDGGDKKYSIGLDIGTNSVGWAVITDEYKVPSKKFKVLGNTDRHSIKKNLIGALLFDSGETAEATRLKRTARRRYTRRKNRICYLQEIFSNEMAKVDDSFFHRLEESFLVEEDKKHERHPIFGNIVDEVAYHEKYPTIYHLRKKLVDSTDKADLRLIYLALAHMIKFRGHFLIEGDLNPDNSDVDKLFIQLVQTYNQLFEENPINASGVDAKAILSARLSKSRRLENLIAQLPGEKKNGLFGNLIALSLGLTPNFKSNFDLAEDAKLQLSKDTYDDDLDNLLAQIGDQYADLFLAAKNLSDAILLSDILRVNTEITKAPLSASMIKRYDEHHQDLTLLKALVRQQLPEKYKEIFFDQSKNGYAGYIDGGASQEEFYKFIKPILEKMDGTEELLVKLNREDLLRKQRTFDNGSIPHQIHLGELHAILRRQEDFYPFLKDNREKIEKILTFRIPYYVGPLARGNSRFAWMTRKSEETITPWNFEEVVDKGASAQSFIERMTNFDKNLPNEKVLPKHSLLYEYFTVYNELTKVKYVTEGMRKPAFLSGEQKKAIVDLLFKTNRKVTVKQLKEDYFKKIECFDSVEISGVEDRFNASLGTYHDLLKIIKDKDFLDNEENEDILEDIVLTLTLFEDREMIEERLKTYAHLFDDKVMKQLKRRRYTGWGRLSRKLINGIRDKQSGKTILDFLKSDGFANRNFMQLIHDDSLTFKEDIQKAQVSGQGDSLHEHIANLAGSPAIKKGILQTVKVVDELVKVMGRHKPENIVIEMARENQTTQKGQKNSRERMKRIEEGIKELGSQILKEHPVENTQLQNEKLYLYYLQNGRDMYVDQELDINRLSDYDVDHIVPQSFLKDDSIDNKVLTRSDKARGKSDNVPSEEVVKKMKNYWRQLLNAKLITQRKFDNLTKAERGGLSELDKAGFIKRQLVETRQITKHVAQILDSRMNTKYDENDKLIREVKVITLKSKLVSDFRKDFQFYKVREINNYHHAHDAYLNAVVGTALIKKYPKLESEFVYGDYKVYDVRKMIAKSEQEIGKATAKYFFYSNIMNFFKTEITLANGEIRKRPLIETNGETGEIVWDKGRDFATVRKVLSMPQVNIVKKTEVQTGGFSKESILPKRNSDKLIARKKDWDPKKYGGFDSPTVAYSVLVVAKVEKGKSKKLKSVKELLGITIMERSSFEKNPIDFLEAKGYKEVKKDLIIKLPKYSLFELENGRKRMLASAGELQKGNELALPSKYVNFLYLASHYEKLKGSPEDNEQKQLFVEQHKHYLDEIIEQISEFSKRVILADANLDKVLSAYNKHRDKPIREQAENIIHLFTLTNLGAPAAFKYFDTTIDRKRYTSTKEVLDATLIHQSITGLYETRIDLSQLGGDGGPAPEAAAKGGSGGIPWLMKKPLQLTTLVPLQEYEERLLKQTMLTGSYKEKLQSLFLKYDALWQHWENQVGHRRIKPHHIATGTVNPRPQKQYPINPKAKASIQTVINDLLKQGVLIQQNSIMNTPVYPVPKPDGKWRMVLDYREVNKTIPLIAAQNQHSAGILSSIFRGKYKTTLDLSNGFWAHSITPESYWLTAFTWLGQQYCWTRLPQGFLNSPALFNADVVDLLKEVPNVQVYVDDIYISHDDPREHLEQLEKVFSLLLNAGYVVSLKKSEIAQHEVEFLGFNITKEGRGLTETFKQKLLNITPPRDLKQLQSILGLLNFARNFIPNFSELVKPLYNIIATAPGKYITWTTDNSQQLQNIISMLNSAENLEERNPEVRLIMKVNTSPSAGYIRFYNEFAKRPIMYLNYVYTKAEVKFTNTEKLLTTIHKGLIKALDLGMGQEILVYSPIVSMTKIQKTPLPERKALPIRWITWMSYLEDPRIQFHYDKTLPELQQVPTVTDDIIAKIKHPSEFSMVFYTDGSAIKHPNVNKSHNAGMGIAQVQFKPEFTVINTWSIPLGDHTAQLAEVAAVEFACKKALKIDGPVLIVTDSFYVAESVNKELPYWQSNGFFNNKKKPLKHVSKWKSIADCIQLKPDIIIIHEKGHQPTASTFHTEGNNLADKLATQGSYVVNAGKRTADGSEFEKRTADGSEFESPKKKAKVE

SEQ ID NO: 539 - protein, 2096 aa, synthetic construct
MPAAKRVKLDGGDKKYSIGLDIGTNSVGWAVITDEYKVPSKKFKVLGNTDRHSIKKNLIGALLFDSGETAEATRLKRTARRRYTRRKNRICYLQEIFSNEMAKVDDSFFHRLEESFLVEEDKKHERHPIFGNIVDEVAYHEKYPTIYHLRKKLVDSTDKADLRLIYLALAHMIKFRGHFLIEGDLNPDNSDVDKLFIQLVQTYNQLFEENPINASGVDAKAILSARLSKSRRLENLIAQLPGEKKNGLFGNLIALSLGLTPNFKSNFDLAEDAKLQLSKDTYDDDLDNLLAQIGDQYADLFLAAKNLSDAILLSDILRVNTEITKAPLSASMIKRYDEHHQDLTLLKALVRQQLPEKYKEIFFDQSKNGYAGYIDGGASQEEFYKFIKPILEKMDGTEELLVKLNREDLLRKQRTFDNGSIPHQIHLGELHAILRRQEDFYPFLKDNREKIEKILTFRIPYYVGPLARGNSRFAWMTRKSEETITPWNFEEVVDKGASAQSFIERMTNFDKNLPNEKVLPKHSLLYEYFTVYNELTKVKYVTEGMRKPAFLSGEQKKAIVDLLFKTNRKVTVKQLKEDYFKKIECFDSVEISGVEDRFNASLGTYHDLLKIIKDKDFLDNEENEDILEDIVLTLTLFEDREMIEERLKTYAHLFDDKVMKQLKRRRYTGWGRLSRKLINGIRDKQSGKTILDFLKSDGFANRNFMQLIHDDSLTFKEDIQKAQVSGQGDSLHEHIANLAGSPAIKKGILQTVKVVDELVKVMGRHKPENIVIEMARENQTTQKGQKNSRERMKRIEEGIKELGSQILKEHPVENTQLQNEKLYLYYLQNGRDMYVDQELDINRLSDYDVDHIVPQSFLKDDSIDNKVLTRSDKARGKSDNVPSEEVVKKMKNYWRQLLNAKLITQRKFDNLTKAERGGLSELDKAGFIKRQLVETRQITKHVAQILDSRMNTKYDENDKLIREVKVITLKSKLVSDFRKDFQFYKVREINNYHHAHDAYLNAVVGTALIKKYPKLESEFVYGDYKVYDVRKMIAKSEQEIGKATAKYFFYSNIMNFFKTEITLANGEIRKRPLIETNGETGEIVWDKGRDFATVRKVLSMPQVNIVKKTEVQTGGFSKESILPKRNSDKLIARKKDWDPKKYGGFDSPTVAYSVLVVAKVEKGKSKKLKSVKELLGITIMERSSFEKNPIDFLEAKGYKEVKKDLIIKLPKYSLFELENGRKRMLASAGELQKGNELALPSKYVNFLYLASHYEKLKGSPEDNEQKQLFVEQHKHYLDEIIEQISEFSKRVILADANLDKVLSAYNKHRDKPIREQAENIIHLFTLTNLGAPAAFKYFDTTIDRKRYTSTKEVLDATLIHQSITGLYETRIDLSQLGGDGGEAAAKEAAAKEAAAKEAAAKGGIPWLMKKPLQLTTLVPLQEYEERLLKQTMLTGSYKEKLQSLFLKYDALWQHWENQVGHRRIKPHHIATGTVNPRPQKQYPINPKAKASIQTVINDLLKQGVLIQQNSIMNTPVYPVPKPDGKWRMVLDYREVNKTIPLIAAQNQHSAGILSSIFRGKYKTTLDLSNGFWAHSITPESYWLTAFTWLGQQYCWTRLPQGFLNSPALFNADVVDLLKEVPNVQVYVDDIYISHDDPREHLEQLEKVFSLLLNAGYVVSLKKSEIAQHEVEFLGFNITKEGRGLTETFKQKLLNITPPRDLKQLQSILGLLNFARNFIPNFSELVKPLYNIIATAPGKYITWTTDNSQQLQNIISMLNSAENLEERNPEVRLIMKVNTSPSAGYIRFYNEFAKRPIMYLNYVYTKAEVKFTNTEKLLTTIHKGLIKALDLGMGQEILVYSPIVSMTKIQKTPLPERKALPIRWITWMSYLEDPRIQFHYDKTLPELQQVPTVTDDIIAKIKHPSEFSMVFYTDGSAIKHPNVNKSHNAGMGIAQVQFKPEFTVINTWSIPLGDHTAQLAEVAAVEFACKKALKIDGPVLIVTDSFYVAESVNKELPYWQSNGFFNNKKKPLKHVSKWKSIADCIQLKPDIIIIHEKGHQPTASTFHTEGNNLADKLATQGSYVVNAGKRTADGSEFEKRTADGSEFESPKKKAKVE

SEQ ID NO: 540 - protein, 2085 aa, synthetic construct
MPAAKRVKLDGGDKKYSIGLDIGTNSVGWAVITDEYKVPSKKFKVLGNTDRHSIKKNLIGALLFDSGETAEATRLKRTARRRYTRRKNRICYLQEIFSNEMAKVDDSFFHRLEESFLVEEDKKHERHPIFGNIVDEVAYHEKYPTIYHLRKKLVDSTDKADLRLIYLALAHMIKFRGHFLIEGDLNPDNSDVDKLFIQLVQTYNQLFEENPINASGVDAKAILSARLSKSRRLENLIAQLPGEKKNGLFGNLIALSLGLTPNFKSNFDLAEDAKLQLSKDTYDDDLDNLLAQIGDQYADLFLAAKNLSDAILLSDILRVNTEITKAPLSASMIKRYDEHHQDLTLLKALVRQQLPEKYKEIFFDQSKNGYAGYIDGGASQEEFYKFIKPILEKMDGTEELLVKLNREDLLRKQRTFDNGSIPHQIHLGELHAILRRQEDFYPFLKDNREKIEKILTFRIPYYVGPLARGNSRFAWMTRKSEETITPWNFEEVVDKGASAQSFIERMTNFDKNLPNEKVLPKHSLLYEYFTVYNELTKVKYVTEGMRKPAFLSGEQKKAIVDLLFKTNRKVTVKQLKEDYFKKIECFDSVEISGVEDRFNASLGTYHDLLKIIKDKDFLDNEENEDILEDIVLTLTLFEDREMIEERLKTYAHLFDDKVMKQLKRRRYTGWGRLSRKLINGIRDKQSGKTILDFLKSDGFANRNFMQLIHDDSLTFKEDIQKAQVSGQGDSLHEHIANLAGSPAIKKGILQTVKVVDELVKVMGRHKPENIVIEMARENQTTQKGQKNSRERMKRIEEGIKELGSQILKEHPVENTQLQNEKLYLYYLQNGRDMYVDQELDINRLSDYDVDHIVPQSFLKDDSIDNKVLTRSDKARGKSDNVPSEEVVKKMKNYWRQLLNAKLITQRKFDNLTKAERGGLSELDKAGFIKRQLVETRQITKHVAQILDSRMNTKYDENDKLIREVKVITLKSKLVSDFRKDFQFYKVREINNYHHAHDAYLNAVVGTALIKKYPKLESEFVYGDYKVYDVRKMIAKSEQEIGKATAKYFFYSNIMNFFKTEITLANGEIRKRPLIETNGETGEIVWDKGRDFATVRKVLSMPQVNIVKKTEVQTGGFSKESILPKRNSDKLIARKKDWDPKKYGGFDSPTVAYSVLVVAKVEKGKSKKLKSVKELLGITIMERSSFEKNPIDFLEAKGYKEVKKDLIIKLPKYSLFELENGRKRMLASAGELQKGNELALPSKYVNFLYLASHYEKLKGSPEDNEQKQLFVEQHKHYLDEIIEQISEFSKRVILADANLDKVLSAYNKHRDKPIREQAENIIHLFTLTNLGAPAAFKYFDTTIDRKRYTSTKEVLDATLIHQSITGLYETRIDLSQLGGDGGGGSPAPGSSGGIPWLMKKPLQLTTLVPLQEYEERLLKQTMLTGSYKEKLQSLFLKYDALWQHWENQVGHRRIKPHHIATGTVNPRPQKQYPINPKAKASIQTVINDLLKQGVLIQQNSIMNTPVYPVPKPDGKWRMVLDYREVNKTIPLIAAQNQHSAGILSSIFRGKYKTTLDLSNGFWAHSITPESYWLTAFTWLGQQYCWTRLPQGFLNSPALFNADVVDLLKEVPNVQVYVDDIYISHDDPREHLEQLEKVFSLLLNAGYVVSLKKSEIAQHEVEFLGFNITKEGRGLTETFKQKLLNITPPRDLKQLQSILGLLNFARNFIPNFSELVKPLYNIIATAPGKYITWTTDNSQQLQNIISMLNSAENLEERNPEVRLIMKVNTSPSAGYIRFYNEFAKRPIMYLNYVYTKAEVKFTNTEKLLTTIHKGLIKALDLGMGQEILVYSPIVSMTKIQKTPLPERKALPIRWITWMSYLEDPRIQFHYDKTLPELQQVPTVTDDIIAKIKHPSEFSMVFYTDGSAIKHPNVNKSHNAGMGIAQVQFKPEFTVINTWSIPLGDHTAQLAEVAAVEFACKKALKIDGPVLIVTDSFYVAESVNKELPYWQSNGFFNNKKKPLKHVSKWKSIADCIQLKPDIIIIHEKGHQPTASTFHTEGNNLADKLATQGSYVVNAGKRTADGSEFEKRTADGSEFESPKKKAKVE

SEQ ID NO: 541 - protein, 2091 aa, synthetic construct
MPAAKRVKLDGGDKKYSIGLDIGTNSVGWAVITDEYKVPSKKFKVLGNTDRHSIKKNLIGALLFDSGETAEATRLKRTARRRYTRRKNRICYLQEIFSNEMAKVDDSFFHRLEESFLVEEDKKHERHPIFGNIVDEVAYHEKYPTIYHLRKKLVDSTDKADLRLIYLALAHMIKFRGHFLIEGDLNPDNSDVDKLFIQLVQTYNQLFEENPINASGVDAKAILSARLSKSRRLENLIAQLPGEKKNGLFGNLIALSLGLTPNFKSNFDLAEDAKLQLSKDTYDDDLDNLLAQIGDQYADLFLAAKNLSDAILLSDILRVNTEITKAPLSASMIKRYDEHHQDLTLLKALVRQQLPEKYKEIFFDQSKNGYAGYIDGGASQEEFYKFIKPILEKMDGTEELLVKLNREDLLRKQRTFDNGSIPHQIHLGELHAILRRQEDFYPFLKDNREKIEKILTFRIPYYVGPLARGNSRFAWMTRKSEETITPWNFEEVVDKGASAQSFIERMTNFDKNLPNEKVLPKHSLLYEYFTVYNELTKVKYVTEGMRKPAFLSGEQKKAIVDLLFKTNRKVTVKQLKEDYFKKIECFDSVEISGVEDRFNASLGTYHDLLKIIKDKDFLDNEENEDILEDIVLTLTLFEDREMIEERLKTYAHLFDDKVMKQLKRRRYTGWGRLSRKLINGIRDKQSGKTILDFLKSDGFANRNFMQLIHDDSLTFKEDIQKAQVSGQGDSLHEHIANLAGSPAIKKGILQTVKVVDELVKVMGRHKPENIVIEMARENQTTQKGQKNSRERMKRIEEGIKELGSQILKEHPVENTQLQNEKLYLYYLQNGRDMYVDQELDINRLSDYDVDHIVPQSFLKDDSIDNKVLTRSDKARGKSDNVPSEEVVKKMKNYWRQLLNAKLITQRKFDNLTKAERGGLSELDKAGFIKRQLVETRQITKHVAQILDSRMNTKYDENDKLIREVKVITLKSKLVSDFRKDFQFYKVREINNYHHAHDAYLNAVVGTALIKKYPKLESEFVYGDYKVYDVRKMIAKSEQEIGKATAKYFFYSNIMNFFKTEITLANGEIRKRPLIETNGETGEIVWDKGRDFATVRKVLSMPQVNIVKKTEVQTGGFSKESILPKRNSDKLIARKKDWDPKKYGGFDSPTVAYSVLVVAKVEKGKSKKLKSVKELLGITIMERSSFEKNPIDFLEAKGYKEVKKDLIIKLPKYSLFELENGRKRMLASAGELQKGNELALPSKYVNFLYLASHYEKLKGSPEDNEQKQLFVEQHKHYLDEIIEQISEFSKRVILADANLDKVLSAYNKHRDKPIREQAENIIHLFTLTNLGAPAAFKYFDTTIDRKRYTSTKEVLDATLIHQSITGLYETRIDLSQLGGDGGEAAAKGGGGSEAAAKGGIPWLMKKPLQLTTLVPLQEYEERLLKQTMLTGSYKEKLQSLFLKYDALWQHWENQVGHRRIKPHHIATGTVNPRPQKQYPINPKAKASIQTVINDLLKQGVLIQQNSIMNTPVYPVPKPDGKWRMVLDYREVNKTIPLIAAQNQHSAGILSSIFRGKYKTTLDLSNGFWAHSITPESYWLTAFTWLGQQYCWTRLPQGFLNSPALFNADVVDLLKEVPNVQVYVDDIYISHDDPREHLEQLEKVFSLLLNAGYVVSLKKSEIAQHEVEFLGFNITKEGRGLTETFKQKLLNITPPRDLKQLQSILGLLNFARNFIPNFSELVKPLYNIIATAPGKYITWTTDNSQQLQNIISMLNSAENLEERNPEVRLIMKVNTSPSAGYIRFYNEFAKRPIMYLNYVYTKAEVKFTNTEKLLTTIHKGLIKALDLGMGQEILVYSPIVSMTKIQKTPLPERKALPIRWITWMSYLEDPRIQFHYDKTLPELQQVPTVTDDIIAKIKHPSEFSMVFYTDGSAIKHPNVNKSHNAGMGIAQVQFKPEFTVINTWSIPLGDHTAQLAEVAAVEFACKKALKIDGPVLIVTDSFYVAESVNKELPYWQSNGFFNNKKKPLKHVSKWKSIADCIQLKPDIIIIHEKGHQPTASTFHTEGNNLADKLATQGSYVVNAGKRTADGSEFEKRTADGSEFESPKKKAKVE

SEQ ID NO: 542 - protein, 2085 aa, synthetic construct
MPAAKRVKLDGGDKKYSIGLDIGTNSVGWAVITDEYKVPSKKFKVLGNTDRHSIKKNLIGALLFDSGETAEATRLKRTARRRYTRRKNRICYLQEIFSNEMAKVDDSFFHRLEESFLVEEDKKHERHPIFGNIVDEVAYHEKYPTIYHLRKKLVDSTDKADLRLIYLALAHMIKFRGHFLIEGDLNPDNSDVDKLFIQLVQTYNQLFEENPINASGVDAKAILSARLSKSRRLENLIAQLPGEKKNGLFGNLIALSLGLTPNFKSNFDLAEDAKLQLSKDTYDDDLDNLLAQIGDQYADLFLAAKNLSDAILLSDILRVNTEITKAPLSASMIKRYDEHHQDLTLLKALVRQQLPEKYKEIFFDQSKNGYAGYIDGGASQEEFYKFIKPILEKMDGTEELLVKLNREDLLRKQRTFDNGSIPHQIHLGELHAILRRQEDFYPFLKDNREKIEKILTFRIPYYVGPLARGNSRFAWMTRKSEETITPWNFEEVVDKGASAQSFIERMTNFDKNLPNEKVLPKHSLLYEYFTVYNELTKVKYVTEGMRKPAFLSGEQKKAIVDLLFKTNRKVTVKQLKEDYFKKIECFDSVEISGVEDRFNASLGTYHDLLKIIKDKDFLDNEENEDILEDIVLTLTLFEDREMIEERLKTYAHLFDDKVMKQLKRRRYTGWGRLSRKLINGIRDKQSGKTILDFLKSDGFANRNFMQLIHDDSLTFKEDIQKAQVSGQGDSLHEHIANLAGSPAIKKGILQTVKVVDELVKVMGRHKPENIVIEMARENQTTQKGQKNSRERMKRIEEGIKELGSQILKEHPVENTQLQNEKLYLYYLQNGRDMYVDQELDINRLSDYDVDHIVPQSFLKDDSIDNKVLTRSDKARGKSDNVPSEEVVKKMKNYWRQLLNAKLITQRKFDNLTKAERGGLSELDKAGFIKRQLVETRQITKHVAQILDSRMNTKYDENDKLIREVKVITLKSKLVSDFRKDFQFYKVREINNYHHAHDAYLNAVVGTALIKKYPKLESEFVYGDYKVYDVRKMIAKSEQEIGKATAKYFFYSNIMNFFKTEITLANGEIRKRPLIETNGETGEIVWDKGRDFATVRKVLSMPQVNIVKKTEVQTGGFSKESILPKRNSDKLIARKKDWDPKKYGGFDSPTVAYSVLVVAKVEKGKSKKLKSVKELLGITIMERSSFEKNPIDFLEAKGYKEVKKDLIIKLPKYSLFELENGRKRMLASAGELQKGNELALPSKYVNFLYLASHYEKLKGSPEDNEQKQLFVEQHKHYLDEIIEQISEFSKRVILADANLDKVLSAYNKHRDKPIREQAENIIHLFTLTNLGAPAAFKYFDTTIDRKRYTSTKEVLDATLIHQSITGLYETRIDLSQLGGDGGPAPGGGGGSGGIPWLMKKPLQLTTLVPLQEYEERLLKQTMLTGSYKEKLQSLFLKYDALWQHWENQVGHRRIKPHHIATGTVNPRPQKQYPINPKAKASIQTVINDLLKQGVLIQQNSIMNTPVYPVPKPDGKWRMVLDYREVNKTIPLIAAQNQHSAGILSSIFRGKYKTTLDLSNGFWAHSITPESYWLTAFTWLGQQYCWTRLPQGFLNSPALFNADVVDLLKEVPNVQVYVDDIYISHDDPREHLEQLEKVFSLLLNAGYVVSLKKSEIAQHEVEFLGFNITKEGRGLTETFKQKLLNITPPRDLKQLQSILGLLNFARNFIPNFSELVKPLYNIIATAPGKYITWTTDNSQQLQNIISMLNSAENLEERNPEVRLIMKVNTSPSAGYIRFYNEFAKRPIMYLNYVYTKAEVKFTNTEKLLTTIHKGLIKALDLGMGQEILVYSPIVSMTKIQKTPLPERKALPIRWITWMSYLEDPRIQFHYDKTLPELQQVPTVTDDIIAKIKHPSEFSMVFYTDGSAIKHPNVNKSHNAGMGIAQVQFKPEFTVINTWSIPLGDHTAQLAEVAAVEFACKKALKIDGPVLIVTDSFYVAESVNKELPYWQSNGFFNNKKKPLKHVSKWKSIADCIQLKPDIIIIHEKGHQPTASTFHTEGNNLADKLATQGSYVVNAGKRTADGSEFEKRTADGSEFESPKKKAKVE

SEQ ID NO: 543 - protein, 2087 aa, synthetic construct
MPAAKRVKLDGGDKKYSIGLDIGTNSVGWAVITDEYKVPSKKFKVLGNTDRHSIKKNLIGALLFDSGETAEATRLKRTARRRYTRRKNRICYLQEIFSNEMAKVDDSFFHRLEESFLVEEDKKHERHPIFGNIVDEVAYHEKYPTIYHLRKKLVDSTDKADLRLIYLALAHMIKFRGHFLIEGDLNPDNSDVDKLFIQLVQTYNQLFEENPINASGVDAKAILSARLSKSRRLENLIAQLPGEKKNGLFGNLIALSLGLTPNFKSNFDLAEDAKLQLSKDTYDDDLDNLLAQIGDQYADLFLAAKNLSDAILLSDILRVNTEITKAPLSASMIKRYDEHHQDLTLLKALVRQQLPEKYKEIFFDQSKNGYAGYIDGGASQEEFYKFIKPILEKMDGTEELLVKLNREDLLRKQRTFDNGSIPHQIHLGELHAILRRQEDFYPFLKDNREKIEKILTFRIPYYVGPLARGNSRFAWMTRKSEETITPWNFEEVVDKGASAQSFIERMTNFDKNLPNEKVLPKHSLLYEYFTVYNELTKVKYVTEGMRKPAFLSGEQKKAIVDLLFKTNRKVTVKQLKEDYFKKIECFDSVEISGVEDRFNASLGTYHDLLKIIKDKDFLDNEENEDILEDIVLTLTLFEDREMIEERLKTYAHLFDDKVMKQLKRRRYTGWGRLSRKLINGIRDKQSGKTILDFLKSDGFANRNFMQLIHDDSLTFKEDIQKAQVSGQGDSLHEHIANLAGSPAIKKGILQTVKVVDELVKVMGRHKPENIVIEMARENQTTQKGQKNSRERMKRIEEGIKELGSQILKEHPVENTQLQNEKLYLYYLQNGRDMYVDQELDINRLSDYDVDHIVPQSFLKDDSIDNKVLTRSDKARGKSDNVPSEEVVKKMKNYWRQLLNAKLITQRKFDNLTKAERGGLSELDKAGFIKRQLVETRQITKHVAQILDSRMNTKYDENDKLIREVKVITLKSKLVSDFRKDFQFYKVREINNYHHAHDAYLNAVVGTALIKKYPKLESEFVYGDYKVYDVRKMIAKSEQEIGKATAKYFFYSNIMNFFKTEITLANGEIRKRPLIETNGETGEIVWDKGRDFATVRKVLSMPQVNIVKKTEVQTGGFSKESILPKRNSDKLIARKKDWDPKKYGGFDSPTVAYSVLVVAKVEKGKSKKLKSVKELLGITIMERSSFEKNPIDFLEAKGYKEVKKDLIIKLPKYSLFELENGRKRMLASAGELQKGNELALPSKYVNFLYLASHYEKLKGSPEDNEQKQLFVEQHKHYLDEIIEQISEFSKRVILADANLDKVLSAYNKHRDKPIREQAENIIHLFTLTNLGAPAAFKYFDTTIDRKRYTSTKEVLDATLIHQSITGLYETRIDLSQLGGDGGGGSEAAAKGGGGGIPWLMKKPLQLTTLVPLQEYEERLLKQTMLTGSYKEKLQSLFLKYDALWQHWENQVGHRRIKPHHIATGTVNPRPQKQYPINPKAKASIQTVINDLLKQGVLIQQNSIMNTPVYPVPKPDGKWRMVLDYREVNKTIPLIAAQNQHSAGILSSIFRGKYKTTLDLSNGFWAHSITPESYWLTAFTWLGQQYCWTRLPQGFLNSPALFNADVVDLLKEVPNVQVYVDDIYISHDDPREHLEQLEKVFSLLLNAGYVVSLKKSEIAQHEVEFLGFNITKEGRGLTETFKQKLLNITPPRDLKQLQSILGLLNFARNFIPNFSELVKPLYNIIATAPGKYITWTTDNSQQLQNIISMLNSAENLEERNPEVRLIMKVNTSPSAGYIRFYNEFAKRPIMYLNYVYTKAEVKFTNTEKLLTTIHKGLIKALDLGMGQEILVYSPIVSMTKIQKTPLPERKALPIRWITWMSYLEDPRIQFHYDKTLPELQQVPTVTDDIIAKIKHPSEFSMVFYTDGSAIKHPNVNKSHNAGMGIAQVQFKPEFTVINTWSIPLGDHTAQLAEVAAVEFACKKALKIDGPVLIVTDSFYVAESVNKELPYWQSNGFFNNKKKPLKHVSKWKSIADCIQLKPDIIIIHEKGHQPTASTFHTEGNNLADKLATQGSYVVNAGKRTADGSEFEKRTADGSEFESPKKKAKVE

SEQ ID NO: 544 - protein, 2082 aa, synthetic construct
MPAAKRVKLDGGDKKYSIGLDIGTNSVGWAVITDEYKVPSKKFKVLGNTDRHSIKKNLIGALLFDSGETAEATRLKRTARRRYTRRKNRICYLQEIFSNEMAKVDDSFFHRLEESFLVEEDKKHERHPIFGNIVDEVAYHEKYPTIYHLRKKLVDSTDKADLRLIYLALAHMIKFRGHFLIEGDLNPDNSDVDKLFIQLVQTYNQLFEENPINASGVDAKAILSARLSKSRRLENLIAQLPGEKKNGLFGNLIALSLGLTPNFKSNFDLAEDAKLQLSKDTYDDDLDNLLAQIGDQYADLFLAAKNLSDAILLSDILRVNTEITKAPLSASMIKRYDEHHQDLTLLKALVRQQLPEKYKEIFFDQSKNGYAGYIDGGASQEEFYKFIKPILEKMDGTEELLVKLNREDLLRKQRTFDNGSIPHQIHLGELHAILRRQEDFYPFLKDNREKIEKILTFRIPYYVGPLARGNSRFAWMTRKSEETITPWNFEEVVDKGASAQSFIERMTNFDKNLPNEKVLPKHSLLYEYFTVYNELTKVKYVTEGMRKPAFLSGEQKKAIVDLLFKTNRKVTVKQLKEDYFKKIECFDSVEISGVEDRFNASLGTYHDLLKIIKDKDFLDNEENEDILEDIVLTLTLFEDREMIEERLKTYAHLFDDKVMKQLKRRRYTGWGRLSRKLINGIRDKQSGKTILDFLKSDGFANRNFMQLIHDDSLTFKEDIQKAQVSGQGDSLHEHIANLAGSPAIKKGILQTVKVVDELVKVMGRHKPENIVIEMARENQTTQKGQKNSRERMKRIEEGIKELGSQILKEHPVENTQLQNEKLYLYYLQNGRDMYVDQELDINRLSDYDVDHIVPQSFLKDDSIDNKVLTRSDKARGKSDNVPSEEVVKKMKNYWRQLLNAKLITQRKFDNLTKAERGGLSELDKAGFIKRQLVETRQITKHVAQILDSRMNTKYDENDKLIREVKVITLKSKLVSDFRKDFQFYKVREINNYHHAHDAYLNAVVGTALIKKYPKLESEFVYGDYKVYDVRKMIAKSEQEIGKATAKYFFYSNIMNFFKTEITLANGEIRKRPLIETNGETGEIVWDKGRDFATVRKVLSMPQVNIVKKTEVQTGGFSKESILPKRNSDKLIARKKDWDPKKYGGFDSPTVAYSVLVVAKVEKGKSKKLKSVKELLGITIMERSSFEKNPIDFLEAKGYKEVKKDLIIKLPKYSLFELENGRKRMLASAGELQKGNELALPSKYVNFLYLASHYEKLKGSPEDNEQKQLFVEQHKHYLDEIIEQISEFSKRVILADANLDKVLSAYNKHRDKPIREQAENIIHLFTLTNLGAPAAFKYFDTTIDRKRYTSTKEVLDATLIHQSITGLYETRIDLSQLGGDGGGSSGGGGGIPWLMKKPLQLTTLVPLQEYEERLLKQTMLTGSYKEKLQSLFLKYDALWQHWENQVGHRRIKPHHIATGTVNPRPQKQYPINPKAKASIQTVINDLLKQGVLIQQNSIMNTPVYPVPKPDGKWRMVLDYREVNKTIPLIAAQNQHSAGILSSIFRGKYKTTLDLSNGFWAHSITPESYWLTAFTWLGQQYCWTRLPQGFLNSPALFNADVVDLLKEVPNVQVYVDDIYISHDDPREHLEQLEKVFSLLLNAGYVVSLKKSEIAQHEVEFLGFNITKEGRGLTETFKQKLLNITPPRDLKQLQSILGLLNFARNFIPNFSELVKPLYNIIATAPGKYITWTTDNSQQLQNIISMLNSAENLEERNPEVRLIMKVNTSPSAGYIRFYNEFAKRPIMYLNYVYTKAEVKFTNTEKLLTTIHKGLIKALDLGMGQEILVYSPIVSMTKIQKTPLPERKALPIRWITWMSYLEDPRIQFHYDKTLPELQQVPTVTDDIIAKIKHPSEFSMVFYTDGSAIKHPNVNKSHNAGMGIAQVQFKPEFTVINTWSIPLGDHTAQLAEVAAVEFACKKALKIDGPVLIVTDSFYVAESVNKELPYWQSNGFFNNKKKPLKHVSKWKSIADCIQLKPDIIIIHEKGHQPTASTFHTEGNNLADKLATQGSYVVNAGKRTADGSEFEKRTADGSEFESPKKKAKVE

SEQ ID NO: 545 - protein, 2085 aa, synthetic construct
MPAAKRVKLDGGDKKYSIGLDIGTNSVGWAVITDEYKVPSKKFKVLGNTDRHSIKKNLIGALLFDSGETAEATRLKRTARRRYTRRKNRICYLQEIFSNEMAKVDDSFFHRLEESFLVEEDKKHERHPIFGNIVDEVAYHEKYPTIYHLRKKLVDSTDKADLRLIYLALAHMIKFRGHFLIEGDLNPDNSDVDKLFIQLVQTYNQLFEENPINASGVDAKAILSARLSKSRRLENLIAQLPGEKKNGLFGNLIALSLGLTPNFKSNFDLAEDAKLQLSKDTYDDDLDNLLAQIGDQYADLFLAAKNLSDAILLSDILRVNTEITKAPLSASMIKRYDEHHQDLTLLKALVRQQLPEKYKEIFFDQSKNGYAGYIDGGASQEEFYKFIKPILEKMDGTEELLVKLNREDLLRKQRTFDNGSIPHQIHLGELHAILRRQEDFYPFLKDNREKIEKILTFRIPYYVGPLARGNSRFAWMTRKSEETITPWNFEEVVDKGASAQSFIERMTNFDKNLPNEKVLPKHSLLYEYFTVYNELTKVKYVTEGMRKPAFLSGEQKKAIVDLLFKTNRKVTVKQLKEDYFKKIECFDSVEISGVEDRFNASLGTYHDLLKIIKDKDFLDNEENEDILEDIVLTLTLFEDREMIEERLKTYAHLFDDKVMKQLKRRRYTGWGRLSRKLINGIRDKQSGKTILDFLKSDGFANRNFMQLIHDDSLTFKEDIQKAQVSGQGDSLHEHIANLAGSPAIKKGILQTVKVVDELVKVMGRHKPENIVIEMARENQTTQKGQKNSRERMKRIEEGIKELGSQILKEHPVENTQLQNEKLYLYYLQNGRDMYVDQELDINRLSDYDVDHIVPQSFLKDDSIDNKVLTRSDKARGKSDNVPSEEVVKKMKNYWRQLLNAKLITQRKFDNLTKAERGGLSELDKAGFIKRQLVETRQITKHVAQILDSRMNTKYDENDKLIREVKVITLKSKLVSDFRKDFQFYKVREINNYHHAHDAYLNAVVGTALIKKYPKLESEFVYGDYKVYDVRKMIAKSEQEIGKATAKYFFYSNIMNFFKTEITLANGEIRKRPLIETNGETGEIVWDKGRDFATVRKVLSMPQVNIVKKTEVQTGGFSKESILPKRNSDKLIARKKDWDPKKYGGFDSPTVAYSVLVVAKVEKGKSKKLKSVKELLGITIMERSSFEKNPIDFLEAKGYKEVKKDLIIKLPKYSLFELENGRKRMLASAGELQKGNELALPSKYVNFLYLASHYEKLKGSPEDNEQKQLFVEQHKHYLDEIIEQISEFSKRVILADANLDKVLSAYNKHRDKPIREQAENIIHLFTLTNLGAPAAFKYFDTTIDRKRYTSTKEVLDATLIHQSITGLYETRIDLSQLGGDGGGSSGGSPAPGGIPWLMKKPLQLTTLVPLQEYEERLLKQTMLTGSYKEKLQSLFLKYDALWQHWENQVGHRRIKPHHIATGTVNPRPQKQYPINPKAKASIQTVINDLLKQGVLIQQNSIMNTPVYPVPKPDGKWRMVLDYREVNKTIPLIAAQNQHSAGILSSIFRGKYKTTLDLSNGFWAHSITPESYWLTAFTWLGQQYCWTRLPQGFLNSPALFNADVVDLLKEVPNVQVYVDDIYISHDDPREHLEQLEKVFSLLLNAGYVVSLKKSEIAQHEVEFLGFNITKEGRGLTETFKQKLLNITPPRDLKQLQSILGLLNFARNFIPNFSELVKPLYNIIATAPGKYITWTTDNSQQLQNIISMLNSAENLEERNPEVRLIMKVNTSPSAGYIRFYNEFAKRPIMYLNYVYTKAEVKFTNTEKLLTTIHKGLIKALDLGMGQEILVYSPIVSMTKIQKTPLPERKALPIRWITWMSYLEDPRIQFHYDKTLPELQQVPTVTDDIIAKIKHPSEFSMVFYTDGSAIKHPNVNKSHNAGMGIAQVQFKPEFTVINTWSIPLGDHTAQLAEVAAVEFACKKALKIDGPVLIVTDSFYVAESVNKELPYWQSNGFFNNKKKPLKHVSKWKSIADCIQLKPDIIIIHEKGHQPTASTFHTEGNNLADKLATQGSYVVNAGKRTADGSEFEKRTADGSEFESPKKKAKVE

SEQ ID NO: 546 - protein, 2085 aa, synthetic construct
MPAAKRVKLDGGDKKYSIGLDIGTNSVGWAVITDEYKVPSKKFKVLGNTDRHSIKKNLIGALLFDSGETAEATRLKRTARRRYTRRKNRICYLQEIFSNEMAKVDDSFFHRLEESFLVEEDKKHERHPIFGNIVDEVAYHEKYPTIYHLRKKLVDSTDKADLRLIYLALAHMIKFRGHFLIEGDLNPDNSDVDKLFIQLVQTYNQLFEENPINASGVDAKAILSARLSKSRRLENLIAQLPGEKKNGLFGNLIALSLGLTPNFKSNFDLAEDAKLQLSKDTYDDDLDNLLAQIGDQYADLFLAAKNLSDAILLSDILRVNTEITKAPLSASMIKRYDEHHQDLTLLKALVRQQLPEKYKEIFFDQSKNGYAGYIDGGASQEEFYKFIKPILEKMDGTEELLVKLNREDLLRKQRTFDNGSIPHQIHLGELHAILRRQEDFYPFLKDNREKIEKILTFRIPYYVGPLARGNSRFAWMTRKSEETITPWNFEEVVDKGASAQSFIERMTNFDKNLPNEKVLPKHSLLYEYFTVYNELTKVKYVTEGMRKPAFLSGEQKKAIVDLLFKTNRKVTVKQLKEDYFKKIECFDSVEISGVEDRFNASLGTYHDLLKIIKDKDFLDNEENEDILEDIVLTLTLFEDREMIEERLKTYAHLFDDKVMKQLKRRRYTGWGRLSRKLINGIRDKQSGKTILDFLKSDGFANRNFMQLIHDDSLTFKEDIQKAQVSGQGDSLHEHIANLAGSPAIKKGILQTVKVVDELVKVMGRHKPENIVIEMARENQTTQKGQKNSRERMKRIEEGIKELGSQILKEHPVENTQLQNEKLYLYYLQNGRDMYVDQELDINRLSDYDVDHIVPQSFLKDDSIDNKVLTRSDKARGKSDNVPSEEVVKKMKNYWRQLLNAKLITQRKFDNLTKAERGGLSELDKAGFIKRQLVETRQITKHVAQILDSRMNTKYDENDKLIREVKVITLKSKLVSDFRKDFQFYKVREINNYHHAHDAYLNAVVGTALIKKYPKLESEFVYGDYKVYDVRKMIAKSEQEIGKATAKYFFYSNIMNFFKTEITLANGEIRKRPLIETNGETGEIVWDKGRDFATVRKVLSMPQVNIVKKTEVQTGGFSKESILPKRNSDKLIARKKDWDPKKYGGFDSPTVAYSVLVVAKVEKGKSKKLKSVKELLGITIMERSSFEKNPIDFLEAKGYKEVKKDLIIKLPKYSLFELENGRKRMLASAGELQKGNELALPSKYVNFLYLASHYEKLKGSPEDNEQKQLFVEQHKHYLDEIIEQISEFSKRVILADANLDKVLSAYNKHRDKPIREQAENIIHLFTLTNLGAPAAFKYFDTTIDRKRYTSTKEVLDATLIHQSITGLYETRIDLSQLGGDGGPAPGSSGGGGGIPWLMKKPLQLTTLVPLQEYEERLLKQTMLTGSYKEKLQSLFLKYDALWQHWENQVGHRRIKPHHIATGTVNPRPQKQYPINPKAKASIQTVINDLLKQGVLIQQNSIMNTPVYPVPKPDGKWRMVLDYREVNKTIPLIAAQNQHSAGILSSIFRGKYKTTLDLSNGFWAHSITPESYWLTAFTWLGQQYCWTRLPQGFLNSPALFNADVVDLLKEVPNVQVYVDDIYISHDDPREHLEQLEKVFSLLLNAGYVVSLKKSEIAQHEVEFLGFNITKEGRGLTETFKQKLLNITPPRDLKQLQSILGLLNFARNFIPNFSELVKPLYNIIATAPGKYITWTTDNSQQLQNIISMLNSAENLEERNPEVRLIMKVNTSPSAGYIRFYNEFAKRPIMYLNYVYTKAEVKFTNTEKLLTTIHKGLIKALDLGMGQEILVYSPIVSMTKIQKTPLPERKALPIRWITWMSYLEDPRIQFHYDKTLPELQQVPTVTDDIIAKIKHPSEFSMVFYTDGSAIKHPNVNKSHNAGMGIAQVQFKPEFTVINTWSIPLGDHTAQLAEVAAVEFACKKALKIDGPVLIVTDSFYVAESVNKELPYWQSNGFFNNKKKPLKHVSKWKSIADCIQLKPDIIIIHEKGHQPTASTFHTEGNNLADKLATQGSYVVNAGKRTADGSEFEKRTADGSEFESPKKKAKVE

SEQ ID NO: 547 - protein, 2085 aa, synthetic construct
MPAAKRVKLDGGDKKYSIGLDIGTNSVGWAVITDEYKVPSKKFKVLGNTDRHSIKKNLIGALLFDSGETAEATRLKRTARRRYTRRKNRICYLQEIFSNEMAKVDDSFFHRLEESFLVEEDKKHERHPIFGNIVDEVAYHEKYPTIYHLRKKLVDSTDKADLRLIYLALAHMIKFRGHFLIEGDLNPDNSDVDKLFIQLVQTYNQLFEENPINASGVDAKAILSARLSKSRRLENLIAQLPGEKKNGLFGNLIALSLGLTPNFKSNFDLAEDAKLQLSKDTYDDDLDNLLAQIGDQYADLFLAAKNLSDAILLSDILRVNTEITKAPLSASMIKRYDEHHQDLTLLKALVRQQLPEKYKEIFFDQSKNGYAGYIDGGASQEEFYKFIKPILEKMDGTEELLVKLNREDLLRKQRTFDNGSIPHQIHLGELHAILRRQEDFYPFLKDNREKIEKILTFRIPYYVGPLARGNSRFAWMTRKSEETITPWNFEEVVDKGASAQSFIERMTNFDKNLPNEKVLPKHSLLYEYFTVYNELTKVKYVTEGMRKPAFLSGEQKKAIVDLLFKTNRKVTVKQLKEDYFKKIECFDSVEISGVEDRFNASLGTYHDLLKIIKDKDFLDNEENEDILEDIVLTLTLFEDREMIEERLKTYAHLFDDKVMKQLKRRRYTGWGRLSRKLINGIRDKQSGKTILDFLKSDGFANRNFMQLIHDDSLTFKEDIQKAQVSGQGDSLHEHIANLAGSPAIKKGILQTVKVVDELVKVMGRHKPENIVIEMARENQTTQKGQKNSRERMKRIEEGIKELGSQILKEHPVENTQLQNEKLYLYYLQNGRDMYVDQELDINRLSDYDVDHIVPQSFLKDDSIDNKVLTRSDKARGKSDNVPSEEVVKKMKNYWRQLLNAKLITQRKFDNLTKAERGGLSELDKAGFIKRQLVETRQITKHVAQILDSRMNTKYDENDKLIREVKVITLKSKLVSDFRKDFQFYKVREINNYHHAHDAYLNAVVGTALIKKYPKLESEFVYGDYKVYDVRKMIAKSEQEIGKATAKYFFYSNIMNFFKTEITLANGEIRKRPLIETNGETGEIVWDKGRDFATVRKVLSMPQVNIVKKTEVQTGGFSKESILPKRNSDKLIARKKDWDPKKYGGFDSPTVAYSVLVVAKVEKGKSKKLKSVKELLGITIMERSSFEKNPIDFLEAKGYKEVKKDLIIKLPKYSLFELENGRKRMLASAGELQKGNELALPSKYVNFLYLASHYEKLKGSPEDNEQKQLFVEQHKHYLDEIIEQISEFSKRVILADANLDKVLSAYNKHRDKPIREQAENIIHLFTLTNLGAPAAFKYFDTTIDRKRYTSTKEVLDATLIHQSITGLYETRIDLSQLGGDGGGSSGGGPAPGGIPWLMKKPLQLTTLVPLQEYEERLLKQTMLTGSYKEKLQSLFLKYDALWQHWENQVGHRRIKPHHIATGTVNPRPQKQYPINPKAKASIQTVINDLLKQGVLIQQNSIMNTPVYPVPKPDGKWRMVLDYREVNKTIPLIAAQNQHSAGILSSIFRGKYKTTLDLSNGFWAHSITPESYWLTAFTWLGQQYCWTRLPQGFLNSPALFNADVVDLLKEVPNVQVYVDDIYISHDDPREHLEQLEKVFSLLLNAGYVVSLKKSEIAQHEVEFLGFNITKEGRGLTETFKQKLLNITPPRDLKQLQSILGLLNFARNFIPNFSELVKPLYNIIATAPGKYITWTTDNSQQLQNIISMLNSAENLEERNPEVRLIMKVNTSPSAGYIRFYNEFAKRPIMYLNYVYTKAEVKFTNTEKLLTTIHKGLIKALDLGMGQEILVYSPIVSMTKIQKTPLPERKALPIRWITWMSYLEDPRIQFHYDKTLPELQQVPTVTDDIIAKIKHPSEFSMVFYTDGSAIKHPNVNKSHNAGMGIAQVQFKPEFTVINTWSIPLGDHTAQLAEVAAVEFACKKALKIDGPVLIVTDSFYVAESVNKELPYWQSNGFFNNKKKPLKHVSKWKSIADCIQLKPDIIIIHEKGHQPTASTFHTEGNNLADKLATQGSYVVNAGKRTADGSEFEKRTADGSEFESPKKKAKVE

SEQ ID NO: 548 - protein, 2087 aa, synthetic construct
MPAAKRVKLDGGDKKYSIGLDIGTNSVGWAVITDEYKVPSKKFKVLGNTDRHSIKKNLIGALLFDSGETAEATRLKRTARRRYTRRKNRICYLQEIFSNEMAKVDDSFFHRLEESFLVEEDKKHERHPIFGNIVDEVAYHEKYPTIYHLRKKLVDSTDKADLRLIYLALAHMIKFRGHFLIEGDLNPDNSDVDKLFIQLVQTYNQLFEENPINASGVDAKAILSARLSKSRRLENLIAQLPGEKKNGLFGNLIALSLGLTPNFKSNFDLAEDAKLQLSKDTYDDDLDNLLAQIGDQYADLFLAAKNLSDAILLSDILRVNTEITKAPLSASMIKRYDEHHQDLTLLKALVRQQLPEKYKEIFFDQSKNGYAGYIDGGASQEEFYKFIKPILEKMDGTEELLVKLNREDLLRKQRTFDNGSIPHQIHLGELHAILRRQEDFYPFLKDNREKIEKILTFRIPYYVGPLARGNSRFAWMTRKSEETITPWNFEEVVDKGASAQSFIERMTNFDKNLPNEKVLPKHSLLYEYFTVYNELTKVKYVTEGMRKPAFLSGEQKKAIVDLLFKTNRKVTVKQLKEDYFKKIECFDSVEISGVEDRFNASLGTYHDLLKIIKDKDFLDNEENEDILEDIVLTLTLFEDREMIEERLKTYAHLFDDKVMKQLKRRRYTGWGRLSRKLINGIRDKQSGKTILDFLKSDGFANRNFMQLIHDDSLTFKEDIQKAQVSGQGDSLHEHIANLAGSPAIKKGILQTVKVVDELVKVMGRHKPENIVIEMARENQTTQKGQKNSRERMKRIEEGIKELGSQILKEHPVENTQLQNEKLYLYYLQNGRDMYVDQELDINRLSDYDVDHIVPQSFLKDDSIDNKVLTRSDKARGKSDNVPSEEVVKKMKNYWRQLLNAKLITQRKFDNLTKAERGGLSELDKAGFIKRQLVETRQITKHVAQILDSRMNTKYDENDKLIREVKVITLKSKLVSDFRKDFQFYKVREINNYHHAHDAYLNAVVGTALIKKYPKLESEFVYGDYKVYDVRKMIAKSEQEIGKATAKYFFYSNIMNFFKTEITLANGEIRKRPLIETNGETGEIVWDKGRDFATVRKVLSMPQVNIVKKTEVQTGGFSKESILPKRNSDKLIARKKDWDPKKYGGFDSPTVAYSVLVVAKVEKGKSKKLKSVKELLGITIMERSSFEKNPIDFLEAKGYKEVKKDLIIKLPKYSLFELENGRKRMLASAGELQKGNELALPSKYVNFLYLASHYEKLKGSPEDNEQKQLFVEQHKHYLDEIIEQISEFSKRVILADANLDKVLSAYNKHRDKPIREQAENIIHLFTLTNLGAPAAFKYFDTTIDRKRYTSTKEVLDATLIHQSITGLYETRIDLSQLGGDGGGGSEAAAKPAPGGIPWLMKKPLQLTTLVPLQEYEERLLKQTMLTGSYKEKLQSLFLKYDALWQHWENQVGHRRIKPHHIATGTVNPRPQKQYPINPKAKASIQTVINDLLKQGVLIQQNSIMNTPVYPVPKPDGKWRMVLDYREVNKTIPLIAAQNQHSAGILSSIFRGKYKTTLDLSNGFWAHSITPESYWLTAFTWLGQQYCWTRLPQGFLNSPALFNADVVDLLKEVPNVQVYVDDIYISHDDPREHLEQLEKVFSLLLNAGYVVSLKKSEIAQHEVEFLGFNITKEGRGLTETFKQKLLNITPPRDLKQLQSILGLLNFARNFIPNFSELVKPLYNIIATAPGKYITWTTDNSQQLQNIISMLNSAENLEERNPEVRLIMKVNTSPSAGYIRFYNEFAKRPIMYLNYVYTKAEVKFTNTEKLLTTIHKGLIKALDLGMGQEILVYSPIVSMTKIQKTPLPERKALPIRWITWMSYLEDPRIQFHYDKTLPELQQVPTVTDDIIAKIKHPSEFSMVFYTDGSAIKHPNVNKSHNAGMGIAQVQFKPEFTVINTWSIPLGDHTAQLAEVAAVEFACKKALKIDGPVLIVTDSFYVAESVNKELPYWQSNGFFNNKKKPLKHVSKWKSIADCIQLKPDIIIIHEKGHQPTASTFHTEGNNLADKLATQGSYVVNAGKRTADGSEFEKRTADGSEFESPKKKAKVE

SEQ ID NO: 549 - protein, 2087 aa, synthetic construct
MPAAKRVKLDGGDKKYSIGLDIGTNSVGWAVITDEYKVPSKKFKVLGNTDRHSIKKNLIGALLFDSGETAEATRLKRTARRRYTRRKNRICYLQEIFSNEMAKVDDSFFHRLEESFLVEEDKKHERHPIFGNIVDEVAYHEKYPTIYHLRKKLVDSTDKADLRLIYLALAHMIKFRGHFLIEGDLNPDNSDVDKLFIQLVQTYNQLFEENPINASGVDAKAILSARLSKSRRLENLIAQLPGEKKNGLFGNLIALSLGLTPNFKSNFDLAEDAKLQLSKDTYDDDLDNLLAQIGDQYADLFLAAKNLSDAILLSDILRVNTEITKAPLSASMIKRYDEHHQDLTLLKALVRQQLPEKYKEIFFDQSKNGYAGYIDGGASQEEFYKFIKPILEKMDGTEELLVKLNREDLLRKQRTFDNGSIPHQIHLGELHAILRRQEDFYPFLKDNREKIEKILTFRIPYYVGPLARGNSRFAWMTRKSEETITPWNFEEVVDKGASAQSFIERMTNFDKNLPNEKVLPKHSLLYEYFTVYNELTKVKYVTEGMRKPAFLSGEQKKAIVDLLFKTNRKVTVKQLKEDYFKKIECFDSVEISGVEDRFNASLGTYHDLLKIIKDKDFLDNEENEDILEDIVLTLTLFEDREMIEERLKTYAHLFDDKVMKQLKRRRYTGWGRLSRKLINGIRDKQSGKTILDFLKSDGFANRNFMQLIHDDSLTFKEDIQKAQVSGQGDSLHEHIANLAGSPAIKKGILQTVKVVDELVKVMGRHKPENIVIEMARENQTTQKGQKNSRERMKRIEEGIKELGSQILKEHPVENTQLQNEKLYLYYLQNGRDMYVDQELDINRLSDYDVDHIVPQSFLKDDSIDNKVLTRSDKARGKSDNVPSEEVVKKMKNYWRQLLNAKLITQRKFDNLTKAERGGLSELDKAGFIKRQLVETRQITKHVAQILDSRMNTKYDENDKLIREVKVITLKSKLVSDFRKDFQFYKVREINNYHHAHDAYLNAVVGTALIKKYPKLESEFVYGDYKVYDVRKMIAKSEQEIGKATAKYFFYSNIMNFFKTEITLANGEIRKRPLIETNGETGEIVWDKGRDFATVRKVLSMPQVNIVKKTEVQTGGFSKESILPKRNSDKLIARKKDWDPKKYGGFDSPTVAYSVLVVAKVEKGKSKKLKSVKELLGITIMERSSFEKNPIDFLEAKGYKEVKKDLIIKLPKYSLFELENGRKRMLASAGELQKGNELALPSKYVNFLYLASHYEKLKGSPEDNEQKQLFVEQHKHYLDEIIEQISEFSKRVILADANLDKVLSAYNKHRDKPIREQAENIIHLFTLTNLGAPAAFKYFDTTIDRKRYTSTKEVLDATLIHQSITGLYETRIDLSQLGGDGGGGGPAPEAAAKGGIPWLMKKPLQLTTLVPLQEYEERLLKQTMLTGSYKEKLQSLFLKYDALWQHWENQVGHRRIKPHHIATGTVNPRPQKQYPINPKAKASIQTVINDLLKQGVLIQQNSIMNTPVYPVPKPDGKWRMVLDYREVNKTIPLIAAQNQHSAGILSSIFRGKYKTTLDLSNGFWAHSITPESYWLTAFTWLGQQYCWTRLPQGFLNSPALFNADVVDLLKEVPNVQVYVDDIYISHDDPREHLEQLEKVFSLLLNAGYVVSLKKSEIAQHEVEFLGFNITKEGRGLTETFKQKLLNITPPRDLKQLQSILGLLNFARNFIPNFSELVKPLYNIIATAPGKYITWTTDNSQQLQNIISMLNSAENLEERNPEVRLIMKVNTSPSAGYIRFYNEFAKRPIMYLNYVYTKAEVKFTNTEKLLTTIHKGLIKALDLGMGQEILVYSPIVSMTKIQKTPLPERKALPIRWITWMSYLEDPRIQFHYDKTLPELQQVPTVTDDIIAKIKHPSEFSMVFYTDGSAIKHPNVNKSHNAGMGIAQVQFKPEFTVINTWSIPLGDHTAQLAEVAAVEFACKKALKIDGPVLIVTDSFYVAESVNKELPYWQSNGFFNNKKKPLKHVSKWKSIADCIQLKPDIIIIHEKGHQPTASTFHTEGNNLADKLATQGSYVVNAGKRTADGSEFEKRTADGSEFESPKKKAKVE

SEQ ID NO: 550 - protein, 2106 aa, synthetic construct
MPAAKRVKLDGGDKKYSIGLDIGTNSVGWAVITDEYKVPSKKFKVLGNTDRHSIKKNLIGALLFDSGETAEATRLKRTARRRYTRRKNRICYLQEIFSNEMAKVDDSFFHRLEESFLVEEDKKHERHPIFGNIVDEVAYHEKYPTIYHLRKKLVDSTDKADLRLIYLALAHMIKFRGHFLIEGDLNPDNSDVDKLFIQLVQTYNQLFEENPINASGVDAKAILSARLSKSRRLENLIAQLPGEKKNGLFGNLIALSLGLTPNFKSNFDLAEDAKLQLSKDTYDDDLDNLLAQIGDQYADLFLAAKNLSDAILLSDILRVNTEITKAPLSASMIKRYDEHHQDLTLLKALVRQQLPEKYKEIFFDQSKNGYAGYIDGGASQEEFYKFIKPILEKMDGTEELLVKLNREDLLRKQRTFDNGSIPHQIHLGELHAILRRQEDFYPFLKDNREKIEKILTFRIPYYVGPLARGNSRFAWMTRKSEETITPWNFEEVVDKGASAQSFIERMTNFDKNLPNEKVLPKHSLLYEYFTVYNELTKVKYVTEGMRKPAFLSGEQKKAIVDLLFKTNRKVTVKQLKEDYFKKIECFDSVEISGVEDRFNASLGTYHDLLKIIKDKDFLDNEENEDILEDIVLTLTLFEDREMIEERLKTYAHLFDDKVMKQLKRRRYTGWGRLSRKLINGIRDKQSGKTILDFLKSDGFANRNFMQLIHDDSLTFKEDIQKAQVSGQGDSLHEHIANLAGSPAIKKGILQTVKVVDELVKVMGRHKPENIVIEMARENQTTQKGQKNSRERMKRIEEGIKELGSQILKEHPVENTQLQNEKLYLYYLQNGRDMYVDQELDINRLSDYDVDHIVPQSFLKDDSIDNKVLTRSDKARGKSDNVPSEEVVKKMKNYWRQLLNAKLITQRKFDNLTKAERGGLSELDKAGFIKRQLVETRQITKHVAQILDSRMNTKYDENDKLIREVKVITLKSKLVSDFRKDFQFYKVREINNYHHAHDAYLNAVVGTALIKKYPKLESEFVYGDYKVYDVRKMIAKSEQEIGKATAKYFFYSNIMNFFKTEITLANGEIRKRPLIETNGETGEIVWDKGRDFATVRKVLSMPQVNIVKKTEVQTGGFSKESILPKRNSDKLIARKKDWDPKKYGGFDSPTVAYSVLVVAKVEKGKSKKLKSVKELLGITIMERSSFEKNPIDFLEAKGYKEVKKDLIIKLPKYSLFELENGRKRMLASAGELQKGNELALPSKYVNFLYLASHYEKLKGSPEDNEQKQLFVEQHKHYLDEIIEQISEFSKRVILADANLDKVLSAYNKHRDKPIREQAENIIHLFTLTNLGAPAAFKYFDTTIDRKRYTSTKEVLDATLIHQSITGLYETRIDLSQLGGDGGEAAAKEAAAKEAAAKEAAAKEAAAKEAAAKGGIPWLMKKPLQLTTLVPLQEYEERLLKQTMLTGSYKEKLQSLFLKYDALWQHWENQVGHRRIKPHHIATGTVNPRPQKQYPINPKAKASIQTVINDLLKQGVLIQQNSIMNTPVYPVPKPDGKWRMVLDYREVNKTIPLIAAQNQHSAGILSSIFRGKYKTTLDLSNGFWAHSITPESYWLTAFTWLGQQYCWTRLPQGFLNSPALFNADVVDLLKEVPNVQVYVDDIYISHDDPREHLEQLEKVFSLLLNAGYVVSLKKSEIAQHEVEFLGFNITKEGRGLTETFKQKLLNITPPRDLKQLQSILGKLNFARNFIPNFSELVKPLYNIIATAPGKYITWTTDNSQQLQNIISMLNSAENLEERNPEVRLIMKVNTSPSAGYIRFYNEFAKRPIMYLNYVYTKAEVKFTNTEKLLTTIHKGLIKALDLGMGQEILVYSPIVSMTKIQKTPLPERKALPIRWITWMSYLEDPRIQFHYDKTLPELQQVPTVTDDIIAKIKHPSEFSMVFYTDGSAIKHPNVNKSHNAGMGIAQVQFKPEFTVINTWSIPLGDHTAQLAEVAAVEFACKKALKIDGPVLIVTDSFYVAESVNKELPYWQSNGFFNNKKKPLKHVSKWKSIADCIQLKPDIIIIHEKGHQPTASTFHTEGNNLADKLATQGSYVVNAGKRTADGSEFEKRTADGSEFESPKKKAKVE

SEQ ID NO: 551 - protein, 2079 aa, synthetic construct
MPAAKRVKLDGGDKKYSIGLDIGTNSVGWAVITDEYKVPSKKFKVLGNTDRHSIKKNLIGALLFDSGETAEATRLKRTARRRYTRRKNRICYLQEIFSNEMAKVDDSFFHRLEESFLVEEDKKHERHPIFGNIVDEVAYHEKYPTIYHLRKKLVDSTDKADLRLIYLALAHMIKFRGHFLIEGDLNPDNSDVDKLFIQLVQTYNQLFEENPINASGVDAKAILSARLSKSRRLENLIAQLPGEKKNGLFGNLIALSLGLTPNFKSNFDLAEDAKLQLSKDTYDDDLDNLLAQIGDQYADLFLAAKNLSDAILLSDILRVNTEITKAPLSASMIKRYDEHHQDLTLLKALVRQQLPEKYKEIFFDQSKNGYAGYIDGGASQEEFYKFIKPILEKMDGTEELLVKLNREDLLRKQRTFDNGSIPHQIHLGELHAILRRQEDFYPFLKDNREKIEKILTFRIPYYVGPLARGNSRFAWMTRKSEETITPWNFEEVVDKGASAQSFIERMTNFDKNLPNEKVLPKHSLLYEYFTVYNELTKVKYVTEGMRKPAFLSGEQKKAIVDLLFKTNRKVTVKQLKEDYFKKIECFDSVEISGVEDRFNASLGTYHDLLKIIKDKDFLDNEENEDILEDIVLTLTLFEDREMIEERLKTYAHLFDDKVMKQLKRRRYTGWGRLSRKLINGIRDKQSGKTILDFLKSDGFANRNFMQLIHDDSLTFKEDIQKAQVSGQGDSLHEHIANLAGSPAIKKGILQTVKVVDELVKVMGRHKPENIVIEMARENQTTQKGQKNSRERMKRIEEGIKELGSQILKEHPVENTQLQNEKLYLYYLQNGRDMYVDQELDINRLSDYDVDHIVPQSFLKDDSIDNKVLTRSDKARGKSDNVPSEEVVKKMKNYWRQLLNAKLITQRKFDNLTKAERGGLSELDKAGFIKRQLVETRQITKHVAQILDSRMNTKYDENDKLIREVKVITLKSKLVSDFRKDFQFYKVREINNYHHAHDAYLNAVVGTALIKKYPKLESEFVYGDYKVYDVRKMIAKSEQEIGKATAKYFFYSNIMNFFKTEITLANGEIRKRPLIETNGETGEIVWDKGRDFATVRKVLSMPQVNIVKKTEVQTGGFSKESILPKRNSDKLIARKKDWDPKKYGGFDSPTVAYSVLVVAKVEKGKSKKLKSVKELLGITIMERSSFEKNPIDFLEAKGYKEVKKDLIIKLPKYSLFELENGRKRMLASAGELQKGNELALPSKYVNFLYLASHYEKLKGSPEDNEQKQLFVEQHKHYLDEIIEQISEFSKRVILADANLDKVLSAYNKHRDKPIREQAENIIHLFTLTNLGAPAAFKYFDTTIDRKRYTSTKEVLDATLIHQSITGLYETRIDLSQLGGDGGGSSGGIPWLMKKPLQLTTLVPLQEYEERLLKQTMLTGSYKEKLQSLFLKYDALWQHWENQVGHRRIKPHHIATGTVNPRPQKQYPINPKAKASIQTVINDLLKQGVLIQQNSIMNTPVYPVPKPDGKWRMVLDYREVNKTIPLIAAQNQHSAGILSSIFRGKYKTTLDLSNGFWAHSITPESYWLTAFTWLGQQYCWTRLPQGFLNSPALFNADVVDLLKEVPNVQVYVDDIYISHDDPREHLEQLEKVFSLLLNAGYVVSLKKSEIAQHEVEFLGFNITKEGRGLTETFKQKLLNITPPRDLKQLQSILGKLNFARNFIPNFSELVKPLYNIIATAPGKYITWTTDNSQQLQNIISMLNSAENLEERNPEVRLIMKVNTSPSAGYIRFYNEFAKRPIMYLNYVYTKAEVKFTNTEKLLTTIHKGLIKALDLGMGQEILVYSPIVSMTKIQKTPLPERKALPIRWITWMSYLEDPRIQFHYDKTLPELQQVPTVTDDIIAKIKHPSEFSMVFYTDGSAIKHPNVNKSHNAGMGIAQVQFKPEFTVINTWSIPLGDHTAQLAEVAAVEFACKKALKIDGPVLIVTDSFYVAESVNKELPYWQSNGFFNNKKKPLKHVSKWKSIADCIQLKPDIIIIHEKGHQPTASTFHTEGNNLADKLATQGSYVVNAGKRTADGSEFEKRTADGSEFESPKKKAKVE

SEQ ID NO: 552 - protein, 2079 aa, synthetic construct
MPAAKRVKLDGGDKKYSIGLDIGTNSVGWAVITDEYKVPSKKFKVLGNTDRHSIKKNLIGALLFDSGETAEATRLKRTARRRYTRRKNRICYLQEIFSNEMAKVDDSFFHRLEESFLVEEDKKHERHPIFGNIVDEVAYHEKYPTIYHLRKKLVDSTDKADLRLIYLALAHMIKFRGHFLIEGDLNPDNSDVDKLFIQLVQTYNQLFEENPINASGVDAKAILSARLSKSRRLENLIAQLPGEKKNGLFGNLIALSLGLTPNFKSNFDLAEDAKLQLSKDTYDDDLDNLLAQIGDQYADLFLAAKNLSDAILLSDILRVNTEITKAPLSASMIKRYDEHHQDLTLLKALVRQQLPEKYKEIFFDQSKNGYAGYIDGGASQEEFYKFIKPILEKMDGTEELLVKLNREDLLRKQRTFDNGSIPHQIHLGELHAILRRQEDFYPFLKDNREKIEKILTFRIPYYVGPLARGNSRFAWMTRKSEETITPWNFEEVVDKGASAQSFIERMTNFDKNLPNEKVLPKHSLLYEYFTVYNELTKVKYVTEGMRKPAFLSGEQKKAIVDLLFKTNRKVTVKQLKEDYFKKIECFDSVEISGVEDRFNASLGTYHDLLKIIKDKDFLDNEENEDILEDIVLTLTLFEDREMIEERLKTYAHLFDDKVMKQLKRRRYTGWGRLSRKLINGIRDKQSGKTILDFLKSDGFANRNFMQLIHDDSLTFKEDIQKAQVSGQGDSLHEHIANLAGSPAIKKGILQTVKVVDELVKVMGRHKPENIVIEMARENQTTQKGQKNSRERMKRIEEGIKELGSQILKEHPVENTQLQNEKLYLYYLQNGRDMYVDQELDINRLSDYDVDHIVPQSFLKDDSIDNKVLTRSDKARGKSDNVPSEEVVKKMKNYWRQLLNAKLITQRKFDNLTKAERGGLSELDKAGFIKRQLVETRQITKHVAQILDSRMNTKYDENDKLIREVKVITLKSKLVSDFRKDFQFYKVREINNYHHAHDAYLNAVVGTALIKKYPKLESEFVYGDYKVYDVRKMIAKSEQEIGKATAKYFFYSNIMNFFKTEITLANGEIRKRPLIETNGETGEIVWDKGRDFATVRKVLSMPQVNIVKKTEVQTGGFSKESILPKRNSDKLIARKKDWDPKKYGGFDSPTVAYSVLVVAKVEKGKSKKLKSVKELLGITIMERSSFEKNPIDFLEAKGYKEVKKDLIIKLPKYSLFELENGRKRMLASAGELQKGNELALPSKYVNFLYLASHYEKLKGSPEDNEQKQLFVEQHKHYLDEIIEQISEFSKRVILADANLDKVLSAYNKHRDKPIREQAENIIHLFTLTNLGAPAAFKYFDTTIDRKRYTSTKEVLDATLIHQSITGLYETRIDLSQLGGDGGGGSGGIPWLMKKPLQLTTLVPLQEYEERLLKQTMLTGSYKEKLQSLFLKYDALWQHWENQVGHRRIKPHHIATGTVNPRPQKQYPINPKAKASIQTVINDLLKQGVLIQQNSIMNTPVYPVPKPDGKWRMVLDYREVNKTIPLIAAQNQHSAGILSSIFRGKYKTTLDLSNGFWAHSITPESYWLTAFTWLGQQYCWTRLPQGFLNSPALFNADVVDLLKEVPNVQVYVDDIYISHDDPREHLEQLEKVFSLLLNAGYVVSLKKSEIAQHEVEFLGFNITKEGRGLTETFKQKLLNITPPRDLKQLQSILGKLNFARNFIPNFSELVKPLYNIIATAPGKYITWTTDNSQQLQNIISMLNSAENLEERNPEVRLIMKVNTSPSAGYIRFYNEFAKRPIMYLNYVYTKAEVKFTNTEKLLTTIHKGLIKALDLGMGQEILVYSPIVSMTKIQKTPLPERKALPIRWITWMSYLEDPRIQFHYDKTLPELQQVPTVTDDIIAKIKHPSEFSMVFYTDGSAIKHPNVNKSHNAGMGIAQVQFKPEFTVINTWSIPLGDHTAQLAEVAAVEFACKKALKIDGPVLIVTDSFYVAESVNKELPYWQSNGFFNNKKKPLKHVSKWKSIADCIQLKPDIIIIHEKGHQPTASTFHTEGNNLADKLATQGSYVVNAGKRTADGSEFEKRTADGSEFESPKKKAKVE

SEQ ID NO: 553 - protein, 2087 aa, synthetic construct
MPAAKRVKLDGGDKKYSIGLDIGTNSVGWAVITDEYKVPSKKFKVLGNTDRHSIKKNLIGALLFDSGETAEATRLKRTARRRYTRRKNRICYLQEIFSNEMAKVDDSFFHRLEESFLVEEDKKHERHPIFGNIVDEVAYHEKYPTIYHLRKKLVDSTDKADLRLIYLALAHMIKFRGHFLIEGDLNPDNSDVDKLFIQLVQTYNQLFEENPINASGVDAKAILSARLSKSRRLENLIAQLPGEKKNGLFGNLIALSLGLTPNFKSNFDLAEDAKLQLSKDTYDDDLDNLLAQIGDQYADLFLAAKNLSDAILLSDILRVNTEITKAPLSASMIKRYDEHHQDLTLLKALVRQQLPEKYKEIFFDQSKNGYAGYIDGGASQEEFYKFIKPILEKMDGTEELLVKLNREDLLRKQRTFDNGSIPHQIHLGELHAILRRQEDFYPFLKDNREKIEKILTFRIPYYVGPLARGNSRFAWMTRKSEETITPWNFEEVVDKGASAQSFIERMTNFDKNLPNEKVLPKHSLLYEYFTVYNELTKVKYVTEGMRKPAFLSGEQKKAIVDLLFKTNRKVTVKQLKEDYFKKIECFDSVEISGVEDRFNASLGTYHDLLKIIKDKDFLDNEENEDILEDIVLTLTLFEDREMIEERLKTYAHLFDDKVMKQLKRRRYTGWGRLSRKLINGIRDKQSGKTILDFLKSDGFANRNFMQLIHDDSLTFKEDIQKAQVSGQGDSLHEHIANLAGSPAIKKGILQTVKVVDELVKVMGRHKPENIVIEMARENQTTQKGQKNSRERMKRIEEGIKELGSQILKEHPVENTQLQNEKLYLYYLQNGRDMYVDQELDINRLSDYDVDHIVPQSFLKDDSIDNKVLTRSDKARGKSDNVPSEEVVKKMKNYWRQLLNAKLITQRKFDNLTKAERGGLSELDKAGFIKRQLVETRQITKHVAQILDSRMNTKYDENDKLIREVKVITLKSKLVSDFRKDFQFYKVREINNYHHAHDAYLNAVVGTALIKKYPKLESEFVYGDYKVYDVRKMIAKSEQEIGKATAKYFFYSNIMNFFKTEITLANGEIRKRPLIETNGETGEIVWDKGRDFATVRKVLSMPQVNIVKKTEVQTGGFSKESILPKRNSDKLIARKKDWDPKKYGGFDSPTVAYSVLVVAKVEKGKSKKLKSVKELLGITIMERSSFEKNPIDFLEAKGYKEVKKDLIIKLPKYSLFELENGRKRMLASAGELQKGNELALPSKYVNFLYLASHYEKLKGSPEDNEQKQLFVEQHKHYLDEIIEQISEFSKRVILADANLDKVLSAYNKHRDKPIREQAENIIHLFTLTNLGAPAAFKYFDTTIDRKRYTSTKEVLDATLIHQSITGLYETRIDLSQLGGDGGGSSEAAAKPAPGGIPWLMKKPLQLTTLVPLQEYEERLLKQTMLTGSYKEKLQSLFLKYDALWQHWENQVGHRRIKPHHIATGTVNPRPQKQYPINPKAKASIQTVINDLLKQGVLIQQNSIMNTPVYPVPKPDGKWRMVLDYREVNKTIPLIAAQNQHSAGILSSIFRGKYKTTLDLSNGFWAHSITPESYWLTAFTWLGQQYCWTRLPQGFLNSPALFNADVVDLLKEVPNVQVYVDDIYISHDDPREHLEQLEKVFSLLLNAGYVVSLKKSEIAQHEVEFLGFNITKEGRGLTETFKQKLLNITPPRDLKQLQSILGKLNFARNFIPNFSELVKPLYNIIATAPGKYITWTTDNSQQLQNIISMLNSAENLEERNPEVRLIMKVNTSPSAGYIRFYNEFAKRPIMYLNYVYTKAEVKFTNTEKLLTTIHKGLIKALDLGMGQEILVYSPIVSMTKIQKTPLPERKALPIRWITWMSYLEDPRIQFHYDKTLPELQQVPTVTDDIIAKIKHPSEFSMVFYTDGSAIKHPNVNKSHNAGMGIAQVQFKPEFTVINTWSIPLGDHTAQLAEVAAVEFACKKALKIDGPVLIVTDSFYVAESVNKELPYWQSNGFFNNKKKPLKHVSKWKSIADCIQLKPDIIIIHEKGHQPTASTFHTEGNNLADKLATQGSYVVNAGKRTADGSEFEKRTADGSEFESPKKKAKVE

SEQ ID NO: 554 - protein, 2081 aa, synthetic construct
MPAAKRVKLDGGDKKYSIGLDIGTNSVGWAVITDEYKVPSKKFKVLGNTDRHSIKKNLIGALLFDSGETAEATRLKRTARRRYTRRKNRICYLQEIFSNEMAKVDDSFFHRLEESFLVEEDKKHERHPIFGNIVDEVAYHEKYPTIYHLRKKLVDSTDKADLRLIYLALAHMIKFRGHFLIEGDLNPDNSDVDKLFIQLVQTYNQLFEENPINASGVDAKAILSARLSKSRRLENLIAQLPGEKKNGLFGNLIALSLGLTPNFKSNFDLAEDAKLQLSKDTYDDDLDNLLAQIGDQYADLFLAAKNLSDAILLSDILRVNTEITKAPLSASMIKRYDEHHQDLTLLKALVRQQLPEKYKEIFFDQSKNGYAGYIDGGASQEEFYKFIKPILEKMDGTEELLVKLNREDLLRKQRTFDNGSIPHQIHLGELHAILRRQEDFYPFLKDNREKIEKILTFRIPYYVGPLARGNSRFAWMTRKSEETITPWNFEEVVDKGASAQSFIERMTNFDKNLPNEKVLPKHSLLYEYFTVYNELTKVKYVTEGMRKPAFLSGEQKKAIVDLLFKTNRKVTVKQLKEDYFKKIECFDSVEISGVEDRFNASLGTYHDLLKIIKDKDFLDNEENEDILEDIVLTLTLFEDREMIEERLKTYAHLFDDKVMKQLKRRRYTGWGRLSRKLINGIRDKQSGKTILDFLKSDGFANRNFMQLIHDDSLTFKEDIQKAQVSGQGDSLHEHIANLAGSPAIKKGILQTVKVVDELVKVMGRHKPENIVIEMARENQTTQKGQKNSRERMKRIEEGIKELGSQILKEHPVENTQLQNEKLYLYYLQNGRDMYVDQELDINRLSDYDVDHIVPQSFLKDDSIDNKVLTRSDKARGKSDNVPSEEVVKKMKNYWRQLLNAKLITQRKFDNLTKAERGGLSELDKAGFIKRQLVETRQITKHVAQILDSRMNTKYDENDKLIREVKVITLKSKLVSDFRKDFQFYKVREINNYHHAHDAYLNAVVGTALIKKYPKLESEFVYGDYKVYDVRKMIAKSEQEIGKATAKYFFYSNIMNFFKTEITLANGEIRKRPLIETNGETGEIVWDKGRDFATVRKVLSMPQVNIVKKTEVQTGGFSKESILPKRNSDKLIARKKDWDPKKYGGFDSPTVAYSVLVVAKVEKGKSKKLKSVKELLGITIMERSSFEKNPIDFLEAKGYKEVKKDLIIKLPKYSLFELENGRKRMLASAGELQKGNELALPSKYVNFLYLASHYEKLKGSPEDNEQKQLFVEQHKHYLDEIIEQISEFSKRVILADANLDKVLSAYNKHRDKPIREQAENIIHLFTLTNLGAPAAFKYFDTTIDRKRYTSTKEVLDATLIHQSITGLYETRIDLSQLGGDGGEAAAKGGIPWLMKKPLQLTTLVPLQEYEERLLKQTMLTGSYKEKLQSLFLKYDALWQHWENQVGHRRIKPHHIATGTVNPRPQKQYPINPKAKASIQTVINDLLKQGVLIQQNSIMNTPVYPVPKPDGKWRMVLDYREVNKTIPLIAAQNQHSAGILSSIFRGKYKTTLDLSNGFWAHSITPESYWLTAFTWLGQQYCWTRLPQGFLNSPALFNADVVDLLKEVPNVQVYVDDIYISHDDPREHLEQLEKVFSLLLNAGYVVSLKKSEIAQHEVEFLGFNITKEGRGLTETFKQKLLNITPPRDLKQLQSILGKLNFARNFIPNFSELVKPLYNIIATAPGKYITWTTDNSQQLQNIISMLNSAENLEERNPEVRLIMKVNTSPSAGYIRFYNEFAKRPIMYLNYVYTKAEVKFTNTEKLLTTIHKGLIKALDLGMGQEILVYSPIVSMTKIQKTPLPERKALPIRWITWMSYLEDPRIQFHYDKTLPELQQVPTVTDDIIAKIKHPSEFSMVFYTDGSAIKHPNVNKSHNAGMGIAQVQFKPEFTVINTWSIPLGDHTAQLAEVAAVEFACKKALKIDGPVLIVTDSFYVAESVNKELPYWQSNGFFNNKKKPLKHVSKWKSIADCIQLKPDIIIIHEKGHQPTASTFHTEGNNLADKLATQGSYVVNAGKRTADGSEFEKRTADGSEFESPKKKAKVE

SEQ ID NO: 555 - protein, 2087 aa, synthetic construct
MPAAKRVKLDGGDKKYSIGLDIGTNSVGWAVITDEYKVPSKKFKVLGNTDRHSIKKNLIGALLFDSGETAEATRLKRTARRRYTRRKNRICYLQEIFSNEMAKVDDSFFHRLEESFLVEEDKKHERHPIFGNIVDEVAYHEKYPTIYHLRKKLVDSTDKADLRLIYLALAHMIKFRGHFLIEGDLNPDNSDVDKLFIQLVQTYNQLFEENPINASGVDAKAILSARLSKSRRLENLIAQLPGEKKNGLFGNLIALSLGLTPNFKSNFDLAEDAKLQLSKDTYDDDLDNLLAQIGDQYADLFLAAKNLSDAILLSDILRVNTEITKAPLSASMIKRYDEHHQDLTLLKALVRQQLPEKYKEIFFDQSKNGYAGYIDGGASQEEFYKFIKPILEKMDGTEELLVKLNREDLLRKQRTFDNGSIPHQIHLGELHAILRRQEDFYPFLKDNREKIEKILTFRIPYYVGPLARGNSRFAWMTRKSEETITPWNFEEVVDKGASAQSFIERMTNFDKNLPNEKVLPKHSLLYEYFTVYNELTKVKYVTEGMRKPAFLSGEQKKAIVDLLFKTNRKVTVKQLKEDYFKKIECFDSVEISGVEDRFNASLGTYHDLLKIIKDKDFLDNEENEDILEDIVLTLTLFEDREMIEERLKTYAHLFDDKVMKQLKRRRYTGWGRLSRKLINGIRDKQSGKTILDFLKSDGFANRNFMQLIHDDSLTFKEDIQKAQVSGQGDSLHEHIANLAGSPAIKKGILQTVKVVDELVKVMGRHKPENIVIEMARENQTTQKGQKNSRERMKRIEEGIKELGSQILKEHPVENTQLQNEKLYLYYLQNGRDMYVDQELDINRLSDYDVDHIVPQSFLKDDSIDNKVLTRSDKARGKSDNVPSEEVVKKMKNYWRQLLNAKLITQRKFDNLTKAERGGLSELDKAGFIKRQLVETRQITKHVAQILDSRMNTKYDENDKLIREVKVITLKSKLVSDFRKDFQFYKVREINNYHHAHDAYLNAVVGTALIKKYPKLESEFVYGDYKVYDVRKMIAKSEQEIGKATAKYFFYSNIMNFFKTEITLANGEIRKRPLIETNGETGEIVWDKGRDFATVRKVLSMPQVNIVKKTEVQTGGFSKESILPKRNSDKLIARKKDWDPKKYGGFDSPTVAYSVLVVAKVEKGKSKKLKSVKELLGITIMERSSFEKNPIDFLEAKGYKEVKKDLIIKLPKYSLFELENGRKRMLASAGELQKGNELALPSKYVNFLYLASHYEKLKGSPEDNEQKQLFVEQHKHYLDEIIEQISEFSKRVILADANLDKVLSAYNKHRDKPIREQAENIIHLFTLTNLGAPAAFKYFDTTIDRKRYTSTKEVLDATLIHQSITGLYETRIDLSQLGGDGGEAAAKGGSGGGGGIPWLMKKPLQLTTLVPLQEYEERLLKQTMLTGSYKEKLQSLFLKYDALWQHWENQVGHRRIKPHHIATGTVNPRPQKQYPINPKAKASIQTVINDLLKQGVLIQQNSIMNTPVYPVPKPDGKWRMVLDYREVNKTIPLIAAQNQHSAGILSSIFRGKYKTTLDLSNGFWAHSITPESYWLTAFTWLGQQYCWTRLPQGFLNSPALFNADVVDLLKEVPNVQVYVDDIYISHDDPREHLEQLEKVFSLLLNAGYVVSLKKSEIAQHEVEFLGFNITKEGRGLTETFKQKLLNITPPRDLKQLQSILGKLNFARNFIPNFSELVKPLYNIIATAPGKYITWTTDNSQQLQNIISMLNSAENLEERNPEVRLIMKVNTSPSAGYIRFYNEFAKRPIMYLNYVYTKAEVKFTNTEKLLTTIHKGLIKALDLGMGQEILVYSPIVSMTKIQKTPLPERKALPIRWITWMSYLEDPRIQFHYDKTLPELQQVPTVTDDIIAKIKHPSEFSMVFYTDGSAIKHPNVNKSHNAGMGIAQVQFKPEFTVINTWSIPLGDHTAQLAEVAAVEFACKKALKIDGPVLIVTDSFYVAESVNKELPYWQSNGFFNNKKKPLKHVSKWKSIADCIQLKPDIIIIHEKGHQPTASTFHTEGNNLADKLATQGSYVVNAGKRTADGSEFEKRTADGSEFESPKKKAKVE

SEQ ID NO: 556 - protein, 2096 aa, synthetic construct
MPAAKRVKLDGGDKKYSIGLDIGTNSVGWAVITDEYKVPSKKFKVLGNTDRHSIKKNLIGALLFDSGETAEATRLKRTARRRYTRRKNRICYLQEIFSNEMAKVDDSFFHRLEESFLVEEDKKHERHPIFGNIVDEVAYHEKYPTIYHLRKKLVDSTDKADLRLIYLALAHMIKFRGHFLIEGDLNPDNSDVDKLFIQLVQTYNQLFEENPINASGVDAKAILSARLSKSRRLENLIAQLPGEKKNGLFGNLIALSLGLTPNFKSNFDLAEDAKLQLSKDTYDDDLDNLLAQIGDQYADLFLAAKNLSDAILLSDILRVNTEITKAPLSASMIKRYDEHHQDLTLLKALVRQQLPEKYKEIFFDQSKNGYAGYIDGGASQEEFYKFIKPILEKMDGTEELLVKLNREDLLRKQRTFDNGSIPHQIHLGELHAILRRQEDFYPFLKDNREKIEKILTFRIPYYVGPLARGNSRFAWMTRKSEETITPWNFEEVVDKGASAQSFIERMTNFDKNLPNEKVLPKHSLLYEYFTVYNELTKVKYVTEGMRKPAFLSGEQKKAIVDLLFKTNRKVTVKQLKEDYFKKIECFDSVEISGVEDRFNASLGTYHDLLKIIKDKDFLDNEENEDILEDIVLTLTLFEDREMIEERLKTYAHLFDDKVMKQLKRRRYTGWGRLSRKLINGIRDKQSGKTILDFLKSDGFANRNFMQLIHDDSLTFKEDIQKAQVSGQGDSLHEHIANLAGSPAIKKGILQTVKVVDELVKVMGRHKPENIVIEMARENQTTQKGQKNSRERMKRIEEGIKELGSQILKEHPVENTQLQNEKLYLYYLQNGRDMYVDQELDINRLSDYDVDHIVPQSFLKDDSIDNKVLTRSDKARGKSDNVPSEEVVKKMKNYWRQLLNAKLITQRKFDNLTKAERGGLSELDKAGFIKRQLVETRQITKHVAQILDSRMNTKYDENDKLIREVKVITLKSKLVSDFRKDFQFYKVREINNYHHAHDAYLNAVVGTALIKKYPKLESEFVYGDYKVYDVRKMIAKSEQEIGKATAKYFFYSNIMNFFKTEITLANGEIRKRPLIETNGETGEIVWDKGRDFATVRKVLSMPQVNIVKKTEVQTGGFSKESILPKRNSDKLIARKKDWDPKKYGGFDSPTVAYSVLVVAKVEKGKSKKLKSVKELLGITIMERSSFEKNPIDFLEAKGYKEVKKDLIIKLPKYSLFELENGRKRMLASAGELQKGNELALPSKYVNFLYLASHYEKLKGSPEDNEQKQLFVEQHKHYLDEIIEQISEFSKRVILADANLDKVLSAYNKHRDKPIREQAENIIHLFTLTNLGAPAAFKYFDTTIDRKRYTSTKEVLDATLIHQSITGLYETRIDLSQLGGDGGEAAAKEAAAKEAAAKEAAAKGGIPWLMKKPLQLTTLVPLQEYEERLLKQTMLTGSYKEKLQSLFLKYDALWQHWENQVGHRRIKPHHIATGTVNPRPQKQYPINPKAKASIQTVINDLLKQGVLIQQNSIMNTPVYPVPKPDGKWRMVLDYREVNKTIPLIAAQNQHSAGILSSIFRGKYKTTLDLSNGFWAHSITPESYWLTAFTWLGQQYCWTRLPQGFLNSPALFNADVVDLLKEVPNVQVYVDDIYISHDDPREHLEQLEKVFSLLLNAGYVVSLKKSEIAQHEVEFLGFNITKEGRGLTETFKQKLLNITPPRDLKQLQSILGKLNFARNFIPNFSELVKPLYNIIATAPGKYITWTTDNSQQLQNIISMLNSAENLEERNPEVRLIMKVNTSPSAGYIRFYNEFAKRPIMYLNYVYTKAEVKFTNTEKLLTTIHKGLIKALDLGMGQEILVYSPIVSMTKIQKTPLPERKALPIRWITWMSYLEDPRIQFHYDKTLPELQQVPTVTDDIIAKIKHPSEFSMVFYTDGSAIKHPNVNKSHNAGMGIAQVQFKPEFTVINTWSIPLGDHTAQLAEVAAVEFACKKALKIDGPVLIVTDSFYVAESVNKELPYWQSNGFFNNKKKPLKHVSKWKSIADCIQLKPDIIIIHEKGHQPTASTFHTEGNNLADKLATQGSYVVNAGKRTADGSEFEKRTADGSEFESPKKKAKVE

SEQ ID NO: 557 - protein, 2086 aa, synthetic construct
MPAAKRVKLDGGDKKYSIGLDIGTNSVGWAVITDEYKVPSKKFKVLGNTDRHSIKKNLIGALLFDSGETAEATRLKRTARRRYTRRKNRICYLQEIFSNEMAKVDDSFFHRLEESFLVEEDKKHERHPIFGNIVDEVAYHEKYPTIYHLRKKLVDSTDKADLRLIYLALAHMIKFRGHFLIEGDLNPDNSDVDKLFIQLVQTYNQLFEENPINASGVDAKAILSARLSKSRRLENLIAQLPGEKKNGLFGNLIALSLGLTPNFKSNFDLAEDAKLQLSKDTYDDDLDNLLAQIGDQYADLFLAAKNLSDAILLSDILRVNTEITKAPLSASMIKRYDEHHQDLTLLKALVRQQLPEKYKEIFFDQSKNGYAGYIDGGASQEEFYKFIKPILEKMDGTEELLVKLNREDLLRKQRTFDNGSIPHQIHLGELHAILRRQEDFYPFLKDNREKIEKILTFRIPYYVGPLARGNSRFAWMTRKSEETITPWNFEEVVDKGASAQSFIERMTNFDKNLPNEKVLPKHSLLYEYFTVYNELTKVKYVTEGMRKPAFLSGEQKKAIVDLLFKTNRKVTVKQLKEDYFKKIECFDSVEISGVEDRFNASLGTYHDLLKIIKDKDFLDNEENEDILEDIVLTLTLFEDREMIEERLKTYAHLFDDKVMKQLKRRRYTGWGRLSRKLINGIRDKQSGKTILDFLKSDGFANRNFMQLIHDDSLTFKEDIQKAQVSGQGDSLHEHIANLAGSPAIKKGILQTVKVVDELVKVMGRHKPENIVIEMARENQTTQKGQKNSRERMKRIEEGIKELGSQILKEHPVENTQLQNEKLYLYYLQNGRDMYVDQELDINRLSDYDVDHIVPQSFLKDDSIDNKVLTRSDKARGKSDNVPSEEVVKKMKNYWRQLLNAKLITQRKFDNLTKAERGGLSELDKAGFIKRQLVETRQITKHVAQILDSRMNTKYDENDKLIREVKVITLKSKLVSDFRKDFQFYKVREINNYHHAHDAYLNAVVGTALIKKYPKLESEFVYGDYKVYDVRKMIAKSEQEIGKATAKYFFYSNIMNFFKTEITLANGEIRKRPLIETNGETGEIVWDKGRDFATVRKVLSMPQVNIVKKTEVQTGGFSKESILPKRNSDKLIARKKDWDPKKYGGFDSPTVAYSVLVVAKVEKGKSKKLKSVKELLGITIMERSSFEKNPIDFLEAKGYKEVKKDLIIKLPKYSLFELENGRKRMLASAGELQKGNELALPSKYVNFLYLASHYEKLKGSPEDNEQKQLFVEQHKHYLDEIIEQISEFSKRVILADANLDKVLSAYNKHRDKPIREQAENIIHLFTLTNLGAPAAFKYFDTTIDRKRYTSTKEVLDATLIHQSITGLYETRIDLSQLGGDGGGGGGSGGGGSGGIPWLMKKPLQLTTLVPLQEYEERLLKQTMLTGSYKEKLQSLFLKYDALWQHWENQVGHRRIKPHHIATGTVNPRPQKQYPINPKAKASIQTVINDLLKQGVLIQQNSIMNTPVYPVPKPDGKWRMVLDYREVNKTIPLIAAQNQHSAGILSSIFRGKYKTTLDLSNGFWAHSITPESYWLTAFTWLGQQYCWTRLPQGFLNSPALFNADVVDLLKEVPNVQVYVDDIYISHDDPREHLEQLEKVFSLLLNAGYVVSLKKSEIAQHEVEFLGFNITKEGRGLTETFKQKLLNITPPRDLKQLQSILGKLNFARNFIPNFSELVKPLYNIIATAPGKYITWTTDNSQQLQNIISMLNSAENLEERNPEVRLIMKVNTSPSAGYIRFYNEFAKRPIMYLNYVYTKAEVKFTNTEKLLTTIHKGLIKALDLGMGQEILVYSPIVSMTKIQKTPLPERKALPIRWITWMSYLEDPRIQFHYDKTLPELQQVPTVTDDIIAKIKHPSEFSMVFYTDGSAIKHPNVNKSHNAGMGIAQVQFKPEFTVINTWSIPLGDHTAQLAEVAAVEFACKKALKIDGPVLIVTDSFYVAESVNKELPYWQSNGFFNNKKKPLKHVSKWKSIADCIQLKPDIIIIHEKGHQPTASTFHTEGNNLADKLATQGSYVVNAGKRTADGSEFEKRTADGSEFESPKKKAKVE

SEQ ID NO: 558 - protein, 2087 aa, synthetic construct
MPAAKRVKLDGGDKKYSIGLDIGTNSVGWAVITDEYKVPSKKFKVLGNTDRHSIKKNLIGALLFDSGETAEATRLKRTARRRYTRRKNRICYLQEIFSNEMAKVDDSFFHRLEESFLVEEDKKHERHPIFGNIVDEVAYHEKYPTIYHLRKKLVDSTDKADLRLIYLALAHMIKFRGHFLIEGDLNPDNSDVDKLFIQLVQTYNQLFEENPINASGVDAKAILSARLSKSRRLENLIAQLPGEKKNGLFGNLIALSLGLTPNFKSNFDLAEDAKLQLSKDTYDDDLDNLLAQIGDQYADLFLAAKNLSDAILLSDILRVNTEITKAPLSASMIKRYDEHHQDLTLLKALVRQQLPEKYKEIFFDQSKNGYAGYIDGGASQEEFYKFIKPILEKMDGTEELLVKLNREDLLRKQRTFDNGSIPHQIHLGELHAILRRQEDFYPFLKDNREKIEKILTFRIPYYVGPLARGNSRFAWMTRKSEETITPWNFEEVVDKGASAQSFIERMTNFDKNLPNEKVLPKHSLLYEYFTVYNELTKVKYVTEGMRKPAFLSGEQKKAIVDLLFKTNRKVTVKQLKEDYFKKIECFDSVEISGVEDRFNASLGTYHDLLKIIKDKDFLDNEENEDILEDIVLTLTLFEDREMIEERLKTYAHLFDDKVMKQLKRRRYTGWGRLSRKLINGIRDKQSGKTILDFLKSDGFANRNFMQLIHDDSLTFKEDIQKAQVSGQGDSLHEHIANLAGSPAIKKGILQTVKVVDELVKVMGRHKPENIVIEMARENQTTQKGQKNSRERMKRIEEGIKELGSQILKEHPVENTQLQNEKLYLYYLQNGRDMYVDQELDINRLSDYDVDHIVPQSFLKDDSIDNKVLTRSDKARGKSDNVPSEEVVKKMKNYWRQLLNAKLITQRKFDNLTKAERGGLSELDKAGFIKRQLVETRQITKHVAQILDSRMNTKYDENDKLIREVKVITLKSKLVSDFRKDFQFYKVREINNYHHAHDAYLNAVVGTALIKKYPKLESEFVYGDYKVYDVRKMIAKSEQEIGKATAKYFFYSNIMNFFKTEITLANGEIRKRPLIETNGETGEIVWDKGRDFATVRKVLSMPQVNIVKKTEVQTGGFSKESILPKRNSDKLIARKKDWDPKKYGGFDSPTVAYSVLVVAKVEKGKSKKLKSVKELLGITIMERSSFEKNPIDFLEAKGYKEVKKDLIIKLPKYSLFELENGRKRMLASAGELQKGNELALPSKYVNFLYLASHYEKLKGSPEDNEQKQLFVEQHKHYLDEIIEQISEFSKRVILADANLDKVLSAYNKHRDKPIREQAENIIHLFTLTNLGAPAAFKYFDTTIDRKRYTSTKEVLDATLIHQSITGLYETRIDLSQLGGDGGEAAAKPAPGSSGGIPWLMKKPLQLTTLVPLQEYEERLLKQTMLTGSYKEKLQSLFLKYDALWQHWENQVGHRRIKPHHIATGTVNPRPQKQYPINPKAKASIQTVINDLLKQGVLIQQNSIMNTPVYPVPKPDGKWRMVLDYREVNKTIPLIAAQNQHSAGILSSIFRGKYKTTLDLSNGFWAHSITPESYWLTAFTWLGQQYCWTRLPQGFLNSPALFNADVVDLLKEVPNVQVYVDDIYISHDDPREHLEQLEKVFSLLLNAGYVVSLKKSEIAQHEVEFLGFNITKEGRGLTETFKQKLLNITPPRDLKQLQSILGKLNFARNFIPNFSELVKPLYNIIATAPGKYITWTTDNSQQLQNIISMLNSAENLEERNPEVRLIMKVNTSPSAGYIRFYNEFAKRPIMYLNYVYTKAEVKFTNTEKLLTTIHKGLIKALDLGMGQEILVYSPIVSMTKIQKTPLPERKALPIRWITWMSYLEDPRIQFHYDKTLPELQQVPTVTDDIIAKIKHPSEFSMVFYTDGSAIKHPNVNKSHNAGMGIAQVQFKPEFTVINTWSIPLGDHTAQLAEVAAVEFACKKALKIDGPVLIVTDSFYVAESVNKELPYWQSNGFFNNKKKPLKHVSKWKSIADCIQLKPDIIIIHEKGHQPTASTFHTEGNNLADKLATQGSYVVNAGKRTADGSEFEKRTADGSEFESPKKKAKVE

SEQ ID NO: 559 - protein, 2087 aa, synthetic construct
MPAAKRVKLDGGDKKYSIGLDIGTNSVGWAVITDEYKVPSKKFKVLGNTDRHSIKKNLIGALLFDSGETAEATRLKRTARRRYTRRKNRICYLQEIFSNEMAKVDDSFFHRLEESFLVEEDKKHERHPIFGNIVDEVAYHEKYPTIYHLRKKLVDSTDKADLRLIYLALAHMIKFRGHFLIEGDLNPDNSDVDKLFIQLVQTYNQLFEENPINASGVDAKAILSARLSKSRRLENLIAQLPGEKKNGLFGNLIALSLGLTPNFKSNFDLAEDAKLQLSKDTYDDDLDNLLAQIGDQYADLFLAAKNLSDAILLSDILRVNTEITKAPLSASMIKRYDEHHQDLTLLKALVRQQLPEKYKEIFFDQSKNGYAGYIDGGASQEEFYKFIKPILEKMDGTEELLVKLNREDLLRKQRTFDNGSIPHQIHLGELHAILRRQEDFYPFLKDNREKIEKILTFRIPYYVGPLARGNSRFAWMTRKSEETITPWNFEEVVDKGASAQSFIERMTNFDKNLPNEKVLPKHSLLYEYFTVYNELTKVKYVTEGMRKPAFLSGEQKKAIVDLLFKTNRKVTVKQLKEDYFKKIECFDSVEISGVEDRFNASLGTYHDLLKIIKDKDFLDNEENEDILEDIVLTLTLFEDREMIEERLKTYAHLFDDKVMKQLKRRRYTGWGRLSRKLINGIRDKQSGKTILDFLKSDGFANRNFMQLIHDDSLTFKEDIQKAQVSGQGDSLHEHIANLAGSPAIKKGILQTVKVVDELVKVMGRHKPENIVIEMARENQTTQKGQKNSRERMKRIEEGIKELGSQILKEHPVENTQLQNEKLYLYYLQNGRDMYVDQELDINRLSDYDVDHIVPQSFLKDDSIDNKVLTRSDKARGKSDNVPSEEVVKKMKNYWRQLLNAKLITQRKFDNLTKAERGGLSELDKAGFIKRQLVETRQITKHVAQILDSRMNTKYDENDKLIREVKVITLKSKLVSDFRKDFQFYKVREINNYHHAHDAYLNAVVGTALIKKYPKLESEFVYGDYKVYDVRKMIAKSEQEIGKATAKYFFYSNIMNFFKTEITLANGEIRKRPLIETNGETGEIVWDKGRDFATVRKVLSMPQVNIVKKTEVQTGGFSKESILPKRNSDKLIARKKDWDPKKYGGFDSPTVAYSVLVVAKVEKGKSKKLKSVKELLGITIMERSSFEKNPIDFLEAKGYKEVKKDLIIKLPKYSLFELENGRKRMLASAGELQKGNELALPSKYVNFLYLASHYEKLKGSPEDNEQKQLFVEQHKHYLDEIIEQISEFSKRVILADANLDKVLSAYNKHRDKPIREQAENIIHLFTLTNLGAPAAFKYFDTTIDRKRYTSTKEVLDATLIHQSITGLYETRIDLSQLGGDGGPAPEAAAKGGGGGIPWLMKKPLQLTTLVPLQEYEERLLKQTMLTGSYKEKLQSLFLKYDALWQHWENQVGHRRIKPHHIATGTVNPRPQKQYPINPKAKASIQTVINDLLKQGVLIQQNSIMNTPVYPVPKPDGKWRMVLDYREVNKTIPLIAAQNQHSAGILSSIFRGKYKTTLDLSNGFWAHSITPESYWLTAFTWLGQQYCWTRLPQGFLNSPALFNADVVDLLKEVPNVQVYVDDIYISHDDPREHLEQLEKVFSLLLNAGYVVSLKKSEIAQHEVEFLGFNITKEGRGLTETFKQKLLNITPPRDLKQLQSILGKLNFARNFIPNFSELVKPLYNIIATAPGKYITWTTDNSQQLQNIISMLNSAENLEERNPEVRLIMKVNTSPSAGYIRFYNEFAKRPIMYLNYVYTKAEVKFTNTEKLLTTIHKGLIKALDLGMGQEILVYSPIVSMTKIQKTPLPERKALPIRWITWMSYLEDPRIQFHYDKTLPELQQVPTVTDDIIAKIKHPSEFSMVFYTDGSAIKHPNVNKSHNAGMGIAQVQFKPEFTVINTWSIPLGDHTAQLAEVAAVEFACKKALKIDGPVLIVTDSFYVAESVNKELPYWQSNGFFNNKKKPLKHVSKWKSIADCIQLKPDIIIIHEKGHQPTASTFHTEGNNLADKLATQGSYVVNAGKRTADGSEFEKRTADGSEFESPKKKAKVE

SEQ ID NO: 560 - protein, 2083 aa, synthetic construct
MPAAKRVKLDGGDKKYSIGLDIGTNSVGWAVITDEYKVPSKKFKVLGNTDRHSIKKNLIGALLFDSGETAEATRLKRTARRRYTRRKNRICYLQEIFSNEMAKVDDSFFHRLEESFLVEEDKKHERHPIFGNIVDEVAYHEKYPTIYHLRKKLVDSTDKADLRLIYLALAHMIKFRGHFLIEGDLNPDNSDVDKLFIQLVQTYNQLFEENPINASGVDAKAILSARLSKSRRLENLIAQLPGEKKNGLFGNLIALSLGLTPNFKSNFDLAEDAKLQLSKDTYDDDLDNLLAQIGDQYADLFLAAKNLSDAILLSDILRVNTEITKAPLSASMIKRYDEHHQDLTLLKALVRQQLPEKYKEIFFDQSKNGYAGYIDGGASQEEFYKFIKPILEKMDGTEELLVKLNREDLLRKQRTFDNGSIPHQIHLGELHAILRRQEDFYPFLKDNREKIEKILTFRIPYYVGPLARGNSRFAWMTRKSEETITPWNFEEVVDKGASAQSFIERMTNFDKNLPNEKVLPKHSLLYEYFTVYNELTKVKYVTEGMRKPAFLSGEQKKAIVDLLFKTNRKVTVKQLKEDYFKKIECFDSVEISGVEDRFNASLGTYHDLLKIIKDKDFLDNEENEDILEDIVLTLTLFEDREMIEERLKTYAHLFDDKVMKQLKRRRYTGWGRLSRKLINGIRDKQSGKTILDFLKSDGFANRNFMQLIHDDSLTFKEDIQKAQVSGQGDSLHEHIANLAGSPAIKKGILQTVKVVDELVKVMGRHKPENIVIEMARENQTTQKGQKNSRERMKRIEEGIKELGSQILKEHPVENTQLQNEKLYLYYLQNGRDMYVDQELDINRLSDYDVDHIVPQSFLKDDSIDNKVLTRSDKARGKSDNVPSEEVVKKMKNYWRQLLNAKLITQRKFDNLTKAERGGLSELDKAGFIKRQLVETRQITKHVAQILDSRMNTKYDENDKLIREVKVITLKSKLVSDFRKDFQFYKVREINNYHHAHDAYLNAVVGTALIKKYPKLESEFVYGDYKVYDVRKMIAKSEQEIGKATAKYFFYSNIMNFFKTEITLANGEIRKRPLIETNGETGEIVWDKGRDFATVRKVLSMPQVNIVKKTEVQTGGFSKESILPKRNSDKLIARKKDWDPKKYGGFDSPTVAYSVLVVAKVEKGKSKKLKSVKELLGITIMERSSFEKNPIDFLEAKGYKEVKKDLIIKLPKYSLFELENGRKRMLASAGELQKGNELALPSKYVNFLYLASHYEKLKGSPEDNEQKQLFVEQHKHYLDEIIEQISEFSKRVILADANLDKVLSAYNKHRDKPIREQAENIIHLFTLTNLGAPAAFKYFDTTIDRKRYTSTKEVLDATLIHQSITGLYETRIDLSQLGGDGGPAPAPAPGGIPWLMKKPLQLTTLVPLQEYEERLLKQTMLTGSYKEKLQSLFLKYDALWQHWENQVGHRRIKPHHIATGTVNPRPQKQYPINPKAKASIQTVINDLLKQGVLIQQNSIMNTPVYPVPKPDGKWRMVLDYREVNKTIPLIAAQNQHSAGILSSIFRGKYKTTLDLSNGFWAHSITPESYWLTAFTWLGQQYCWTRLPQGFLNSPALFNADVVDLLKEVPNVQVYVDDIYISHDDPREHLEQLEKVFSLLLNAGYVVSLKKSEIAQHEVEFLGFNITKEGRGLTETFKQKLLNITPPRDLKQLQSILGKLNFARNFIPNFSELVKPLYNIIATAPGKYITWTTDNSQQLQNIISMLNSAENLEERNPEVRLIMKVNTSPSAGYIRFYNEFAKRPIMYLNYVYTKAEVKFTNTEKLLTTIHKGLIKALDLGMGQEILVYSPIVSMTKIQKTPLPERKALPIRWITWMSYLEDPRIQFHYDKTLPELQQVPTVTDDIIAKIKHPSEFSMVFYTDGSAIKHPNVNKSHNAGMGIAQVQFKPEFTVINTWSIPLGDHTAQLAEVAAVEFACKKALKIDGPVLIVTDSFYVAESVNKELPYWQSNGFFNNKKKPLKHVSKWKSIADCIQLKPDIIIIHEKGHQPTASTFHTEGNNLADKLATQGSYVVNAGKRTADGSEFEKRTADGSEFESPKKKAKVE

SEQ ID NO: 561 - protein, 2087 aa, synthetic construct
MPAAKRVKLDGGDKKYSIGLDIGTNSVGWAVITDEYKVPSKKFKVLGNTDRHSIKKNLIGALLFDSGETAEATRLKRTARRRYTRRKNRICYLQEIFSNEMAKVDDSFFHRLEESFLVEEDKKHERHPIFGNIVDEVAYHEKYPTIYHLRKKLVDSTDKADLRLIYLALAHMIKFRGHFLIEGDLNPDNSDVDKLFIQLVQTYNQLFEENPINASGVDAKAILSARLSKSRRLENLIAQLPGEKKNGLFGNLIALSLGLTPNFKSNFDLAEDAKLQLSKDTYDDDLDNLLAQIGDQYADLFLAAKNLSDAILLSDILRVNTEITKAPLSASMIKRYDEHHQDLTLLKALVRQQLPEKYKEIFFDQSKNGYAGYIDGGASQEEFYKFIKPILEKMDGTEELLVKLNREDLLRKQRTFDNGSIPHQIHLGELHAILRRQEDFYPFLKDNREKIEKILTFRIPYYVGPLARGNSRFAWMTRKSEETITPWNFEEVVDKGASAQSFIERMTNFDKNLPNEKVLPKHSLLYEYFTVYNELTKVKYVTEGMRKPAFLSGEQKKAIVDLLFKTNRKVTVKQLKEDYFKKIECFDSVEISGVEDRFNASLGTYHDLLKIIKDKDFLDNEENEDILEDIVLTLTLFEDREMIEERLKTYAHLFDDKVMKQLKRRRYTGWGRLSRKLINGIRDKQSGKTILDFLKSDGFANRNFMQLIHDDSLTFKEDIQKAQVSGQGDSLHEHIANLAGSPAIKKGILQTVKVVDELVKVMGRHKPENIVIEMARENQTTQKGQKNSRERMKRIEEGIKELGSQILKEHPVENTQLQNEKLYLYYLQNGRDMYVDQELDINRLSDYDVDHIVPQSFLKDDSIDNKVLTRSDKARGKSDNVPSEEVVKKMKNYWRQLLNAKLITQRKFDNLTKAERGGLSELDKAGFIKRQLVETRQITKHVAQILDSRMNTKYDENDKLIREVKVITLKSKLVSDFRKDFQFYKVREINNYHHAHDAYLNAVVGTALIKKYPKLESEFVYGDYKVYDVRKMIAKSEQEIGKATAKYFFYSNIMNFFKTEITLANGEIRKRPLIETNGETGEIVWDKGRDFATVRKVLSMPQVNIVKKTEVQTGGFSKESILPKRNSDKLIARKKDWDPKKYGGFDSPTVAYSVLVVAKVEKGKSKKLKSVKELLGITIMERSSFEKNPIDFLEAKGYKEVKKDLIIKLPKYSLFELENGRKRMLASAGELQKGNELALPSKYVNFLYLASHYEKLKGSPEDNEQKQLFVEQHKHYLDEIIEQISEFSKRVILADANLDKVLSAYNKHRDKPIREQAENIIHLFTLTNLGAPAAFKYFDTTIDRKRYTSTKEVLDATLIHQSITGLYETRIDLSQLGGDGGGGSEAAAKGSSGGIPWLMKKPLQLTTLVPLQEYEERLLKQTMLTGSYKEKLQSLFLKYDALWQHWENQVGHRRIKPHHIATGTVNPRPQKQYPINPKAKASIQTVINDLLKQGVLIQQNSIMNTPVYPVPKPDGKWRMVLDYREVNKTIPLIAAQNQHSAGILSSIFRGKYKTTLDLSNGFWAHSITPESYWLTAFTWLGQQYCWTRLPQGFLNSPALFNADVVDLLKEVPNVQVYVDDIYISHDDPREHLEQLEKVFSLLLNAGYVVSLKKSEIAQHEVEFLGFNITKEGRGLTETFKQKLLNITPPRDLKQLQSILGKLNFARNFIPNFSELVKPLYNIIATAPGKYITWTTDNSQQLQNIISMLNSAENLEERNPEVRLIMKVNTSPSAGYIRFYNEFAKRPIMYLNYVYTKAEVKFTNTEKLLTTIHKGLIKALDLGMGQEILVYSPIVSMTKIQKTPLPERKALPIRWITWMSYLEDPRIQFHYDKTLPELQQVPTVTDDIIAKIKHPSEFSMVFYTDGSAIKHPNVNKSHNAGMGIAQVQFKPEFTVINTWSIPLGDHTAQLAEVAAVEFACKKALKIDGPVLIVTDSFYVAESVNKELPYWQSNGFFNNKKKPLKHVSKWKSIADCIQLKPDIIIIHEKGHQPTASTFHTEGNNLADKLATQGSYVVNAGKRTADGSEFEKRTADGSEFESPKKKAKVE

SEQ ID NO: 562 - protein, 2085 aa, synthetic construct
MPAAKRVKLDGGDKKYSIGLDIGTNSVGWAVITDEYKVPSKKFKVLGNTDRHSIKKNLIGALLFDSGETAEATRLKRTARRRYTRRKNRICYLQEIFSNEMAKVDDSFFHRLEESFLVEEDKKHERHPIFGNIVDEVAYHEKYPTIYHLRKKLVDSTDKADLRLIYLALAHMIKFRGHFLIEGDLNPDNSDVDKLFIQLVQTYNQLFEENPINASGVDAKAILSARLSKSRRLENLIAQLPGEKKNGLFGNLIALSLGLTPNFKSNFDLAEDAKLQLSKDTYDDDLDNLLAQIGDQYADLFLAAKNLSDAILLSDILRVNTEITKAPLSASMIKRYDEHHQDLTLLKALVRQQLPEKYKEIFFDQSKNGYAGYIDGGASQEEFYKFIKPILEKMDGTEELLVKLNREDLLRKQRTFDNGSIPHQIHLGELHAILRRQEDFYPFLKDNREKIEKILTFRIPYYVGPLARGNSRFAWMTRKSEETITPWNFEEVVDKGASAQSFIERMTNFDKNLPNEKVLPKHSLLYEYFTVYNELTKVKYVTEGMRKPAFLSGEQKKAIVDLLFKTNRKVTVKQLKEDYFKKIECFDSVEISGVEDRFNASLGTYHDLLKIIKDKDFLDNEENEDILEDIVLTLTLFEDREMIEERLKTYAHLFDDKVMKQLKRRRYTGWGRLSRKLINGIRDKQSGKTILDFLKSDGFANRNFMQLIHDDSLTFKEDIQKAQVSGQGDSLHEHIANLAGSPAIKKGILQTVKVVDELVKVMGRHKPENIVIEMARENQTTQKGQKNSRERMKRIEEGIKELGSQILKEHPVENTQLQNEKLYLYYLQNGRDMYVDQELDINRLSDYDVDHIVPQSFLKDDSIDNKVLTRSDKARGKSDNVPSEEVVKKMKNYWRQLLNAKLITQRKFDNLTKAERGGLSELDKAGFIKRQLVETRQITKHVAQILDSRMNTKYDENDKLIREVKVITLKSKLVSDFRKDFQFYKVREINNYHHAHDAYLNAVVGTALIKKYPKLESEFVYGDYKVYDVRKMIAKSEQEIGKATAKYFFYSNIMNFFKTEITLANGEIRKRPLIETNGETGEIVWDKGRDFATVRKVLSMPQVNIVKKTEVQTGGFSKESILPKRNSDKLIARKKDWDPKKYGGFDSPTVAYSVLVVAKVEKGKSKKLKSVKELLGITIMERSSFEKNPIDFLEAKGYKEVKKDLIIKLPKYSLFELENGRKRMLASAGELQKGNELALPSKYVNFLYLASHYEKLKGSPEDNEQKQLFVEQHKHYLDEIIEQISEFSKRVILADANLDKVLSAYNKHRDKPIREQAENIIHLFTLTNLGAPAAFKYFDTTIDRKRYTSTKEVLDATLIHQSITGLYETRIDLSQLGGDGGGSSPAPGGGGGIPWLMKKPLQLTTLVPLQEYEERLLKQTMLTGSYKEKLQSLFLKYDALWQHWENQVGHRRIKPHHIATGTVNPRPQKQYPINPKAKASIQTVINDLLKQGVLIQQNSIMNTPVYPVPKPDGKWRMVLDYREVNKTIPLIAAQNQHSAGILSSIFRGKYKTTLDLSNGFWAHSITPESYWLTAFTWLGQQYCWTRLPQGFLNSPALFNADVVDLLKEVPNVQVYVDDIYISHDDPREHLEQLEKVFSLLLNAGYVVSLKKSEIAQHEVEFLGFNITKEGRGLTETFKQKLLNITPPRDLKQLQSILGKLNFARNFIPNFSELVKPLYNIIATAPGKYITWTTDNSQQLQNIISMLNSAENLEERNPEVRLIMKVNTSPSAGYIRFYNEFAKRPIMYLNYVYTKAEVKFTNTEKLLTTIHKGLIKALDLGMGQEILVYSPIVSMTKIQKTPLPERKALPIRWITWMSYLEDPRIQFHYDKTLPELQQVPTVTDDIIAKIKHPSEFSMVFYTDGSAIKHPNVNKSHNAGMGIAQVQFKPEFTVINTWSIPLGDHTAQLAEVAAVEFACKKALKIDGPVLIVTDSFYVAESVNKELPYWQSNGFFNNKKKPLKHVSKWKSIADCIQLKPDIIIIHEKGHQPTASTFHTEGNNLADKLATQGSYVVNAGKRTADGSEFEKRTADGSEFESPKKKAKVE

SEQ ID NO: 563 - protein, 2087 aa, synthetic construct
MPAAKRVKLDGGDKKYSIGLDIGTNSVGWAVITDEYKVPSKKFKVLGNTDRHSIKKNLIGALLFDSGETAEATRLKRTARRRYTRRKNRICYLQEIFSNEMAKVDDSFFHRLEESFLVEEDKKHERHPIFGNIVDEVAYHEKYPTIYHLRKKLVDSTDKADLRLIYLALAHMIKFRGHFLIEGDLNPDNSDVDKLFIQLVQTYNQLFEENPINASGVDAKAILSARLSKSRRLENLIAQLPGEKKNGLFGNLIALSLGLTPNFKSNFDLAEDAKLQLSKDTYDDDLDNLLAQIGDQYADLFLAAKNLSDAILLSDILRVNTEITKAPLSASMIKRYDEHHQDLTLLKALVRQQLPEKYKEIFFDQSKNGYAGYIDGGASQEEFYKFIKPILEKMDGTEELLVKLNREDLLRKQRTFDNGSIPHQIHLGELHAILRRQEDFYPFLKDNREKIEKILTFRIPYYVGPLARGNSRFAWMTRKSEETITPWNFEEVVDKGASAQSFIERMTNFDKNLPNEKVLPKHSLLYEYFTVYNELTKVKYVTEGMRKPAFLSGEQKKAIVDLLFKTNRKVTVKQLKEDYFKKIECFDSVEISGVEDRFNASLGTYHDLLKIIKDKDFLDNEENEDILEDIVLTLTLFEDREMIEERLKTYAHLFDDKVMKQLKRRRYTGWGRLSRKLINGIRDKQSGKTILDFLKSDGFANRNFMQLIHDDSLTFKEDIQKAQVSGQGDSLHEHIANLAGSPAIKKGILQTVKVVDELVKVMGRHKPENIVIEMARENQTTQKGQKNSRERMKRIEEGIKELGSQILKEHPVENTQLQNEKLYLYYLQNGRDMYVDQELDINRLSDYDVDHIVPQSFLKDDSIDNKVLTRSDKARGKSDNVPSEEVVKKMKNYWRQLLNAKLITQRKFDNLTKAERGGLSELDKAGFIKRQLVETRQITKHVAQILDSRMNTKYDENDKLIREVKVITLKSKLVSDFRKDFQFYKVREINNYHHAHDAYLNAVVGTALIKKYPKLESEFVYGDYKVYDVRKMIAKSEQEIGKATAKYFFYSNIMNFFKTEITLANGEIRKRPLIETNGETGEIVWDKGRDFATVRKVLSMPQVNIVKKTEVQTGGFSKESILPKRNSDKLIARKKDWDPKKYGGFDSPTVAYSVLVVAKVEKGKSKKLKSVKELLGITIMERSSFEKNPIDFLEAKGYKEVKKDLIIKLPKYSLFELENGRKRMLASAGELQKGNELALPSKYVNFLYLASHYEKLKGSPEDNEQKQLFVEQHKHYLDEIIEQISEFSKRVILADANLDKVLSAYNKHRDKPIREQAENIIHLFTLTNLGAPAAFKYFDTTIDRKRYTSTKEVLDATLIHQSITGLYETRIDLSQLGGDGGGGSEAAAKGGGGGIPWLMKKPLQLTTLVPLQEYEERLLKQTMLTGSYKEKLQSLFLKYDALWQHWENQVGHRRIKPHHIATGTVNPRPQKQYPINPKAKASIQTVINDLLKQGVLIQQNSIMNTPVYPVPKPDGKWRMVLDYREVNKTIPLIAAQNQHSAGILSSIFRGKYKTTLDLSNGFWAHSITPESYWLTAFTWLGQQYCWTRLPQGFLNSPALFNADVVDLLKEVPNVQVYVDDIYISHDDPREHLEQLEKVFSLLLNAGYVVSLKKSEIAQHEVEFLGFNITKEGRGLTETFKQKLLNITPPRDLKQLQSILGKLNFARNFIPNFSELVKPLYNIIATAPGKYITWTTDNSQQLQNIISMLNSAENLEERNPEVRLIMKVNTSPSAGYIRFYNEFAKRPIMYLNYVYTKAEVKFTNTEKLLTTIHKGLIKALDLGMGQEILVYSPIVSMTKIQKTPLPERKALPIRWITWMSYLEDPRIQFHYDKTLPELQQVPTVTDDIIAKIKHPSEFSMVFYTDGSAIKHPNVNKSHNAGMGIAQVQFKPEFTVINTWSIPLGDHTAQLAEVAAVEFACKKALKIDGPVLIVTDSFYVAESVNKELPYWQSNGFFNNKKKPLKHVSKWKSIADCIQLKPDIIIIHEKGHQPTASTFHTEGNNLADKLATQGSYVVNAGKRTADGSEFEKRTADGSEFESPKKKAKVE

SEQ ID NO: 564 - protein, 2082 aa, synthetic construct
MPAAKRVKLDGGDKKYSIGLDIGTNSVGWAVITDEYKVPSKKFKVLGNTDRHSIKKNLIGALLFDSGETAEATRLKRTARRRYTRRKNRICYLQEIFSNEMAKVDDSFFHRLEESFLVEEDKKHERHPIFGNIVDEVAYHEKYPTIYHLRKKLVDSTDKADLRLIYLALAHMIKFRGHFLIEGDLNPDNSDVDKLFIQLVQTYNQLFEENPINASGVDAKAILSARLSKSRRLENLIAQLPGEKKNGLFGNLIALSLGLTPNFKSNFDLAEDAKLQLSKDTYDDDLDNLLAQIGDQYADLFLAAKNLSDAILLSDILRVNTEITKAPLSASMIKRYDEHHQDLTLLKALVRQQLPEKYKEIFFDQSKNGYAGYIDGGASQEEFYKFIKPILEKMDGTEELLVKLNREDLLRKQRTFDNGSIPHQIHLGELHAILRRQEDFYPFLKDNREKIEKILTFRIPYYVGPLARGNSRFAWMTRKSEETITPWNFEEVVDKGASAQSFIERMTNFDKNLPNEKVLPKHSLLYEYFTVYNELTKVKYVTEGMRKPAFLSGEQKKAIVDLLFKTNRKVTVKQLKEDYFKKIECFDSVEISGVEDRFNASLGTYHDLLKIIKDKDFLDNEENEDILEDIVLTLTLFEDREMIEERLKTYAHLFDDKVMKQLKRRRYTGWGRLSRKLINGIRDKQSGKTILDFLKSDGFANRNFMQLIHDDSLTFKEDIQKAQVSGQGDSLHEHIANLAGSPAIKKGILQTVKVVDELVKVMGRHKPENIVIEMARENQTTQKGQKNSRERMKRIEEGIKELGSQILKEHPVENTQLQNEKLYLYYLQNGRDMYVDQELDINRLSDYDVDHIVPQSFLKDDSIDNKVLTRSDKARGKSDNVPSEEVVKKMKNYWRQLLNAKLITQRKFDNLTKAERGGLSELDKAGFIKRQLVETRQITKHVAQILDSRMNTKYDENDKLIREVKVITLKSKLVSDFRKDFQFYKVREINNYHHAHDAYLNAVVGTALIKKYPKLESEFVYGDYKVYDVRKMIAKSEQEIGKATAKYFFYSNIMNFFKTEITLANGEIRKRPLIETNGETGEIVWDKGRDFATVRKVLSMPQVNIVKKTEVQTGGFSKESILPKRNSDKLIARKKDWDPKKYGGFDSPTVAYSVLVVAKVEKGKSKKLKSVKELLGITIMERSSFEKNPIDFLEAKGYKEVKKDLIIKLPKYSLFELENGRKRMLASAGELQKGNELALPSKYVNFLYLASHYEKLKGSPEDNEQKQLFVEQHKHYLDEIIEQISEFSKRVILADANLDKVLSAYNKHRDKPIREQAENIIHLFTLTNLGAPAAFKYFDTTIDRKRYTSTKEVLDATLIHQSITGLYETRIDLSQLGGDGGGGGGSSGGIPWLMKKPLQLTTLVPLQEYEERLLKQTMLTGSYKEKLQSLFLKYDALWQHWENQVGHRRIKPHHIATGTVNPRPQKQYPINPKAKASIQTVINDLLKQGVLIQQNSIMNTPVYPVPKPDGKWRMVLDYREVNKTIPLIAAQNQHSAGILSSIFRGKYKTTLDLSNGFWAHSITPESYWLTAFTWLGQQYCWTRLPQGFLNSPALFNADVVDLLKEVPNVQVYVDDIYISHDDPREHLEQLEKVFSLLLNAGYVVSLKKSEIAQHEVEFLGFNITKEGRGLTETFKQKLLNITPPRDLKQLQSILGKLNFARNFIPNFSELVKPLYNIIATAPGKYITWTTDNSQQLQNIISMLNSAENLEERNPEVRLIMKVNTSPSAGYIRFYNEFAKRPIMYLNYVYTKAEVKFTNTEKLLTTIHKGLIKALDLGMGQEILVYSPIVSMTKIQKTPLPERKALPIRWITWMSYLEDPRIQFHYDKTLPELQQVPTVTDDIIAKIKHPSEFSMVFYTDGSAIKHPNVNKSHNAGMGIAQVQFKPEFTVINTWSIPLGDHTAQLAEVAAVEFACKKALKIDGPVLIVTDSFYVAESVNKELPYWQSNGFFNNKKKPLKHVSKWKSIADCIQLKPDIIIIHEKGHQPTASTFHTEGNNLADKLATQGSYVVNAGKRTADGSEFEKRTADGSEFESPKKKAKVE

SEQ ID NO: 565 - protein, 2085 aa, synthetic construct
MPAAKRVKLDGGDKKYSIGLDIGTNSVGWAVITDEYKVPSKKFKVLGNTDRHSIKKNLIGALLFDSGETAEATRLKRTARRRYTRRKNRICYLQEIFSNEMAKVDDSFFHRLEESFLVEEDKKHERHPIFGNIVDEVAYHEKYPTIYHLRKKLVDSTDKADLRLIYLALAHMIKFRGHFLIEGDLNPDNSDVDKLFIQLVQTYNQLFEENPINASGVDAKAILSARLSKSRRLENLIAQLPGEKKNGLFGNLIALSLGLTPNFKSNFDLAEDAKLQLSKDTYDDDLDNLLAQIGDQYADLFLAAKNLSDAILLSDILRVNTEITKAPLSASMIKRYDEHHQDLTLLKALVRQQLPEKYKEIFFDQSKNGYAGYIDGGASQEEFYKFIKPILEKMDGTEELLVKLNREDLLRKQRTFDNGSIPHQIHLGELHAILRRQEDFYPFLKDNREKIEKILTFRIPYYVGPLARGNSRFAWMTRKSEETITPWNFEEVVDKGASAQSFIERMTNFDKNLPNEKVLPKHSLLYEYFTVYNELTKVKYVTEGMRKPAFLSGEQKKAIVDLLFKTNRKVTVKQLKEDYFKKIECFDSVEISGVEDRFNASLGTYHDLLKIIKDKDFLDNEENEDILEDIVLTLTLFEDREMIEERLKTYAHLFDDKVMKQLKRRRYTGWGRLSRKLINGIRDKQSGKTILDFLKSDGFANRNFMQLIHDDSLTFKEDIQKAQVSGQGDSLHEHIANLAGSPAIKKGILQTVKVVDELVKVMGRHKPENIVIEMARENQTTQKGQKNSRERMKRIEEGIKELGSQILKEHPVENTQLQNEKLYLYYLQNGRDMYVDQELDINRLSDYDVDHIVPQSFLKDDSIDNKVLTRSDKARGKSDNVPSEEVVKKMKNYWRQLLNAKLITQRKFDNLTKAERGGLSELDKAGFIKRQLVETRQITKHVAQILDSRMNTKYDENDKLIREVKVITLKSKLVSDFRKDFQFYKVREINNYHHAHDAYLNAVVGTALIKKYPKLESEFVYGDYKVYDVRKMIAKSEQEIGKATAKYFFYSNIMNFFKTEITLANGEIRKRPLIETNGETGEIVWDKGRDFATVRKVLSMPQVNIVKKTEVQTGGFSKESILPKRNSDKLIARKKDWDPKKYGGFDSPTVAYSVLVVAKVEKGKSKKLKSVKELLGITIMERSSFEKNPIDFLEAKGYKEVKKDLIIKLPKYSLFELENGRKRMLASAGELQKGNELALPSKYVNFLYLASHYEKLKGSPEDNEQKQLFVEQHKHYLDEIIEQISEFSKRVILADANLDKVLSAYNKHRDKPIREQAENIIHLFTLTNLGAPAAFKYFDTTIDRKRYTSTKEVLDATLIHQSITGLYETRIDLSQLGGDGGGGSGSSGGGGGIPWLMKKPLQLTTLVPLQEYEERLLKQTMLTGSYKEKLQSLFLKYDALWQHWENQVGHRRIKPHHIATGTVNPRPQKQYPINPKAKASIQTVINDLLKQGVLIQQNSIMNTPVYPVPKPDGKWRMVLDYREVNKTIPLIAAQNQHSAGILSSIFRGKYKTTLDLSNGFWAHSITPESYWLTAFTWLGQQYCWTRLPQGFLNSPALFNADVVDLLKEVPNVQVYVDDIYISHDDPREHLEQLEKVFSLLLNAGYVVSLKKSEIAQHEVEFLGFNITKEGRGLTETFKQKLLNITPPRDLKQLQSILGKLNFARNFIPNFSELVKPLYNIIATAPGKYITWTTDNSQQLQNIISMLNSAENLEERNPEVRLIMKVNTSPSAGYIRFYNEFAKRPIMYLNYVYTKAEVKFTNTEKLLTTIHKGLIKALDLGMGQEILVYSPIVSMTKIQKTPLPERKALPIRWITWMSYLEDPRIQFHYDKTLPELQQVPTVTDDIIAKIKHPSEFSMVFYTDGSAIKHPNVNKSHNAGMGIAQVQFKPEFTVINTWSIPLGDHTAQLAEVAAVEFACKKALKIDGPVLIVTDSFYVAESVNKELPYWQSNGFFNNKKKPLKHVSKWKSIADCIQLKPDIIIIHEKGHQPTASTFHTEGNNLADKLATQGSYVVNAGKRTADGSEFEKRTADGSEFESPKKKAKVE

SEQ ID NO: 566 - protein, 2091 aa, synthetic construct
MPAAKRVKLDGGDKKYSIGLDIGTNSVGWAVITDEYKVPSKKFKVLGNTDRHSIKKNLIGALLFDSGETAEATRLKRTARRRYTRRKNRICYLQEIFSNEMAKVDDSFFHRLEESFLVEEDKKHERHPIFGNIVDEVAYHEKYPTIYHLRKKLVDSTDKADLRLIYLALAHMIKFRGHFLIEGDLNPDNSDVDKLFIQLVQTYNQLFEENPINASGVDAKAILSARLSKSRRLENLIAQLPGEKKNGLFGNLIALSLGLTPNFKSNFDLAEDAKLQLSKDTYDDDLDNLLAQIGDQYADLFLAAKNLSDAILLSDILRVNTEITKAPLSASMIKRYDEHHQDLTLLKALVRQQLPEKYKEIFFDQSKNGYAGYIDGGASQEEFYKFIKPILEKMDGTEELLVKLNREDLLRKQRTFDNGSIPHQIHLGELHAILRRQEDFYPFLKDNREKIEKILTFRIPYYVGPLARGNSRFAWMTRKSEETITPWNFEEVVDKGASAQSFIERMTNFDKNLPNEKVLPKHSLLYEYFTVYNELTKVKYVTEGMRKPAFLSGEQKKAIVDLLFKTNRKVTVKQLKEDYFKKIECFDSVEISGVEDRFNASLGTYHDLLKIIKDKDFLDNEENEDILEDIVLTLTLFEDREMIEERLKTYAHLFDDKVMKQLKRRRYTGWGRLSRKLINGIRDKQSGKTILDFLKSDGFANRNFMQLIHDDSLTFKEDIQKAQVSGQGDSLHEHIANLAGSPAIKKGILQTVKVVDELVKVMGRHKPENIVIEMARENQTTQKGQKNSRERMKRIEEGIKELGSQILKEHPVENTQLQNEKLYLYYLQNGRDMYVDQELDINRLSDYDVDHIVPQSFLKDDSIDNKVLTRSDKARGKSDNVPSEEVVKKMKNYWRQLLNAKLITQRKFDNLTKAERGGLSELDKAGFIKRQLVETRQITKHVAQILDSRMNTKYDENDKLIREVKVITLKSKLVSDFRKDFQFYKVREINNYHHAHDAYLNAVVGTALIKKYPKLESEFVYGDYKVYDVRKMIAKSEQEIGKATAKYFFYSNIMNFFKTEITLANGEIRKRPLIETNGETGEIVWDKGRDFATVRKVLSMPQVNIVKKTEVQTGGFSKESILPKRNSDKLIARKKDWDPKKYGGFDSPTVAYSVLVVAKVEKGKSKKLKSVKELLGITIMERSSFEKNPIDFLEAKGYKEVKKDLIIKLPKYSLFELENGRKRMLASAGELQKGNELALPSKYVNFLYLASHYEKLKGSPEDNEQKQLFVEQHKHYLDEIIEQISEFSKRVILADANLDKVLSAYNKHRDKPIREQAENIIHLFTLTNLGAPAAFKYFDTTIDRKRYTSTKEVLDATLIHQSITGLYETRIDLSQLGGDGGGGSGGSGGSGGSGGSGGIPWLMKKPLQLTTLVPLQEYEERLLKQTMLTGSYKEKLQSLFLKYDALWQHWENQVGHRRIKPHHIATGTVNPRPQKQYPINPKAKASIQTVINDLLKQGVLIQQNSIMNTPVYPVPKPDGKWRMVLDYREVNKTIPLIAAQNQHSAGILSSIFRGKYKTTLDLSNGFWAHSITPESYWLTAFTWLGQQYCWTRLPQGFLNSPALFNADVVDLLKEVPNVQVYVDDIYISHDDPREHLEQLEKVFSLLLNAGYVVSLKKSEIAQHEVEFLGFNITKEGRGLTETFKQKLLNITPPRDLKQLQSILGKLNFARNFIPNFSELVKPLYNIIATAPGKYITWTTDNSQQLQNIISMLNSAENLEERNPEVRLIMKVNTSPSAGYIRFYNEFAKRPIMYLNYVYTKAEVKFTNTEKLLTTIHKGLIKALDLGMGQEILVYSPIVSMTKIQKTPLPERKALPIRWITWMSYLEDPRIQFHYDKTLPELQQVPTVTDDIIAKIKHPSEFSMVFYTDGSAIKHPNVNKSHNAGMGIAQVQFKPEFTVINTWSIPLGDHTAQLAEVAAVEFACKKALKIDGPVLIVTDSFYVAESVNKELPYWQSNGFFNNKKKPLKHVSKWKSIADCIQLKPDIIIIHEKGHQPTASTFHTEGNNLADKLATQGSYVVNAGKRTADGSEFEKRTADGSEFESPKKKAKVE

SEQ ID NO: 567 - protein, 2087 aa, synthetic construct
MPAAKRVKLDGGDKKYSIGLDIGTNSVGWAVITDEYKVPSKKFKVLGNTDRHSIKKNLIGALLFDSGETAEATRLKRTARRRYTRRKNRICYLQEIFSNEMAKVDDSFFHRLEESFLVEEDKKHERHPIFGNIVDEVAYHEKYPTIYHLRKKLVDSTDKADLRLIYLALAHMIKFRGHFLIEGDLNPDNSDVDKLFIQLVQTYNQLFEENPINASGVDAKAILSARLSKSRRLENLIAQLPGEKKNGLFGNLIALSLGLTPNFKSNFDLAEDAKLQLSKDTYDDDLDNLLAQIGDQYADLFLAAKNLSDAILLSDILRVNTEITKAPLSASMIKRYDEHHQDLTLLKALVRQQLPEKYKEIFFDQSKNGYAGYIDGGASQEEFYKFIKPILEKMDGTEELLVKLNREDLLRKQRTFDNGSIPHQIHLGELHAILRRQEDFYPFLKDNREKIEKILTFRIPYYVGPLARGNSRFAWMTRKSEETITPWNFEEVVDKGASAQSFIERMTNFDKNLPNEKVLPKHSLLYEYFTVYNELTKVKYVTEGMRKPAFLSGEQKKAIVDLLFKTNRKVTVKQLKEDYFKKIECFDSVEISGVEDRFNASLGTYHDLLKIIKDKDFLDNEENEDILEDIVLTLTLFEDREMIEERLKTYAHLFDDKVMKQLKRRRYTGWGRLSRKLINGIRDKQSGKTILDFLKSDGFANRNFMQLIHDDSLTFKEDIQKAQVSGQGDSLHEHIANLAGSPAIKKGILQTVKVVDELVKVMGRHKPENIVIEMARENQTTQKGQKNSRERMKRIEEGIKELGSQILKEHPVENTQLQNEKLYLYYLQNGRDMYVDQELDINRLSDYDVDHIVPQSFLKDDSIDNKVLTRSDKARGKSDNVPSEEVVKKMKNYWRQLLNAKLITQRKFDNLTKAERGGLSELDKAGFIKRQLVETRQITKHVAQILDSRMNTKYDENDKLIREVKVITLKSKLVSDFRKDFQFYKVREINNYHHAHDAYLNAVVGTALIKKYPKLESEFVYGDYKVYDVRKMIAKSEQEIGKATAKYFFYSNIMNFFKTEITLANGEIRKRPLIETNGETGEIVWDKGRDFATVRKVLSMPQVNIVKKTEVQTGGFSKESILPKRNSDKLIARKKDWDPKKYGGFDSPTVAYSVLVVAKVEKGKSKKLKSVKELLGITIMERSSFEKNPIDFLEAKGYKEVKKDLIIKLPKYSLFELENGRKRMLASAGELQKGNELALPSKYVNFLYLASHYEKLKGSPEDNEQKQLFVEQHKHYLDEIIEQISEFSKRVILADANLDKVLSAYNKHRDKPIREQAENIIHLFTLTNLGAPAAFKYFDTTIDRKRYTSTKEVLDATLIHQSITGLYETRIDLSQLGGDGGGSSEAAAKGGGGGIPWLMKKPLQLTTLVPLQEYEERLLKQTMLTGSYKEKLQSLFLKYDALWQHWENQVGHRRIKPHHIATGTVNPRPQKQYPINPKAKASIQTVINDLLKQGVLIQQNSIMNTPVYPVPKPDGKWRMVLDYREVNKTIPLIAAQNQHSAGILSSIFRGKYKTTLDLSNGFWAHSITPESYWLTAFTWLGQQYCWTRLPQGFLNSPALFNADVVDLLKEVPNVQVYVDDIYISHDDPREHLEQLEKVFSLLLNAGYVVSLKKSEIAQHEVEFLGFNITKEGRGLTETFKQKLLNITPPRDLKQLQSILGKLNFARNFIPNFSELVKPLYNIIATAPGKYITWTTDNSQQLQNIISMLNSAENLEERNPEVRLIMKVNTSPSAGYIRFYNEFAKRPIMYLNYVYTKAEVKFTNTEKLLTTIHKGLIKALDLGMGQEILVYSPIVSMTKIQKTPLPERKALPIRWITWMSYLEDPRIQFHYDKTLPELQQVPTVTDDIIAKIKHPSEFSMVFYTDGSAIKHPNVNKSHNAGMGIAQVQFKPEFTVINTWSIPLGDHTAQLAEVAAVEFACKKALKIDGPVLIVTDSFYVAESVNKELPYWQSNGFFNNKKKPLKHVSKWKSIADCIQLKPDIIIIHEKGHQPTASTFHTEGNNLADKLATQGSYVVNAGKRTADGSEFEKRTADGSEFESPKKKAKVE

SEQ ID NO: 568 - protein, 2085 aa, synthetic construct
MPAAKRVKLDGGDKKYSIGLDIGTNSVGWAVITDEYKVPSKKFKVLGNTDRHSIKKNLIGALLFDSGETAEATRLKRTARRRYTRRKNRICYLQEIFSNEMAKVDDSFFHRLEESFLVEEDKKHERHPIFGNIVDEVAYHEKYPTIYHLRKKLVDSTDKADLRLIYLALAHMIKFRGHFLIEGDLNPDNSDVDKLFIQLVQTYNQLFEENPINASGVDAKAILSARLSKSRRLENLIAQLPGEKKNGLFGNLIALSLGLTPNFKSNFDLAEDAKLQLSKDTYDDDLDNLLAQIGDQYADLFLAAKNLSDAILLSDILRVNTEITKAPLSASMIKRYDEHHQDLTLLKALVRQQLPEKYKEIFFDQSKNGYAGYIDGGASQEEFYKFIKPILEKMDGTEELLVKLNREDLLRKQRTFDNGSIPHQIHLGELHAILRRQEDFYPFLKDNREKIEKILTFRIPYYVGPLARGNSRFAWMTRKSEETITPWNFEEVVDKGASAQSFIERMTNFDKNLPNEKVLPKHSLLYEYFTVYNELTKVKYVTEGMRKPAFLSGEQKKAIVDLLFKTNRKVTVKQLKEDYFKKIECFDSVEISGVEDRFNASLGTYHDLLKIIKDKDFLDNEENEDILEDIVLTLTLFEDREMIEERLKTYAHLFDDKVMKQLKRRRYTGWGRLSRKLINGIRDKQSGKTILDFLKSDGFANRNFMQLIHDDSLTFKEDIQKAQVSGQGDSLHEHIANLAGSPAIKKGILQTVKVVDELVKVMGRHKPENIVIEMARENQTTQKGQKNSRERMKRIEEGIKELGSQILKEHPVENTQLQNEKLYLYYLQNGRDMYVDQELDINRLSDYDVDHIVPQSFLKDDSIDNKVLTRSDKARGKSDNVPSEEVVKKMKNYWRQLLNAKLITQRKFDNLTKAERGGLSELDKAGFIKRQLVETRQITKHVAQILDSRMNTKYDENDKLIREVKVITLKSKLVSDFRKDFQFYKVREINNYHHAHDAYLNAVVGTALIKKYPKLESEFVYGDYKVYDVRKMIAKSEQEIGKATAKYFFYSNIMNFFKTEITLANGEIRKRPLIETNGETGEIVWDKGRDFATVRKVLSMPQVNIVKKTEVQTGGFSKESILPKRNSDKLIARKKDWDPKKYGGFDSPTVAYSVLVVAKVEKGKSKKLKSVKELLGITIMERSSFEKNPIDFLEAKGYKEVKKDLIIKLPKYSLFELENGRKRMLASAGELQKGNELALPSKYVNFLYLASHYEKLKGSPEDNEQKQLFVEQHKHYLDEIIEQISEFSKRVILADANLDKVLSAYNKHRDKPIREQAENIIHLFTLTNLGAPAAFKYFDTTIDRKRYTSTKEVLDATLIHQSITGLYETRIDLSQLGGDGGGGGPAPGSSGGIPWLMKKPLQLTTLVPLQEYEERLLKQTMLTGSYKEKLQSLFLKYDALWQHWENQVGHRRIKPHHIATGTVNPRPQKQYPINPKAKASIQTVINDLLKQGVLIQQNSIMNTPVYPVPKPDGKWRMVLDYREVNKTIPLIAAQNQHSAGILSSIFRGKYKTTLDLSNGFWAHSITPESYWLTAFTWLGQQYCWTRLPQGFLNSPALFNADVVDLLKEVPNVQVYVDDIYISHDDPREHLEQLEKVFSLLLNAGYVVSLKKSEIAQHEVEFLGFNITKEGRGLTETFKQKLLNITPPRDLKQLQSILGKLNFARNFIPNFSELVKPLYNIIATAPGKYITWTTDNSQQLQNIISMLNSAENLEERNPEVRLIMKVNTSPSAGYIRFYNEFAKRPIMYLNYVYTKAEVKFTNTEKLLTTIHKGLIKALDLGMGQEILVYSPIVSMTKIQKTPLPERKALPIRWITWMSYLEDPRIQFHYDKTLPELQQVPTVTDDIIAKIKHPSEFSMVFYTDGSAIKHPNVNKSHNAGMGIAQVQFKPEFTVINTWSIPLGDHTAQLAEVAAVEFACKKALKIDGPVLIVTDSFYVAESVNKELPYWQSNGFFNNKKKPLKHVSKWKSIADCIQLKPDIIIIHEKGHQPTASTFHTEGNNLADKLATQGSYVVNAGKRTADGSEFEKRTADGSEFESPKKKAKVE

SEQ ID NO: 569 - protein, 2087 aa, synthetic construct
MPAAKRVKLDGGDKKYSIGLDIGTNSVGWAVITDEYKVPSKKFKVLGNTDRHSIKKNLIGALLFDSGETAEATRLKRTARRRYTRRKNRICYLQEIFSNEMAKVDDSFFHRLEESFLVEEDKKHERHPIFGNIVDEVAYHEKYPTIYHLRKKLVDSTDKADLRLIYLALAHMIKFRGHFLIEGDLNPDNSDVDKLFIQLVQTYNQLFEENPINASGVDAKAILSARLSKSRRLENLIAQLPGEKKNGLFGNLIALSLGLTPNFKSNFDLAEDAKLQLSKDTYDDDLDNLLAQIGDQYADLFLAAKNLSDAILLSDILRVNTEITKAPLSASMIKRYDEHHQDLTLLKALVRQQLPEKYKEIFFDQSKNGYAGYIDGGASQEEFYKFIKPILEKMDGTEELLVKLNREDLLRKQRTFDNGSIPHQIHLGELHAILRRQEDFYPFLKDNREKIEKILTFRIPYYVGPLARGNSRFAWMTRKSEETITPWNFEEVVDKGASAQSFIERMTNFDKNLPNEKVLPKHSLLYEYFTVYNELTKVKYVTEGMRKPAFLSGEQKKAIVDLLFKTNRKVTVKQLKEDYFKKIECFDSVEISGVEDRFNASLGTYHDLLKIIKDKDFLDNEENEDILEDIVLTLTLFEDREMIEERLKTYAHLFDDKVMKQLKRRRYTGWGRLSRKLINGIRDKQSGKTILDFLKSDGFANRNFMQLIHDDSLTFKEDIQKAQVSGQGDSLHEHIANLAGSPAIKKGILQTVKVVDELVKVMGRHKPENIVIEMARENQTTQKGQKNSRERMKRIEEGIKELGSQILKEHPVENTQLQNEKLYLYYLQNGRDMYVDQELDINRLSDYDVDHIVPQSFLKDDSIDNKVLTRSDKARGKSDNVPSEEVVKKMKNYWRQLLNAKLITQRKFDNLTKAERGGLSELDKAGFIKRQLVETRQITKHVAQILDSRMNTKYDENDKLIREVKVITLKSKLVSDFRKDFQFYKVREINNYHHAHDAYLNAVVGTALIKKYPKLESEFVYGDYKVYDVRKMIAKSEQEIGKATAKYFFYSNIMNFFKTEITLANGEIRKRPLIETNGETGEIVWDKGRDFATVRKVLSMPQVNIVKKTEVQTGGFSKESILPKRNSDKLIARKKDWDPKKYGGFDSPTVAYSVLVVAKVEKGKSKKLKSVKELLGITIMERSSFEKNPIDFLEAKGYKEVKKDLIIKLPKYSLFELENGRKRMLASAGELQKGNELALPSKYVNFLYLASHYEKLKGSPEDNEQKQLFVEQHKHYLDEIIEQISEFSKRVILADANLDKVLSAYNKHRDKPIREQAENIIHLFTLTNLGAPAAFKYFDTTIDRKRYTSTKEVLDATLIHQSITGLYETRIDLSQLGGDGGPAPAPAPAPAPGGIPWLMKKPLQLTTLVPLQEYEERLLKQTMLTGSYKEKLQSLFLKYDALWQHWENQVGHRRIKPHHIATGTVNPRPQKQYPINPKAKASIQTVINDLLKQGVLIQQNSIMNTPVYPVPKPDGKWRMVLDYREVNKTIPLIAAQNQHSAGILSSIFRGKYKTTLDLSNGFWAHSITPESYWLTAFTWLGQQYCWTRLPQGFLNSPALFNADVVDLLKEVPNVQVYVDDIYISHDDPREHLEQLEKVFSLLLNAGYVVSLKKSEIAQHEVEFLGFNITKEGRGLTETFKQKLLNITPPRDLKQLQSILGKLNFARNFIPNFSELVKPLYNIIATAPGKYITWTTDNSQQLQNIISMLNSAENLEERNPEVRLIMKVNTSPSAGYIRFYNEFAKRPIMYLNYVYTKAEVKFTNTEKLLTTIHKGLIKALDLGMGQEILVYSPIVSMTKIQKTPLPERKALPIRWITWMSYLEDPRIQFHYDKTLPELQQVPTVTDDIIAKIKHPSEFSMVFYTDGSAIKHPNVNKSHNAGMGIAQVQFKPEFTVINTWSIPLGDHTAQLAEVAAVEFACKKALKIDGPVLIVTDSFYVAESVNKELPYWQSNGFFNNKKKPLKHVSKWKSIADCIQLKPDIIIIHEKGHQPTASTFHTEGNNLADKLATQGSYVVNAGKRTADGSEFEKRTADGSEFESPKKKAKVE

SEQ ID NO: 570 - protein, 2101 aa, synthetic construct
MPAAKRVKLDGGDKKYSIGLDIGTNSVGWAVITDEYKVPSKKFKVLGNTDRHSIKKNLIGALLFDSGETAEATRLKRTARRRYTRRKNRICYLQEIFSNEMAKVDDSFFHRLEESFLVEEDKKHERHPIFGNIVDEVAYHEKYPTIYHLRKKLVDSTDKADLRLIYLALAHMIKFRGHFLIEGDLNPDNSDVDKLFIQLVQTYNQLFEENPINASGVDAKAILSARLSKSRRLENLIAQLPGEKKNGLFGNLIALSLGLTPNFKSNFDLAEDAKLQLSKDTYDDDLDNLLAQIGDQYADLFLAAKNLSDAILLSDILRVNTEITKAPLSASMIKRYDEHHQDLTLLKALVRQQLPEKYKEIFFDQSKNGYAGYIDGGASQEEFYKFIKPILEKMDGTEELLVKLNREDLLRKQRTFDNGSIPHQIHLGELHAILRRQEDFYPFLKDNREKIEKILTFRIPYYVGPLARGNSRFAWMTRKSEETITPWNFEEVVDKGASAQSFIERMTNFDKNLPNEKVLPKHSLLYEYFTVYNELTKVKYVTEGMRKPAFLSGEQKKAIVDLLFKTNRKVTVKQLKEDYFKKIECFDSVEISGVEDRFNASLGTYHDLLKIIKDKDFLDNEENEDILEDIVLTLTLFEDREMIEERLKTYAHLFDDKVMKQLKRRRYTGWGRLSRKLINGIRDKQSGKTILDFLKSDGFANRNFMQLIHDDSLTFKEDIQKAQVSGQGDSLHEHIANLAGSPAIKKGILQTVKVVDELVKVMGRHKPENIVIEMARENQTTQKGQKNSRERMKRIEEGIKELGSQILKEHPVENTQLQNEKLYLYYLQNGRDMYVDQELDINRLSDYDVDHIVPQSFLKDDSIDNKVLTRSDKARGKSDNVPSEEVVKKMKNYWRQLLNAKLITQRKFDNLTKAERGGLSELDKAGFIKRQLVETRQITKHVAQILDSRMNTKYDENDKLIREVKVITLKSKLVSDFRKDFQFYKVREINNYHHAHDAYLNAVVGTALIKKYPKLESEFVYGDYKVYDVRKMIAKSEQEIGKATAKYFFYSNIMNFFKTEITLANGEIRKRPLIETNGETGEIVWDKGRDFATVRKVLSMPQVNIVKKTEVQTGGFSKESILPKRNSDKLIARKKDWDPKKYGGFDSPTVAYSVLVVAKVEKGKSKKLKSVKELLGITIMERSSFEKNPIDFLEAKGYKEVKKDLIIKLPKYSLFELENGRKRMLASAGELQKGNELALPSKYVNFLYLASHYEKLKGSPEDNEQKQLFVEQHKHYLDEIIEQISEFSKRVILADANLDKVLSAYNKHRDKPIREQAENIIHLFTLTNLGAPAAFKYFDTTIDRKRYTSTKEVLDATLIHQSITGLYETRIDLSQLGGDGGEAAAKEAAAKEAAAKEAAAKEAAAKGGIPWLMKKPLQLTTLVPLQEYEERLLKQTMLTGSYKEKLQSLFLKYDALWQHWENQVGHRRIKPHHIATGTVNPRPQKQYPINPKAKASIQTVINDLLKQGVLIQQNSIMNTPVYPVPKPDGKWRMVLDYREVNKTIPLIAAQNQHSAGILSSIFRGKYKTTLDLSNGFWAHSITPESYWLTAFTWLGQQYCWTRLPQGFLNSPALFNADVVDLLKEVPNVQVYVDDIYISHDDPREHLEQLEKVFSLLLNAGYVVSLKKSEIAQHEVEFLGFNITKEGRGLTETFKQKLLNITPPRDLKQLQSILGKLNFARNFIPNFSELVKPLYNIIATAPGKYITWTTDNSQQLQNIISMLNSAENLEERNPEVRLIMKVNTSPSAGYIRFYNEFAKRPIMYLNYVYTKAEVKFTNTEKLLTTIHKGLIKALDLGMGQEILVYSPIVSMTKIQKTPLPERKALPIRWITWMSYLEDPRIQFHYDKTLPELQQVPTVTDDIIAKIKHPSEFSMVFYTDGSAIKHPNVNKSHNAGMGIAQVQFKPEFTVINTWSIPLGDHTAQLAEVAAVEFACKKALKIDGPVLIVTDSFYVAESVNKELPYWQSNGFFNNKKKPLKHVSKWKSIADCIQLKPDIIIIHEKGHQPTASTFHTEGNNLADKLATQGSYVVNAGKRTADGSEFEKRTADGSEFESPKKKAKVE

SEQ ID NO: 571 - protein, 2087 aa, synthetic construct
MPAAKRVKLDGGDKKYSIGLDIGTNSVGWAVITDEYKVPSKKFKVLGNTDRHSIKKNLIGALLFDSGETAEATRLKRTARRRYTRRKNRICYLQEIFSNEMAKVDDSFFHRLEESFLVEEDKKHERHPIFGNIVDEVAYHEKYPTIYHLRKKLVDSTDKADLRLIYLALAHMIKFRGHFLIEGDLNPDNSDVDKLFIQLVQTYNQLFEENPINASGVDAKAILSARLSKSRRLENLIAQLPGEKKNGLFGNLIALSLGLTPNFKSNFDLAEDAKLQLSKDTYDDDLDNLLAQIGDQYADLFLAAKNLSDAILLSDILRVNTEITKAPLSASMIKRYDEHHQDLTLLKALVRQQLPEKYKEIFFDQSKNGYAGYIDGGASQEEFYKFIKPILEKMDGTEELLVKLNREDLLRKQRTFDNGSIPHQIHLGELHAILRRQEDFYPFLKDNREKIEKILTFRIPYYVGPLARGNSRFAWMTRKSEETITPWNFEEVVDKGASAQSFIERMTNFDKNLPNEKVLPKHSLLYEYFTVYNELTKVKYVTEGMRKPAFLSGEQKKAIVDLLFKTNRKVTVKQLKEDYFKKIECFDSVEISGVEDRFNASLGTYHDLLKIIKDKDFLDNEENEDILEDIVLTLTLFEDREMIEERLKTYAHLFDDKVMKQLKRRRYTGWGRLSRKLINGIRDKQSGKTILDFLKSDGFANRNFMQLIHDDSLTFKEDIQKAQVSGQGDSLHEHIANLAGSPAIKKGILQTVKVVDELVKVMGRHKPENIVIEMARENQTTQKGQKNSRERMKRIEEGIKELGSQILKEHPVENTQLQNEKLYLYYLQNGRDMYVDQELDINRLSDYDVDHIVPQSFLKDDSIDNKVLTRSDKARGKSDNVPSEEVVKKMKNYWRQLLNAKLITQRKFDNLTKAERGGLSELDKAGFIKRQLVETRQITKHVAQILDSRMNTKYDENDKLIREVKVITLKSKLVSDFRKDFQFYKVREINNYHHAHDAYLNAVVGTALIKKYPKLESEFVYGDYKVYDVRKMIAKSEQEIGKATAKYFFYSNIMNFFKTEITLANGEIRKRPLIETNGETGEIVWDKGRDFATVRKVLSMPQVNIVKKTEVQTGGFSKESILPKRNSDKLIARKKDWDPKKYGGFDSPTVAYSVLVVAKVEKGKSKKLKSVKELLGITIMERSSFEKNPIDFLEAKGYKEVKKDLIIKLPKYSLFELENGRKRMLASAGELQKGNELALPSKYVNFLYLASHYEKLKGSPEDNEQKQLFVEQHKHYLDEIIEQISEFSKRVILADANLDKVLSAYNKHRDKPIREQAENIIHLFTLTNLGAPAAFKYFDTTIDRKRYTSTKEVLDATLIHQSITGLYETRIDLSQLGGDGGGGSGSSEAAAKGGIPWLMKKPLQLTTLVPLQEYEERLLKQTMLTGSYKEKLQSLFLKYDALWQHWENQVGHRRIKPHHIATGTVNPRPQKQYPINPKAKASIQTVINDLLKQGVLIQQNSIMNTPVYPVPKPDGKWRMVLDYREVNKTIPLIAAQNQHSAGILSSIFRGKYKTTLDLSNGFWAHSITPESYWLTAFTWLGQQYCWTRLPQGFLNSPALFNADVVDLLKEVPNVQVYVDDIYISHDDPREHLEQLEKVFSLLLNAGYVVSLKKSEIAQHEVEFLGFNITKEGRGLTETFKQKLLNITPPRDLKQLQSILGKLNFARNFIPNFSELVKPLYNIIATAPGKYITWTTDNSQQLQNIISMLNSAENLEERNPEVRLIMKVNTSPSAGYIRFYNEFAKRPIMYLNYVYTKAEVKFTNTEKLLTTIHKGLIKALDLGMGQEILVYSPIVSMTKIQKTPLPERKALPIRWITWMSYLEDPRIQFHYDKTLPELQQVPTVTDDIIAKIKHPSEFSMVFYTDGSAIKHPNVNKSHNAGMGIAQVQFKPEFTVINTWSIPLGDHTAQLAEVAAVEFACKKALKIDGPVLIVTDSFYVAESVNKELPYWQSNGFFNNKKKPLKHVSKWKSIADCIQLKPDIIIIHEKGHQPTASTFHTEGNNLADKLATQGSYVVNAGKRTADGSEFEKRTADGSEFESPKKKAKVE

SEQ ID NO: 572 - protein, 2087 aa, synthetic construct
MPAAKRVKLDGGDKKYSIGLDIGTNSVGWAVITDEYKVPSKKFKVLGNTDRHSIKKNLIGALLFDSGETAEATRLKRTARRRYTRRKNRICYLQEIFSNEMAKVDDSFFHRLEESFLVEEDKKHERHPIFGNIVDEVAYHEKYPTIYHLRKKLVDSTDKADLRLIYLALAHMIKFRGHFLIEGDLNPDNSDVDKLFIQLVQTYNQLFEENPINASGVDAKAILSARLSKSRRLENLIAQLPGEKKNGLFGNLIALSLGLTPNFKSNFDLAEDAKLQLSKDTYDDDLDNLLAQIGDQYADLFLAAKNLSDAILLSDILRVNTEITKAPLSASMIKRYDEHHQDLTLLKALVRQQLPEKYKEIFFDQSKNGYAGYIDGGASQEEFYKFIKPILEKMDGTEELLVKLNREDLLRKQRTFDNGSIPHQIHLGELHAILRRQEDFYPFLKDNREKIEKILTFRIPYYVGPLARGNSRFAWMTRKSEETITPWNFEEVVDKGASAQSFIERMTNFDKNLPNEKVLPKHSLLYEYFTVYNELTKVKYVTEGMRKPAFLSGEQKKAIVDLLFKTNRKVTVKQLKEDYFKKIECFDSVEISGVEDRFNASLGTYHDLLKIIKDKDFLDNEENEDILEDIVLTLTLFEDREMIEERLKTYAHLFDDKVMKQLKRRRYTGWGRLSRKLINGIRDKQSGKTILDFLKSDGFANRNFMQLIHDDSLTFKEDIQKAQVSGQGDSLHEHIANLAGSPAIKKGILQTVKVVDELVKVMGRHKPENIVIEMARENQTTQKGQKNSRERMKRIEEGIKELGSQILKEHPVENTQLQNEKLYLYYLQNGRDMYVDQELDINRLSDYDVDHIVPQSFLKDDSIDNKVLTRSDKARGKSDNVPSEEVVKKMKNYWRQLLNAKLITQRKFDNLTKAERGGLSELDKAGFIKRQLVETRQITKHVAQILDSRMNTKYDENDKLIREVKVITLKSKLVSDFRKDFQFYKVREINNYHHAHDAYLNAVVGTALIKKYPKLESEFVYGDYKVYDVRKMIAKSEQEIGKATAKYFFYSNIMNFFKTEITLANGEIRKRPLIETNGETGEIVWDKGRDFATVRKVLSMPQVNIVKKTEVQTGGFSKESILPKRNSDKLIARKKDWDPKKYGGFDSPTVAYSVLVVAKVEKGKSKKLKSVKELLGITIMERSSFEKNPIDFLEAKGYKEVKKDLIIKLPKYSLFELENGRKRMLASAGELQKGNELALPSKYVNFLYLASHYEKLKGSPEDNEQKQLFVEQHKHYLDEIIEQISEFSKRVILADANLDKVLSAYNKHRDKPIREQAENIIHLFTLTNLGAPAAFKYFDTTIDRKRYTSTKEVLDATLIHQSITGLYETRIDLSQLGGDGGEAAAKGGSPAPGGIPWLMKKPLQLTTLVPLQEYEERLLKQTMLTGSYKEKLQSLFLKYDALWQHWENQVGHRRIKPHHIATGTVNPRPQKQYPINPKAKASIQTVINDLLKQGVLIQQNSIMNTPVYPVPKPDGKWRMVLDYREVNKTIPLIAAQNQHSAGILSSIFRGKYKTTLDLSNGFWAHSITPESYWLTAFTWLGQQYCWTRLPQGFLNSPALFNADVVDLLKEVPNVQVYVDDIYISHDDPREHLEQLEKVFSLLLNAGYVVSLKKSEIAQHEVEFLGFNITKEGRGLTETFKQKLLNITPPRDLKQLQSILGKLNFARNFIPNFSELVKPLYNIIATAPGKYITWTTDNSQQLQNIISMLNSAENLEERNPEVRLIMKVNTSPSAGYIRFYNEFAKRPIMYLNYVYTKAEVKFTNTEKLLTTIHKGLIKALDLGMGQEILVYSPIVSMTKIQKTPLPERKALPIRWITWMSYLEDPRIQFHYDKTLPELQQVPTVTDDIIAKIKHPSEFSMVFYTDGSAIKHPNVNKSHNAGMGIAQVQFKPEFTVINTWSIPLGDHTAQLAEVAAVEFACKKALKIDGPVLIVTDSFYVAESVNKELPYWQSNGFFNNKKKPLKHVSKWKSIADCIQLKPDIIIIHEKGHQPTASTFHTEGNNLADKLATQGSYVVNAGKRTADGSEFEKRTADGSEFESPKKKAKVE

SEQ ID NO: 573 - protein, 2085 aa, synthetic construct
MPAAKRVKLDGGDKKYSIGLDIGTNSVGWAVITDEYKVPSKKFKVLGNTDRHSIKKNLIGALLFDSGETAEATRLKRTARRRYTRRKNRICYLQEIFSNEMAKVDDSFFHRLEESFLVEEDKKHERHPIFGNIVDEVAYHEKYPTIYHLRKKLVDSTDKADLRLIYLALAHMIKFRGHFLIEGDLNPDNSDVDKLFIQLVQTYNQLFEENPINASGVDAKAILSARLSKSRRLENLIAQLPGEKKNGLFGNLIALSLGLTPNFKSNFDLAEDAKLQLSKDTYDDDLDNLLAQIGDQYADLFLAAKNLSDAILLSDILRVNTEITKAPLSASMIKRYDEHHQDLTLLKALVRQQLPEKYKEIFFDQSKNGYAGYIDGGASQEEFYKFIKPILEKMDGTEELLVKLNREDLLRKQRTFDNGSIPHQIHLGELHAILRRQEDFYPFLKDNREKIEKILTFRIPYYVGPLARGNSRFAWMTRKSEETITPWNFEEVVDKGASAQSFIERMTNFDKNLPNEKVLPKHSLLYEYFTVYNELTKVKYVTEGMRKPAFLSGEQKKAIVDLLFKTNRKVTVKQLKEDYFKKIECFDSVEISGVEDRFNASLGTYHDLLKIIKDKDFLDNEENEDILEDIVLTLTLFEDREMIEERLKTYAHLFDDKVMKQLKRRRYTGWGRLSRKLINGIRDKQSGKTILDFLKSDGFANRNFMQLIHDDSLTFKEDIQKAQVSGQGDSLHEHIANLAGSPAIKKGILQTVKVVDELVKVMGRHKPENIVIEMARENQTTQKGQKNSRERMKRIEEGIKELGSQILKEHPVENTQLQNEKLYLYYLQNGRDMYVDQELDINRLSDYDVDHIVPQSFLKDDSIDNKVLTRSDKARGKSDNVPSEEVVKKMKNYWRQLLNAKLITQRKFDNLTKAERGGLSELDKAGFIKRQLVETRQITKHVAQILDSRMNTKYDENDKLIREVKVITLKSKLVSDFRKDFQFYKVREINNYHHAHDAYLNAVVGTALIKKYPKLESEFVYGDYKVYDVRKMIAKSEQEIGKATAKYFFYSNIMNFFKTEITLANGEIRKRPLIETNGETGEIVWDKGRDFATVRKVLSMPQVNIVKKTEVQTGGFSKESILPKRNSDKLIARKKDWDPKKYGGFDSPTVAYSVLVVAKVEKGKSKKLKSVKELLGITIMERSSFEKNPIDFLEAKGYKEVKKDLIIKLPKYSLFELENGRKRMLASAGELQKGNELALPSKYVNFLYLASHYEKLKGSPEDNEQKQLFVEQHKHYLDEIIEQISEFSKRVILADANLDKVLSAYNKHRDKPIREQAENIIHLFTLTNLGAPAAFKYFDTTIDRKRYTSTKEVLDATLIHQSITGLYETRIDLSQLGGDGGGGSPAPGGGGGIPWLMKKPLQLTTLVPLQEYEERLLKQTMLTGSYKEKLQSLFLKYDALWQHWENQVGHRRIKPHHIATGTVNPRPQKQYPINPKAKASIQTVINDLLKQGVLIQQNSIMNTPVYPVPKPDGKWRMVLDYREVNKTIPLIAAQNQHSAGILSSIFRGKYKTTLDLSNGFWAHSITPESYWLTAFTWLGQQYCWTRLPQGFLNSPALFNADVVDLLKEVPNVQVYVDDIYISHDDPREHLEQLEKVFSLLLNAGYVVSLKKSEIAQHEVEFLGFNITKEGRGLTETFKQKLLNITPPRDLKQLQSILGKLNFARNFIPNFSELVKPLYNIIATAPGKYITWTTDNSQQLQNIISMLNSAENLEERNPEVRLIMKVNTSPSAGYIRFYNEFAKRPIMYLNYVYTKAEVKFTNTEKLLTTIHKGLIKALDLGMGQEILVYSPIVSMTKIQKTPLPERKALPIRWITWMSYLEDPRIQFHYDKTLPELQQVPTVTDDIIAKIKHPSEFSMVFYTDGSAIKHPNVNKSHNAGMGIAQVQFKPEFTVINTWSIPLGDHTAQLAEVAAVEFACKKALKIDGPVLIVTDSFYVAESVNKELPYWQSNGFFNNKKKPLKHVSKWKSIADCIQLKPDIIIIHEKGHQPTASTFHTEGNNLADKLATQGSYVVNAGKRTADGSEFEKRTADGSEFESPKKKAKVE

SEQ ID NO: 574 - protein, 2091 aa, synthetic construct
MPAAKRVKLDGGDKKYSIGLDIGTNSVGWAVITDEYKVPSKKFKVLGNTDRHSIKKNLIGALLFDSGETAEATRLKRTARRRYTRRKNRICYLQEIFSNEMAKVDDSFFHRLEESFLVEEDKKHERHPIFGNIVDEVAYHEKYPTIYHLRKKLVDSTDKADLRLIYLALAHMIKFRGHFLIEGDLNPDNSDVDKLFIQLVQTYNQLFEENPINASGVDAKAILSARLSKSRRLENLIAQLPGEKKNGLFGNLIALSLGLTPNFKSNFDLAEDAKLQLSKDTYDDDLDNLLAQIGDQYADLFLAAKNLSDAILLSDILRVNTEITKAPLSASMIKRYDEHHQDLTLLKALVRQQLPEKYKEIFFDQSKNGYAGYIDGGASQEEFYKFIKPILEKMDGTEELLVKLNREDLLRKQRTFDNGSIPHQIHLGELHAILRRQEDFYPFLKDNREKIEKILTFRIPYYVGPLARGNSRFAWMTRKSEETITPWNFEEVVDKGASAQSFIERMTNFDKNLPNEKVLPKHSLLYEYFTVYNELTKVKYVTEGMRKPAFLSGEQKKAIVDLLFKTNRKVTVKQLKEDYFKKIECFDSVEISGVEDRFNASLGTYHDLLKIIKDKDFLDNEENEDILEDIVLTLTLFEDREMIEERLKTYAHLFDDKVMKQLKRRRYTGWGRLSRKLINGIRDKQSGKTILDFLKSDGFANRNFMQLIHDDSLTFKEDIQKAQVSGQGDSLHEHIANLAGSPAIKKGILQTVKVVDELVKVMGRHKPENIVIEMARENQTTQKGQKNSRERMKRIEEGIKELGSQILKEHPVENTQLQNEKLYLYYLQNGRDMYVDQELDINRLSDYDVDHIVPQSFLKDDSIDNKVLTRSDKARGKSDNVPSEEVVKKMKNYWRQLLNAKLITQRKFDNLTKAERGGLSELDKAGFIKRQLVETRQITKHVAQILDSRMNTKYDENDKLIREVKVITLKSKLVSDFRKDFQFYKVREINNYHHAHDAYLNAVVGTALIKKYPKLESEFVYGDYKVYDVRKMIAKSEQEIGKATAKYFFYSNIMNFFKTEITLANGEIRKRPLIETNGETGEIVWDKGRDFATVRKVLSMPQVNIVKKTEVQTGGFSKESILPKRNSDKLIARKKDWDPKKYGGFDSPTVAYSVLVVAKVEKGKSKKLKSVKELLGITIMERSSFEKNPIDFLEAKGYKEVKKDLIIKLPKYSLFELENGRKRMLASAGELQKGNELALPSKYVNFLYLASHYEKLKGSPEDNEQKQLFVEQHKHYLDEIIEQISEFSKRVILADANLDKVLSAYNKHRDKPIREQAENIIHLFTLTNLGAPAAFKYFDTTIDRKRYTSTKEVLDATLIHQSITGLYETRIDLSQLGGDGGEAAAKGGGGSEAAAKGGIPWLMKKPLQLTTLVPLQEYEERLLKQTMLTGSYKEKLQSLFLKYDALWQHWENQVGHRRIKPHHIATGTVNPRPQKQYPINPKAKASIQTVINDLLKQGVLIQQNSIMNTPVYPVPKPDGKWRMVLDYREVNKTIPLIAAQNQHSAGILSSIFRGKYKTTLDLSNGFWAHSITPESYWLTAFTWLGQQYCWTRLPQGFLNSPALFNADVVDLLKEVPNVQVYVDDIYISHDDPREHLEQLEKVFSLLLNAGYVVSLKKSEIAQHEVEFLGFNITKEGRGLTETFKQKLLNITPPRDLKQLQSILGKLNFARNFIPNFSELVKPLYNIIATAPGKYITWTTDNSQQLQNIISMLNSAENLEERNPEVRLIMKVNTSPSAGYIRFYNEFAKRPIMYLNYVYTKAEVKFTNTEKLLTTIHKGLIKALDLGMGQEILVYSPIVSMTKIQKTPLPERKALPIRWITWMSYLEDPRIQFHYDKTLPELQQVPTVTDDIIAKIKHPSEFSMVFYTDGSAIKHPNVNKSHNAGMGIAQVQFKPEFTVINTWSIPLGDHTAQLAEVAAVEFACKKALKIDGPVLIVTDSFYVAESVNKELPYWQSNGFFNNKKKPLKHVSKWKSIADCIQLKPDIIIIHEKGHQPTASTFHTEGNNLADKLATQGSYVVNAGKRTADGSEFEKRTADGSEFESPKKKAKVE

SEQ ID NO: 575 - protein, 2082 aa, synthetic construct
MPAAKRVKLDGGDKKYSIGLDIGTNSVGWAVITDEYKVPSKKFKVLGNTDRHSIKKNLIGALLFDSGETAEATRLKRTARRRYTRRKNRICYLQEIFSNEMAKVDDSFFHRLEESFLVEEDKKHERHPIFGNIVDEVAYHEKYPTIYHLRKKLVDSTDKADLRLIYLALAHMIKFRGHFLIEGDLNPDNSDVDKLFIQLVQTYNQLFEENPINASGVDAKAILSARLSKSRRLENLIAQLPGEKKNGLFGNLIALSLGLTPNFKSNFDLAEDAKLQLSKDTYDDDLDNLLAQIGDQYADLFLAAKNLSDAILLSDILRVNTEITKAPLSASMIKRYDEHHQDLTLLKALVRQQLPEKYKEIFFDQSKNGYAGYIDGGASQEEFYKFIKPILEKMDGTEELLVKLNREDLLRKQRTFDNGSIPHQIHLGELHAILRRQEDFYPFLKDNREKIEKILTFRIPYYVGPLARGNSRFAWMTRKSEETITPWNFEEVVDKGASAQSFIERMTNFDKNLPNEKVLPKHSLLYEYFTVYNELTKVKYVTEGMRKPAFLSGEQKKAIVDLLFKTNRKVTVKQLKEDYFKKIECFDSVEISGVEDRFNASLGTYHDLLKIIKDKDFLDNEENEDILEDIVLTLTLFEDREMIEERLKTYAHLFDDKVMKQLKRRRYTGWGRLSRKLINGIRDKQSGKTILDFLKSDGFANRNFMQLIHDDSLTFKEDIQKAQVSGQGDSLHEHIANLAGSPAIKKGILQTVKVVDELVKVMGRHKPENIVIEMARENQTTQKGQKNSRERMKRIEEGIKELGSQILKEHPVENTQLQNEKLYLYYLQNGRDMYVDQELDINRLSDYDVDHIVPQSFLKDDSIDNKVLTRSDKARGKSDNVPSEEVVKKMKNYWRQLLNAKLITQRKFDNLTKAERGGLSELDKAGFIKRQLVETRQITKHVAQILDSRMNTKYDENDKLIREVKVITLKSKLVSDFRKDFQFYKVREINNYHHAHDAYLNAVVGTALIKKYPKLESEFVYGDYKVYDVRKMIAKSEQEIGKATAKYFFYSNIMNFFKTEITLANGEIRKRPLIETNGETGEIVWDKGRDFATVRKVLSMPQVNIVKKTEVQTGGFSKESILPKRNSDKLIARKKDWDPKKYGGFDSPTVAYSVLVVAKVEKGKSKKLKSVKELLGITIMERSSFEKNPIDFLEAKGYKEVKKDLIIKLPKYSLFELENGRKRMLASAGELQKGNELALPSKYVNFLYLASHYEKLKGSPEDNEQKQLFVEQHKHYLDEIIEQISEFSKRVILADANLDKVLSAYNKHRDKPIREQAENIIHLFTLTNLGAPAAFKYFDTTIDRKRYTSTKEVLDATLIHQSITGLYETRIDLSQLGGDGGGSSPAPGGIPWLMKKPLQLTTLVPLQEYEERLLKQTMLTGSYKEKLQSLFLKYDALWQHWENQVGHRRIKPHHIATGTVNPRPQKQYPINPKAKASIQTVINDLLKQGVLIQQNSIMNTPVYPVPKPDGKWRMVLDYREVNKTIPLIAAQNQHSAGILSSIFRGKYKTTLDLSNGFWAHSITPESYWLTAFTWLGQQYCWTRLPQGFLNSPALFNADVVDLLKEVPNVQVYVDDIYISHDDPREHLEQLEKVFSLLLNAGYVVSLKKSEIAQHEVEFLGFNITKEGRGLTETFKQKLLNITPPRDLKQLQSILGKLNFARNFIPNFSELVKPLYNIIATAPGKYITWTTDNSQQLQNIISMLNSAENLEERNPEVRLIMKVNTSPSAGYIRFYNEFAKRPIMYLNYVYTKAEVKFTNTEKLLTTIHKGLIKALDLGMGQEILVYSPIVSMTKIQKTPLPERKALPIRWITWMSYLEDPRIQFHYDKTLPELQQVPTVTDDIIAKIKHPSEFSMVFYTDGSAIKHPNVNKSHNAGMGIAQVQFKPEFTVINTWSIPLGDHTAQLAEVAAVEFACKKALKIDGPVLIVTDSFYVAESVNKELPYWQSNGFFNNKKKPLKHVSKWKSIADCIQLKPDIIIIHEKGHQPTASTFHTEGNNLADKLATQGSYVVNAGKRTADGSEFEKRTADGSEFESPKKKAKVE

SEQ ID NO: 576 - protein, 2087 aa, synthetic construct
MPAAKRVKLDGGDKKYSIGLDIGTNSVGWAVITDEYKVPSKKFKVLGNTDRHSIKKNLIGALLFDSGETAEATRLKRTARRRYTRRKNRICYLQEIFSNEMAKVDDSFFHRLEESFLVEEDKKHERHPIFGNIVDEVAYHEKYPTIYHLRKKLVDSTDKADLRLIYLALAHMIKFRGHFLIEGDLNPDNSDVDKLFIQLVQTYNQLFEENPINASGVDAKAILSARLSKSRRLENLIAQLPGEKKNGLFGNLIALSLGLTPNFKSNFDLAEDAKLQLSKDTYDDDLDNLLAQIGDQYADLFLAAKNLSDAILLSDILRVNTEITKAPLSASMIKRYDEHHQDLTLLKALVRQQLPEKYKEIFFDQSKNGYAGYIDGGASQEEFYKFIKPILEKMDGTEELLVKLNREDLLRKQRTFDNGSIPHQIHLGELHAILRRQEDFYPFLKDNREKIEKILTFRIPYYVGPLARGNSRFAWMTRKSEETITPWNFEEVVDKGASAQSFIERMTNFDKNLPNEKVLPKHSLLYEYFTVYNELTKVKYVTEGMRKPAFLSGEQKKAIVDLLFKTNRKVTVKQLKEDYFKKIECFDSVEISGVEDRFNASLGTYHDLLKIIKDKDFLDNEENEDILEDIVLTLTLFEDREMIEERLKTYAHLFDDKVMKQLKRRRYTGWGRLSRKLINGIRDKQSGKTILDFLKSDGFANRNFMQLIHDDSLTFKEDIQKAQVSGQGDSLHEHIANLAGSPAIKKGILQTVKVVDELVKVMGRHKPENIVIEMARENQTTQKGQKNSRERMKRIEEGIKELGSQILKEHPVENTQLQNEKLYLYYLQNGRDMYVDQELDINRLSDYDVDHIVPQSFLKDDSIDNKVLTRSDKARGKSDNVPSEEVVKKMKNYWRQLLNAKLITQRKFDNLTKAERGGLSELDKAGFIKRQLVETRQITKHVAQILDSRMNTKYDENDKLIREVKVITLKSKLVSDFRKDFQFYKVREINNYHHAHDAYLNAVVGTALIKKYPKLESEFVYGDYKVYDVRKMIAKSEQEIGKATAKYFFYSNIMNFFKTEITLANGEIRKRPLIETNGETGEIVWDKGRDFATVRKVLSMPQVNIVKKTEVQTGGFSKESILPKRNSDKLIARKKDWDPKKYGGFDSPTVAYSVLVVAKVEKGKSKKLKSVKELLGITIMERSSFEKNPIDFLEAKGYKEVKKDLIIKLPKYSLFELENGRKRMLASAGELQKGNELALPSKYVNFLYLASHYEKLKGSPEDNEQKQLFVEQHKHYLDEIIEQISEFSKRVILADANLDKVLSAYNKHRDKPIREQAENIIHLFTLTNLGAPAAFKYFDTTIDRKRYTSTKEVLDATLIHQSITGLYETRIDLSQLGGDGGPAPGGSEAAAKGGIPWLMKKPLQLTTLVPLQEYEERLLKQTMLTGSYKEKLQSLFLKYDALWQHWENQVGHRRIKPHHIATGTVNPRPQKQYPINPKAKASIQTVINDLLKQGVLIQQNSIMNTPVYPVPKPDGKWRMVLDYREVNKTIPLIAAQNQHSAGILSSIFRGKYKTTLDLSNGFWAHSITPESYWLTAFTWLGQQYCWTRLPQGFLNSPALFNADVVDLLKEVPNVQVYVDDIYISHDDPREHLEQLEKVFSLLLNAGYVVSLKKSEIAQHEVEFLGFNITKEGRGLTETFKQKLLNITPPRDLKQLQSILGKLNFARNFIPNFSELVKPLYNIIATAPGKYITWTTDNSQQLQNIISMLNSAENLEERNPEVRLIMKVNTSPSAGYIRFYNEFAKRPIMYLNYVYTKAEVKFTNTEKLLTTIHKGLIKALDLGMGQEILVYSPIVSMTKIQKTPLPERKALPIRWITWMSYLEDPRIQFHYDKTLPELQQVPTVTDDIIAKIKHPSEFSMVFYTDGSAIKHPNVNKSHNAGMGIAQVQFKPEFTVINTWSIPLGDHTAQLAEVAAVEFACKKALKIDGPVLIVTDSFYVAESVNKELPYWQSNGFFNNKKKPLKHVSKWKSIADCIQLKPDIIIIHEKGHQPTASTFHTEGNNLADKLATQGSYVVNAGKRTADGSEFEKRTADGSEFESPKKKAKVE

SEQ ID NO: 577 - protein, 2087 aa, synthetic construct
MPAAKRVKLDGGDKKYSIGLDIGTNSVGWAVITDEYKVPSKKFKVLGNTDRHSIKKNLIGALLFDSGETAEATRLKRTARRRYTRRKNRICYLQEIFSNEMAKVDDSFFHRLEESFLVEEDKKHERHPIFGNIVDEVAYHEKYPTIYHLRKKLVDSTDKADLRLIYLALAHMIKFRGHFLIEGDLNPDNSDVDKLFIQLVQTYNQLFEENPINASGVDAKAILSARLSKSRRLENLIAQLPGEKKNGLFGNLIALSLGLTPNFKSNFDLAEDAKLQLSKDTYDDDLDNLLAQIGDQYADLFLAAKNLSDAILLSDILRVNTEITKAPLSASMIKRYDEHHQDLTLLKALVRQQLPEKYKEIFFDQSKNGYAGYIDGGASQEEFYKFIKPILEKMDGTEELLVKLNREDLLRKQRTFDNGSIPHQIHLGELHAILRRQEDFYPFLKDNREKIEKILTFRIPYYVGPLARGNSRFAWMTRKSEETITPWNFEEVVDKGASAQSFIERMTNFDKNLPNEKVLPKHSLLYEYFTVYNELTKVKYVTEGMRKPAFLSGEQKKAIVDLLFKTNRKVTVKQLKEDYFKKIECFDSVEISGVEDRFNASLGTYHDLLKIIKDKDFLDNEENEDILEDIVLTLTLFEDREMIEERLKTYAHLFDDKVMKQLKRRRYTGWGRLSRKLINGIRDKQSGKTILDFLKSDGFANRNFMQLIHDDSLTFKEDIQKAQVSGQGDSLHEHIANLAGSPAIKKGILQTVKVVDELVKVMGRHKPENIVIEMARENQTTQKGQKNSRERMKRIEEGIKELGSQILKEHPVENTQLQNEKLYLYYLQNGRDMYVDQELDINRLSDYDVDHIVPQSFLKDDSIDNKVLTRSDKARGKSDNVPSEEVVKKMKNYWRQLLNAKLITQRKFDNLTKAERGGLSELDKAGFIKRQLVETRQITKHVAQILDSRMNTKYDENDKLIREVKVITLKSKLVSDFRKDFQFYKVREINNYHHAHDAYLNAVVGTALIKKYPKLESEFVYGDYKVYDVRKMIAKSEQEIGKATAKYFFYSNIMNFFKTEITLANGEIRKRPLIETNGETGEIVWDKGRDFATVRKVLSMPQVNIVKKTEVQTGGFSKESILPKRNSDKLIARKKDWDPKKYGGFDSPTVAYSVLVVAKVEKGKSKKLKSVKELLGITIMERSSFEKNPIDFLEAKGYKEVKKDLIIKLPKYSLFELENGRKRMLASAGELQKGNELALPSKYVNFLYLASHYEKLKGSPEDNEQKQLFVEQHKHYLDEIIEQISEFSKRVILADANLDKVLSAYNKHRDKPIREQAENIIHLFTLTNLGAPAAFKYFDTTIDRKRYTSTKEVLDATLIHQSITGLYETRIDLSQLGGDGGGGGEAAAKGGSGGIPWLMKKPLQLTTLVPLQEYEERLLKQTMLTGSYKEKLQSLFLKYDALWQHWENQVGHRRIKPHHIATGTVNPRPQKQYPINPKAKASIQTVINDLLKQGVLIQQNSIMNTPVYPVPKPDGKWRMVLDYREVNKTIPLIAAQNQHSAGILSSIFRGKYKTTLDLSNGFWAHSITPESYWLTAFTWLGQQYCWTRLPQGFLNSPALFNADVVDLLKEVPNVQVYVDDIYISHDDPREHLEQLEKVFSLLLNAGYVVSLKKSEIAQHEVEFLGFNITKEGRGLTETFKQKLLNITPPRDLKQLQSILGKLNFARNFIPNFSELVKPLYNIIATAPGKYITWTTDNSQQLQNIISMLNSAENLEERNPEVRLIMKVNTSPSAGYIRFYNEFAKRPIMYLNYVYTKAEVKFTNTEKLLTTIHKGLIKALDLGMGQEILVYSPIVSMTKIQKTPLPERKALPIRWITWMSYLEDPRIQFHYDKTLPELQQVPTVTDDIIAKIKHPSEFSMVFYTDGSAIKHPNVNKSHNAGMGIAQVQFKPEFTVINTWSIPLGDHTAQLAEVAAVEFACKKALKIDGPVLIVTDSFYVAESVNKELPYWQSNGFFNNKKKPLKHVSKWKSIADCIQLKPDIIIIHEKGHQPTASTFHTEGNNLADKLATQGSYVVNAGKRTADGSEFEKRTADGSEFESPKKKAKVE

SEQ ID NO: 578 - protein, 2084 aa, synthetic construct
MPAAKRVKLDGGDKKYSIGLDIGTNSVGWAVITDEYKVPSKKFKVLGNTDRHSIKKNLIGALLFDSGETAEATRLKRTARRRYTRRKNRICYLQEIFSNEMAKVDDSFFHRLEESFLVEEDKKHERHPIFGNIVDEVAYHEKYPTIYHLRKKLVDSTDKADLRLIYLALAHMIKFRGHFLIEGDLNPDNSDVDKLFIQLVQTYNQLFEENPINASGVDAKAILSARLSKSRRLENLIAQLPGEKKNGLFGNLIALSLGLTPNFKSNFDLAEDAKLQLSKDTYDDDLDNLLAQIGDQYADLFLAAKNLSDAILLSDILRVNTEITKAPLSASMIKRYDEHHQDLTLLKALVRQQLPEKYKEIFFDQSKNGYAGYIDGGASQEEFYKFIKPILEKMDGTEELLVKLNREDLLRKQRTFDNGSIPHQIHLGELHAILRRQEDFYPFLKDNREKIEKILTFRIPYYVGPLARGNSRFAWMTRKSEETITPWNFEEVVDKGASAQSFIERMTNFDKNLPNEKVLPKHSLLYEYFTVYNELTKVKYVTEGMRKPAFLSGEQKKAIVDLLFKTNRKVTVKQLKEDYFKKIECFDSVEISGVEDRFNASLGTYHDLLKIIKDKDFLDNEENEDILEDIVLTLTLFEDREMIEERLKTYAHLFDDKVMKQLKRRRYTGWGRLSRKLINGIRDKQSGKTILDFLKSDGFANRNFMQLIHDDSLTFKEDIQKAQVSGQGDSLHEHIANLAGSPAIKKGILQTVKVVDELVKVMGRHKPENIVIEMARENQTTQKGQKNSRERMKRIEEGIKELGSQILKEHPVENTQLQNEKLYLYYLQNGRDMYVDQELDINRLSDYDVDHIVPQSFLKDDSIDNKVLTRSDKARGKSDNVPSEEVVKKMKNYWRQLLNAKLITQRKFDNLTKAERGGLSELDKAGFIKRQLVETRQITKHVAQILDSRMNTKYDENDKLIREVKVITLKSKLVSDFRKDFQFYKVREINNYHHAHDAYLNAVVGTALIKKYPKLESEFVYGDYKVYDVRKMIAKSEQEIGKATAKYFFYSNIMNFFKTEITLANGEIRKRPLIETNGETGEIVWDKGRDFATVRKVLSMPQVNIVKKTEVQTGGFSKESILPKRNSDKLIARKKDWDPKKYGGFDSPTVAYSVLVVAKVEKGKSKKLKSVKELLGITIMERSSFEKNPIDFLEAKGYKEVKKDLIIKLPKYSLFELENGRKRMLASAGELQKGNELALPSKYVNFLYLASHYEKLKGSPEDNEQKQLFVEQHKHYLDEIIEQISEFSKRVILADANLDKVLSAYNKHRDKPIREQAENIIHLFTLTNLGAPAAFKYFDTTIDRKRYTSTKEVLDATLIHQSITGLYETRIDLSQLGGDGGGGGGGGGGGGIPWLMKKPLQLTTLVPLQEYEERLLKQTMLTGSYKEKLQSLFLKYDALWQHWENQVGHRRIKPHHIATGTVNPRPQKQYPINPKAKASIQTVINDLLKQGVLIQQNSIMNTPVYPVPKPDGKWRMVLDYREVNKTIPLIAAQNQHSAGILSSIFRGKYKTTLDLSNGFWAHSITPESYWLTAFTWLGQQYCWTRLPQGFLNSPALFNADVVDLLKEVPNVQVYVDDIYISHDDPREHLEQLEKVFSLLLNAGYVVSLKKSEIAQHEVEFLGFNITKEGRGLTETFKQKLLNITPPRDLKQLQSILGKLNFARNFIPNFSELVKPLYNIIATAPGKYITWTTDNSQQLQNIISMLNSAENLEERNPEVRLIMKVNTSPSAGYIRFYNEFAKRPIMYLNYVYTKAEVKFTNTEKLLTTIHKGLIKALDLGMGQEILVYSPIVSMTKIQKTPLPERKALPIRWITWMSYLEDPRIQFHYDKTLPELQQVPTVTDDIIAKIKHPSEFSMVFYTDGSAIKHPNVNKSHNAGMGIAQVQFKPEFTVINTWSIPLGDHTAQLAEVAAVEFACKKALKIDGPVLIVTDSFYVAESVNKELPYWQSNGFFNNKKKPLKHVSKWKSIADCIQLKPDIIIIHEKGHQPTASTFHTEGNNLADKLATQGSYVVNAGKRTADGSEFEKRTADGSEFESPKKKAKVE

SEQ ID NO: 579 - protein, 2087 aa, synthetic construct
MPAAKRVKLDGGDKKYSIGLDIGTNSVGWAVITDEYKVPSKKFKVLGNTDRHSIKKNLIGALLFDSGETAEATRLKRTARRRYTRRKNRICYLQEIFSNEMAKVDDSFFHRLEESFLVEEDKKHERHPIFGNIVDEVAYHEKYPTIYHLRKKLVDSTDKADLRLIYLALAHMIKFRGHFLIEGDLNPDNSDVDKLFIQLVQTYNQLFEENPINASGVDAKAILSARLSKSRRLENLIAQLPGEKKNGLFGNLIALSLGLTPNFKSNFDLAEDAKLQLSKDTYDDDLDNLLAQIGDQYADLFLAAKNLSDAILLSDILRVNTEITKAPLSASMIKRYDEHHQDLTLLKALVRQQLPEKYKEIFFDQSKNGYAGYIDGGASQEEFYKFIKPILEKMDGTEELLVKLNREDLLRKQRTFDNGSIPHQIHLGELHAILRRQEDFYPFLKDNREKIEKILTFRIPYYVGPLARGNSRFAWMTRKSEETITPWNFEEVVDKGASAQSFIERMTNFDKNLPNEKVLPKHSLLYEYFTVYNELTKVKYVTEGMRKPAFLSGEQKKAIVDLLFKTNRKVTVKQLKEDYFKKIECFDSVEISGVEDRFNASLGTYHDLLKIIKDKDFLDNEENEDILEDIVLTLTLFEDREMIEERLKTYAHLFDDKVMKQLKRRRYTGWGRLSRKLINGIRDKQSGKTILDFLKSDGFANRNFMQLIHDDSLTFKEDIQKAQVSGQGDSLHEHIANLAGSPAIKKGILQTVKVVDELVKVMGRHKPENIVIEMARENQTTQKGQKNSRERMKRIEEGIKELGSQILKEHPVENTQLQNEKLYLYYLQNGRDMYVDQELDINRLSDYDVDHIVPQSFLKDDSIDNKVLTRSDKARGKSDNVPSEEVVKKMKNYWRQLLNAKLITQRKFDNLTKAERGGLSELDKAGFIKRQLVETRQITKHVAQILDSRMNTKYDENDKLIREVKVITLKSKLVSDFRKDFQFYKVREINNYHHAHDAYLNAVVGTALIKKYPKLESEFVYGDYKVYDVRKMIAKSEQEIGKATAKYFFYSNIMNFFKTEITLANGEIRKRPLIETNGETGEIVWDKGRDFATVRKVLSMPQVNIVKKTEVQTGGFSKESILPKRNSDKLIARKKDWDPKKYGGFDSPTVAYSVLVVAKVEKGKSKKLKSVKELLGITIMERSSFEKNPIDFLEAKGYKEVKKDLIIKLPKYSLFELENGRKRMLASAGELQKGNELALPSKYVNFLYLASHYEKLKGSPEDNEQKQLFVEQHKHYLDEIIEQISEFSKRVILADANLDKVLSAYNKHRDKPIREQAENIIHLFTLTNLGAPAAFKYFDTTIDRKRYTSTKEVLDATLIHQSITGLYETRIDLSQLGGDGGPAPGSSEAAAKGGIPWLMKKPLQLTTLVPLQEYEERLLKQTMLTGSYKEKLQSLFLKYDALWQHWENQVGHRRIKPHHIATGTVNPRPQKQYPINPKAKASIQTVINDLLKQGVLIQQNSIMNTPVYPVPKPDGKWRMVLDYREVNKTIPLIAAQNQHSAGILSSIFRGKYKTTLDLSNGFWAHSITPESYWLTAFTWLGQQYCWTRLPQGFLNSPALFNADVVDLLKEVPNVQVYVDDIYISHDDPREHLEQLEKVFSLLLNAGYVVSLKKSEIAQHEVEFLGFNITKEGRGLTETFKQKLLNITPPRDLKQLQSILGKLNFARNFIPNFSELVKPLYNIIATAPGKYITWTTDNSQQLQNIISMLNSAENLEERNPEVRLIMKVNTSPSAGYIRFYNEFAKRPIMYLNYVYTKAEVKFTNTEKLLTTIHKGLIKALDLGMGQEILVYSPIVSMTKIQKTPLPERKALPIRWITWMSYLEDPRIQFHYDKTLPELQQVPTVTDDIIAKIKHPSEFSMVFYTDGSAIKHPNVNKSHNAGMGIAQVQFKPEFTVINTWSIPLGDHTAQLAEVAAVEFACKKALKIDGPVLIVTDSFYVAESVNKELPYWQSNGFFNNKKKPLKHVSKWKSIADCIQLKPDIIIIHEKGHQPTASTFHTEGNNLADKLATQGSYVVNAGKRTADGSEFEKRTADGSEFESPKKKAKVE

SEQ ID NO: 580 - protein, 2087 aa, synthetic construct
MPAAKRVKLDGGDKKYSIGLDIGTNSVGWAVITDEYKVPSKKFKVLGNTDRHSIKKNLIGALLFDSGETAEATRLKRTARRRYTRRKNRICYLQEIFSNEMAKVDDSFFHRLEESFLVEEDKKHERHPIFGNIVDEVAYHEKYPTIYHLRKKLVDSTDKADLRLIYLALAHMIKFRGHFLIEGDLNPDNSDVDKLFIQLVQTYNQLFEENPINASGVDAKAILSARLSKSRRLENLIAQLPGEKKNGLFGNLIALSLGLTPNFKSNFDLAEDAKLQLSKDTYDDDLDNLLAQIGDQYADLFLAAKNLSDAILLSDILRVNTEITKAPLSASMIKRYDEHHQDLTLLKALVRQQLPEKYKEIFFDQSKNGYAGYIDGGASQEEFYKFIKPILEKMDGTEELLVKLNREDLLRKQRTFDNGSIPHQIHLGELHAILRRQEDFYPFLKDNREKIEKILTFRIPYYVGPLARGNSRFAWMTRKSEETITPWNFEEVVDKGASAQSFIERMTNFDKNLPNEKVLPKHSLLYEYFTVYNELTKVKYVTEGMRKPAFLSGEQKKAIVDLLFKTNRKVTVKQLKEDYFKKIECFDSVEISGVEDRFNASLGTYHDLLKIIKDKDFLDNEENEDILEDIVLTLTLFEDREMIEERLKTYAHLFDDKVMKQLKRRRYTGWGRLSRKLINGIRDKQSGKTILDFLKSDGFANRNFMQLIHDDSLTFKEDIQKAQVSGQGDSLHEHIANLAGSPAIKKGILQTVKVVDELVKVMGRHKPENIVIEMARENQTTQKGQKNSRERMKRIEEGIKELGSQILKEHPVENTQLQNEKLYLYYLQNGRDMYVDQELDINRLSDYDVDHIVPQSFLKDDSIDNKVLTRSDKARGKSDNVPSEEVVKKMKNYWRQLLNAKLITQRKFDNLTKAERGGLSELDKAGFIKRQLVETRQITKHVAQILDSRMNTKYDENDKLIREVKVITLKSKLVSDFRKDFQFYKVREINNYHHAHDAYLNAVVGTALIKKYPKLESEFVYGDYKVYDVRKMIAKSEQEIGKATAKYFFYSNIMNFFKTEITLANGEIRKRPLIETNGETGEIVWDKGRDFATVRKVLSMPQVNIVKKTEVQTGGFSKESILPKRNSDKLIARKKDWDPKKYGGFDSPTVAYSVLVVAKVEKGKSKKLKSVKELLGITIMERSSFEKNPIDFLEAKGYKEVKKDLIIKLPKYSLFELENGRKRMLASAGELQKGNELALPSKYVNFLYLASHYEKLKGSPEDNEQKQLFVEQHKHYLDEIIEQISEFSKRVILADANLDKVLSAYNKHRDKPIREQAENIIHLFTLTNLGAPAAFKYFDTTIDRKRYTSTKEVLDATLIHQSITGLYETRIDLSQLGGDGGGGSEAAAKPAPGGIPWLMKKPLQLTTLVPLQEYEERLLKQTMLTGSYKEKLQSLFLKYDALWQHWENQVGHRRIKPHHIATGTVNPRPQKQYPINPKAKASIQTVINDLLKQGVLIQQNSIMNTPVYPVPKPDGKWRMVLDYREVNKTIPLIAAQNQHSAGILSSIFRGKYKTTLDLSNGFWAHSITPESYWLTAFTWLGQQYCWTRLPQGFLNSPALFNADVVDLLKEVPNVQVYVDDIYISHDDPREHLEQLEKVFSLLLNAGYVVSLKKSEIAQHEVEFLGFNITKEGRGLTETFKQKLLNITPPRDLKQLQSILGKLNFARNFIPNFSELVKPLYNIIATAPGKYITWTTDNSQQLQNIISMLNSAENLEERNPEVRLIMKVNTSPSAGYIRFYNEFAKRPIMYLNYVYTKAEVKFTNTEKLLTTIHKGLIKALDLGMGQEILVYSPIVSMTKIQKTPLPERKALPIRWITWMSYLEDPRIQFHYDKTLPELQQVPTVTDDIIAKIKHPSEFSMVFYTDGSAIKHPNVNKSHNAGMGIAQVQFKPEFTVINTWSIPLGDHTAQLAEVAAVEFACKKALKIDGPVLIVTDSFYVAESVNKELPYWQSNGFFNNKKKPLKHVSKWKSIADCIQLKPDIIIIHEKGHQPTASTFHTEGNNLADKLATQGSYVVNAGKRTADGSEFEKRTADGSEFESPKKKAKVE

SEQ ID NO: 581 - protein, 2085 aa, synthetic construct
MPAAKRVKLDGGDKKYSIGLDIGTNSVGWAVITDEYKVPSKKFKVLGNTDRHSIKKNLIGALLFDSGETAEATRLKRTARRRYTRRKNRICYLQEIFSNEMAKVDDSFFHRLEESFLVEEDKKHERHPIFGNIVDEVAYHEKYPTIYHLRKKLVDSTDKADLRLIYLALAHMIKFRGHFLIEGDLNPDNSDVDKLFIQLVQTYNQLFEENPINASGVDAKAILSARLSKSRRLENLIAQLPGEKKNGLFGNLIALSLGLTPNFKSNFDLAEDAKLQLSKDTYDDDLDNLLAQIGDQYADLFLAAKNLSDAILLSDILRVNTEITKAPLSASMIKRYDEHHQDLTLLKALVRQQLPEKYKEIFFDQSKNGYAGYIDGGASQEEFYKFIKPILEKMDGTEELLVKLNREDLLRKQRTFDNGSIPHQIHLGELHAILRRQEDFYPFLKDNREKIEKILTFRIPYYVGPLARGNSRFAWMTRKSEETITPWNFEEVVDKGASAQSFIERMTNFDKNLPNEKVLPKHSLLYEYFTVYNELTKVKYVTEGMRKPAFLSGEQKKAIVDLLFKTNRKVTVKQLKEDYFKKIECFDSVEISGVEDRFNASLGTYHDLLKIIKDKDFLDNEENEDILEDIVLTLTLFEDREMIEERLKTYAHLFDDKVMKQLKRRRYTGWGRLSRKLINGIRDKQSGKTILDFLKSDGFANRNFMQLIHDDSLTFKEDIQKAQVSGQGDSLHEHIANLAGSPAIKKGILQTVKVVDELVKVMGRHKPENIVIEMARENQTTQKGQKNSRERMKRIEEGIKELGSQILKEHPVENTQLQNEKLYLYYLQNGRDMYVDQELDINRLSDYDVDHIVPQSFLKDDSIDNKVLTRSDKARGKSDNVPSEEVVKKMKNYWRQLLNAKLITQRKFDNLTKAERGGLSELDKAGFIKRQLVETRQITKHVAQILDSRMNTKYDENDKLIREVKVITLKSKLVSDFRKDFQFYKVREINNYHHAHDAYLNAVVGTALIKKYPKLESEFVYGDYKVYDVRKMIAKSEQEIGKATAKYFFYSNIMNFFKTEITLANGEIRKRPLIETNGETGEIVWDKGRDFATVRKVLSMPQVNIVKKTEVQTGGFSKESILPKRNSDKLIARKKDWDPKKYGGFDSPTVAYSVLVVAKVEKGKSKKLKSVKELLGITIMERSSFEKNPIDFLEAKGYKEVKKDLIIKLPKYSLFELENGRKRMLASAGELQKGNELALPSKYVNFLYLASHYEKLKGSPEDNEQKQLFVEQHKHYLDEIIEQISEFSKRVILADANLDKVLSAYNKHRDKPIREQAENIIHLFTLTNLGAPAAFKYFDTTIDRKRYTSTKEVLDATLIHQSITGLYETRIDLSQLGGDGGPAPGSSGGGGGIPWLMKKPLQLTTLVPLQEYEERLLKQTMLTGSYKEKLQSLFLKYDALWQHWENQVGHRRIKPHHIATGTVNPRPQKQYPINPKAKASIQTVINDLLKQGVLIQQNSIMNTPVYPVPKPDGKWRMVLDYREVNKTIPLIAAQNQHSAGILSSIFRGKYKTTLDLSNGFWAHSITPESYWLTAFTWLGQQYCWTRLPQGFLNSPALFNADVVDLLKEVPNVQVYVDDIYISHDDPREHLEQLEKVFSLLLNAGYVVSLKKSEIAQHEVEFLGFNITKEGRGLTETFKQKLLNITPPRDLKQLQSILGKLNFARNFIPNFSELVKPLYNIIATAPGKYITWTTDNSQQLQNIISMLNSAENLEERNPEVRLIMKVNTSPSAGYIRFYNEFAKRPIMYLNYVYTKAEVKFTNTEKLLTTIHKGLIKALDLGMGQEILVYSPIVSMTKIQKTPLPERKALPIRWITWMSYLEDPRIQFHYDKTLPELQQVPTVTDDIIAKIKHPSEFSMVFYTDGSAIKHPNVNKSHNAGMGIAQVQFKPEFTVINTWSIPLGDHTAQLAEVAAVEFACKKALKIDGPVLIVTDSFYVAESVNKELPYWQSNGFFNNKKKPLKHVSKWKSIADCIQLKPDIIIIHEKGHQPTASTFHTEGNNLADKLATQGSYVVNAGKRTADGSEFEKRTADGSEFESPKKKAKVE

SEQ ID NO: 582 - protein, 2087 aa, synthetic construct
MPAAKRVKLDGGDKKYSIGLDIGTNSVGWAVITDEYKVPSKKFKVLGNTDRHSIKKNLIGALLFDSGETAEATRLKRTARRRYTRRKNRICYLQEIFSNEMAKVDDSFFHRLEESFLVEEDKKHERHPIFGNIVDEVAYHEKYPTIYHLRKKLVDSTDKADLRLIYLALAHMIKFRGHFLIEGDLNPDNSDVDKLFIQLVQTYNQLFEENPINASGVDAKAILSARLSKSRRLENLIAQLPGEKKNGLFGNLIALSLGLTPNFKSNFDLAEDAKLQLSKDTYDDDLDNLLAQIGDQYADLFLAAKNLSDAILLSDILRVNTEITKAPLSASMIKRYDEHHQDLTLLKALVRQQLPEKYKEIFFDQSKNGYAGYIDGGASQEEFYKFIKPILEKMDGTEELLVKLNREDLLRKQRTFDNGSIPHQIHLGELHAILRRQEDFYPFLKDNREKIEKILTFRIPYYVGPLARGNSRFAWMTRKSEETITPWNFEEVVDKGASAQSFIERMTNFDKNLPNEKVLPKHSLLYEYFTVYNELTKVKYVTEGMRKPAFLSGEQKKAIVDLLFKTNRKVTVKQLKEDYFKKIECFDSVEISGVEDRFNASLGTYHDLLKIIKDKDFLDNEENEDILEDIVLTLTLFEDREMIEERLKTYAHLFDDKVMKQLKRRRYTGWGRLSRKLINGIRDKQSGKTILDFLKSDGFANRNFMQLIHDDSLTFKEDIQKAQVSGQGDSLHEHIANLAGSPAIKKGILQTVKVVDELVKVMGRHKPENIVIEMARENQTTQKGQKNSRERMKRIEEGIKELGSQILKEHPVENTQLQNEKLYLYYLQNGRDMYVDQELDINRLSDYDVDHIVPQSFLKDDSIDNKVLTRSDKARGKSDNVPSEEVVKKMKNYWRQLLNAKLITQRKFDNLTKAERGGLSELDKAGFIKRQLVETRQITKHVAQILDSRMNTKYDENDKLIREVKVITLKSKLVSDFRKDFQFYKVREINNYHHAHDAYLNAVVGTALIKKYPKLESEFVYGDYKVYDVRKMIAKSEQEIGKATAKYFFYSNIMNFFKTEITLANGEIRKRPLIETNGETGEIVWDKGRDFATVRKVLSMPQVNIVKKTEVQTGGFSKESILPKRNSDKLIARKKDWDPKKYGGFDSPTVAYSVLVVAKVEKGKSKKLKSVKELLGITIMERSSFEKNPIDFLEAKGYKEVKKDLIIKLPKYSLFELENGRKRMLASAGELQKGNELALPSKYVNFLYLASHYEKLKGSPEDNEQKQLFVEQHKHYLDEIIEQISEFSKRVILADANLDKVLSAYNKHRDKPIREQAENIIHLFTLTNLGAPAAFKYFDTTIDRKRYTSTKEVLDATLIHQSITGLYETRIDLSQLGGDGGGGGGSSEAAAKGGIPWLMKKPLQLTTLVPLQEYEERLLKQTMLTGSYKEKLQSLFLKYDALWQHWENQVGHRRIKPHHIATGTVNPRPQKQYPINPKAKASIQTVINDLLKQGVLIQQNSIMNTPVYPVPKPDGKWRMVLDYREVNKTIPLIAAQNQHSAGILSSIFRGKYKTTLDLSNGFWAHSITPESYWLTAFTWLGQQYCWTRLPQGFLNSPALFNADVVDLLKEVPNVQVYVDDIYISHDDPREHLEQLEKVFSLLLNAGYVVSLKKSEIAQHEVEFLGFNITKEGRGLTETFKQKLLNITPPRDLKQLQSILGKLNFARNFIPNFSELVKPLYNIIATAPGKYITWTTDNSQQLQNIISMLNSAENLEERNPEVRLIMKVNTSPSAGYIRFYNEFAKRPIMYLNYVYTKAEVKFTNTEKLLTTIHKGLIKALDLGMGQEILVYSPIVSMTKIQKTPLPERKALPIRWITWMSYLEDPRIQFHYDKTLPELQQVPTVTDDIIAKIKHPSEFSMVFYTDGSAIKHPNVNKSHNAGMGIAQVQFKPEFTVINTWSIPLGDHTAQLAEVAAVEFACKKALKIDGPVLIVTDSFYVAESVNKELPYWQSNGFFNNKKKPLKHVSKWKSIADCIQLKPDIIIIHEKGHQPTASTFHTEGNNLADKLATQGSYVVNAGKRTADGSEFEKRTADGSEFESPKKKAKVE

SEQ ID NO: 583 - protein, 2087 aa, synthetic construct
MPAAKRVKLDGGDKKYSIGLDIGTNSVGWAVITDEYKVPSKKFKVLGNTDRHSIKKNLIGALLFDSGETAEATRLKRTARRRYTRRKNRICYLQEIFSNEMAKVDDSFFHRLEESFLVEEDKKHERHPIFGNIVDEVAYHEKYPTIYHLRKKLVDSTDKADLRLIYLALAHMIKFRGHFLIEGDLNPDNSDVDKLFIQLVQTYNQLFEENPINASGVDAKAILSARLSKSRRLENLIAQLPGEKKNGLFGNLIALSLGLTPNFKSNFDLAEDAKLQLSKDTYDDDLDNLLAQIGDQYADLFLAAKNLSDAILLSDILRVNTEITKAPLSASMIKRYDEHHQDLTLLKALVRQQLPEKYKEIFFDQSKNGYAGYIDGGASQEEFYKFIKPILEKMDGTEELLVKLNREDLLRKQRTFDNGSIPHQIHLGELHAILRRQEDFYPFLKDNREKIEKILTFRIPYYVGPLARGNSRFAWMTRKSEETITPWNFEEVVDKGASAQSFIERMTNFDKNLPNEKVLPKHSLLYEYFTVYNELTKVKYVTEGMRKPAFLSGEQKKAIVDLLFKTNRKVTVKQLKEDYFKKIECFDSVEISGVEDRFNASLGTYHDLLKIIKDKDFLDNEENEDILEDIVLTLTLFEDREMIEERLKTYAHLFDDKVMKQLKRRRYTGWGRLSRKLINGIRDKQSGKTILDFLKSDGFANRNFMQLIHDDSLTFKEDIQKAQVSGQGDSLHEHIANLAGSPAIKKGILQTVKVVDELVKVMGRHKPENIVIEMARENQTTQKGQKNSRERMKRIEEGIKELGSQILKEHPVENTQLQNEKLYLYYLQNGRDMYVDQELDINRLSDYDVDHIVPQSFLKDDSIDNKVLTRSDKARGKSDNVPSEEVVKKMKNYWRQLLNAKLITQRKFDNLTKAERGGLSELDKAGFIKRQLVETRQITKHVAQILDSRMNTKYDENDKLIREVKVITLKSKLVSDFRKDFQFYKVREINNYHHAHDAYLNAVVGTALIKKYPKLESEFVYGDYKVYDVRKMIAKSEQEIGKATAKYFFYSNIMNFFKTEITLANGEIRKRPLIETNGETGEIVWDKGRDFATVRKVLSMPQVNIVKKTEVQTGGFSKESILPKRNSDKLIARKKDWDPKKYGGFDSPTVAYSVLVVAKVEKGKSKKLKSVKELLGITIMERSSFEKNPIDFLEAKGYKEVKKDLIIKLPKYSLFELENGRKRMLASAGELQKGNELALPSKYVNFLYLASHYEKLKGSPEDNEQKQLFVEQHKHYLDEIIEQISEFSKRVILADANLDKVLSAYNKHRDKPIREQAENIIHLFTLTNLGAPAAFKYFDTTIDRKRYTSTKEVLDATLIHQSITGLYETRIDLSQLGGDGGGGSGGGEAAAKGGIPWLMKKPLQLTTLVPLQEYEERLLKQTMLTGSYKEKLQSLFLKYDALWQHWENQVGHRRIKPHHIATGTVNPRPQKQYPINPKAKASIQTVINDLLKQGVLIQQNSIMNTPVYPVPKPDGKWRMVLDYREVNKTIPLIAAQNQHSAGILSSIFRGKYKTTLDLSNGFWAHSITPESYWLTAFTWLGQQYCWTRLPQGFLNSPALFNADVVDLLKEVPNVQVYVDDIYISHDDPREHLEQLEKVFSLLLNAGYVVSLKKSEIAQHEVEFLGFNITKEGRGLTETFKQKLLNITPPRDLKQLQSILGKLNFARNFIPNFSELVKPLYNIIATAPGKYITWTTDNSQQLQNIISMLNSAENLEERNPEVRLIMKVNTSPSAGYIRFYNEFAKRPIMYLNYVYTKAEVKFTNTEKLLTTIHKGLIKALDLGMGQEILVYSPIVSMTKIQKTPLPERKALPIRWITWMSYLEDPRIQFHYDKTLPELQQVPTVTDDIIAKIKHPSEFSMVFYTDGSAIKHPNVNKSHNAGMGIAQVQFKPEFTVINTWSIPLGDHTAQLAEVAAVEFACKKALKIDGPVLIVTDSFYVAESVNKELPYWQSNGFFNNKKKPLKHVSKWKSIADCIQLKPDIIIIHEKGHQPTASTFHTEGNNLADKLATQGSYVVNAGKRTADGSEFEKRTADGSEFESPKKKAKVE

SEQ ID NO: 584 - protein, 2085 aa, synthetic construct
MPAAKRVKLDGGDKKYSIGLDIGTNSVGWAVITDEYKVPSKKFKVLGNTDRHSIKKNLIGALLFDSGETAEATRLKRTARRRYTRRKNRICYLQEIFSNEMAKVDDSFFHRLEESFLVEEDKKHERHPIFGNIVDEVAYHEKYPTIYHLRKKLVDSTDKADLRLIYLALAHMIKFRGHFLIEGDLNPDNSDVDKLFIQLVQTYNQLFEENPINASGVDAKAILSARLSKSRRLENLIAQLPGEKKNGLFGNLIALSLGLTPNFKSNFDLAEDAKLQLSKDTYDDDLDNLLAQIGDQYADLFLAAKNLSDAILLSDILRVNTEITKAPLSASMIKRYDEHHQDLTLLKALVRQQLPEKYKEIFFDQSKNGYAGYIDGGASQEEFYKFIKPILEKMDGTEELLVKLNREDLLRKQRTFDNGSIPHQIHLGELHAILRRQEDFYPFLKDNREKIEKILTFRIPYYVGPLARGNSRFAWMTRKSEETITPWNFEEVVDKGASAQSFIERMTNFDKNLPNEKVLPKHSLLYEYFTVYNELTKVKYVTEGMRKPAFLSGEQKKAIVDLLFKTNRKVTVKQLKEDYFKKIECFDSVEISGVEDRFNASLGTYHDLLKIIKDKDFLDNEENEDILEDIVLTLTLFEDREMIEERLKTYAHLFDDKVMKQLKRRRYTGWGRLSRKLINGIRDKQSGKTILDFLKSDGFANRNFMQLIHDDSLTFKEDIQKAQVSGQGDSLHEHIANLAGSPAIKKGILQTVKVVDELVKVMGRHKPENIVIEMARENQTTQKGQKNSRERMKRIEEGIKELGSQILKEHPVENTQLQNEKLYLYYLQNGRDMYVDQELDINRLSDYDVDHIVPQSFLKDDSIDNKVLTRSDKARGKSDNVPSEEVVKKMKNYWRQLLNAKLITQRKFDNLTKAERGGLSELDKAGFIKRQLVETRQITKHVAQILDSRMNTKYDENDKLIREVKVITLKSKLVSDFRKDFQFYKVREINNYHHAHDAYLNAVVGTALIKKYPKLESEFVYGDYKVYDVRKMIAKSEQEIGKATAKYFFYSNIMNFFKTEITLANGEIRKRPLIETNGETGEIVWDKGRDFATVRKVLSMPQVNIVKKTEVQTGGFSKESILPKRNSDKLIARKKDWDPKKYGGFDSPTVAYSVLVVAKVEKGKSKKLKSVKELLGITIMERSSFEKNPIDFLEAKGYKEVKKDLIIKLPKYSLFELENGRKRMLASAGELQKGNELALPSKYVNFLYLASHYEKLKGSPEDNEQKQLFVEQHKHYLDEIIEQISEFSKRVILADANLDKVLSAYNKHRDKPIREQAENIIHLFTLTNLGAPAAFKYFDTTIDRKRYTSTKEVLDATLIHQSITGLYETRIDLSQLGGDGGGSSGGSPAPGGIPWLMKKPLQLTTLVPLQEYEERLLKQTMLTGSYKEKLQSLFLKYDALWQHWENQVGHRRIKPHHIATGTVNPRPQKQYPINPKAKASIQTVINDLLKQGVLIQQNSIMNTPVYPVPKPDGKWRMVLDYREVNKTIPLIAAQNQHSAGILSSIFRGKYKTTLDLSNGFWAHSITPESYWLTAFTWLGQQYCWTRLPQGFLNSPALFNADVVDLLKEVPNVQVYVDDIYISHDDPREHLEQLEKVFSLLLNAGYVVSLKKSEIAQHEVEFLGFNITKEGRGLTETFKQKLLNITPPRDLKQLQSILGKLNFARNFIPNFSELVKPLYNIIATAPGKYITWTTDNSQQLQNIISMLNSAENLEERNPEVRLIMKVNTSPSAGYIRFYNEFAKRPIMYLNYVYTKAEVKFTNTEKLLTTIHKGLIKALDLGMGQEILVYSPIVSMTKIQKTPLPERKALPIRWITWMSYLEDPRIQFHYDKTLPELQQVPTVTDDIIAKIKHPSEFSMVFYTDGSAIKHPNVNKSHNAGMGIAQVQFKPEFTVINTWSIPLGDHTAQLAEVAAVEFACKKALKIDGPVLIVTDSFYVAESVNKELPYWQSNGFFNNKKKPLKHVSKWKSIADCIQLKPDIIIIHEKGHQPTASTFHTEGNNLADKLATQGSYVVNAGKRTADGSEFEKRTADGSEFESPKKKAKVE

SEQ ID NO: 585 - protein, 2109 aa, synthetic construct
MPAAKRVKLDGGDKKYSIGLDIGTNSVGWAVITDEYKVPSKKFKVLGNTDRHSIKKNLIGALLFDSGETAEATRLKRTARRRYTRRKNRICYLQEIFSNEMAKVDDSFFHRLEESFLVEEDKKHERHPIFGNIVDEVAYHEKYPTIYHLRKKLVDSTDKADLRLIYLALAHMIKFRGHFLIEGDLNPDNSDVDKLFIQLVQTYNQLFEENPINASGVDAKAILSARLSKSRRLENLIAQLPGEKKNGLFGNLIALSLGLTPNFKSNFDLAEDAKLQLSKDTYDDDLDNLLAQIGDQYADLFLAAKNLSDAILLSDILRVNTEITKAPLSASMIKRYDEHHQDLTLLKALVRQQLPEKYKEIFFDQSKNGYAGYIDGGASQEEFYKFIKPILEKMDGTEELLVKLNREDLLRKQRTFDNGSIPHQIHLGELHAILRRQEDFYPFLKDNREKIEKILTFRIPYYVGPLARGNSRFAWMTRKSEETITPWNFEEVVDKGASAQSFIERMTNFDKNLPNEKVLPKHSLLYEYFTVYNELTKVKYVTEGMRKPAFLSGEQKKAIVDLLFKTNRKVTVKQLKEDYFKKIECFDSVEISGVEDRFNASLGTYHDLLKIIKDKDFLDNEENEDILEDIVLTLTLFEDREMIEERLKTYAHLFDDKVMKQLKRRRYTGWGRLSRKLINGIRDKQSGKTILDFLKSDGFANRNFMQLIHDDSLTFKEDIQKAQVSGQGDSLHEHIANLAGSPAIKKGILQTVKVVDELVKVMGRHKPENIVIEMARENQTTQKGQKNSRERMKRIEEGIKELGSQILKEHPVENTQLQNEKLYLYYLQNGRDMYVDQELDINRLSDYDVDHIVPQSFLKDDSIDNKVLTRSDKARGKSDNVPSEEVVKKMKNYWRQLLNAKLITQRKFDNLTKAERGGLSELDKAGFIKRQLVETRQITKHVAQILDSRMNTKYDENDKLIREVKVITLKSKLVSDFRKDFQFYKVREINNYHHAHDAYLNAVVGTALIKKYPKLESEFVYGDYKVYDVRKMIAKSEQEIGKATAKYFFYSNIMNFFKTEITLANGEIRKRPLIETNGETGEIVWDKGRDFATVRKVLSMPQVNIVKKTEVQTGGFSKESILPKRNSDKLIARKKDWDPKKYGGFDSPTVAYSVLVVAKVEKGKSKKLKSVKELLGITIMERSSFEKNPIDFLEAKGYKEVKKDLIIKLPKYSLFELENGRKRMLASAGELQKGNELALPSKYVNFLYLASHYEKLKGSPEDNEQKQLFVEQHKHYLDEIIEQISEFSKRVILADANLDKVLSAYNKHRDKPIREQAENIIHLFTLTNLGAPAAFKYFDTTIDRKRYTSTKEVLDATLIHQSITGLYETRIDLSQLGGDGGSGGSSGGSSGSETPGTSESATPESSGGSSGGSSGGIPWLMKKPLQLTTLVPLQEYEERLLKQTMLTGSYKEKLQSLFLKYDALWQHWENQVGHRRIKPHHIATGTVNPRPQKQYPINPKAKASIQTVINDLLKQGVLIQQNSIMNTPVYPVPKPDGKWRMVLDYREVNKTIPLIAAQNQHSAGILSSIFRGKYKTTLDLSNGFWAHSITPESYWLTAFTWLGQQYCWTRLPQGFLNSPALFNADVVDLLKEVPNVQVYVDDIYISHDDPREHLEQLEKVFSLLLNAGYVVSLKKSEIAQHEVEFLGFNITKEGRGLTETFKQKLLNITPPRDLKQLQSILGKLNFARNFIPNFSELVKPLYNIIATAPGKYITWTTDNSQQLQNIISMLNSAENLEERNPEVRLIMKVNTSPSAGYIRFYNEFAKRPIMYLNYVYTKAEVKFTNTEKLLTTIHKGLIKALDLGMGQEILVYSPIVSMTKIQKTPLPERKALPIRWITWMSYLEDPRIQFHYDKTLPELQQVPTVTDDIIAKIKHPSEFSMVFYTDGSAIKHPNVNKSHNAGMGIAQVQFKPEFTVINTWSIPLGDHTAQLAEVAAVEFACKKALKIDGPVLIVTDSFYVAESVNKELPYWQSNGFFNNKKKPLKHVSKWKSIADCIQLKPDIIIIHEKGHQPTASTFHTEGNNLADKLATQGSYVVNAGKRTADGSEFEKRTADGSEFESPKKKAKVE

SEQ ID NO: 586 - protein, 2088 aa, synthetic construct
MPAAKRVKLDGGDKKYSIGLDIGTNSVGWAVITDEYKVPSKKFKVLGNTDRHSIKKNLIGALLFDSGETAEATRLKRTARRRYTRRKNRICYLQEIFSNEMAKVDDSFFHRLEESFLVEEDKKHERHPIFGNIVDEVAYHEKYPTIYHLRKKLVDSTDKADLRLIYLALAHMIKFRGHFLIEGDLNPDNSDVDKLFIQLVQTYNQLFEENPINASGVDAKAILSARLSKSRRLENLIAQLPGEKKNGLFGNLIALSLGLTPNFKSNFDLAEDAKLQLSKDTYDDDLDNLLAQIGDQYADLFLAAKNLSDAILLSDILRVNTEITKAPLSASMIKRYDEHHQDLTLLKALVRQQLPEKYKEIFFDQSKNGYAGYIDGGASQEEFYKFIKPILEKMDGTEELLVKLNREDLLRKQRTFDNGSIPHQIHLGELHAILRRQEDFYPFLKDNREKIEKILTFRIPYYVGPLARGNSRFAWMTRKSEETITPWNFEEVVDKGASAQSFIERMTNFDKNLPNEKVLPKHSLLYEYFTVYNELTKVKYVTEGMRKPAFLSGEQKKAIVDLLFKTNRKVTVKQLKEDYFKKIECFDSVEISGVEDRFNASLGTYHDLLKIIKDKDFLDNEENEDILEDIVLTLTLFEDREMIEERLKTYAHLFDDKVMKQLKRRRYTGWGRLSRKLINGIRDKQSGKTILDFLKSDGFANRNFMQLIHDDSLTFKEDIQKAQVSGQGDSLHEHIANLAGSPAIKKGILQTVKVVDELVKVMGRHKPENIVIEMARENQTTQKGQKNSRERMKRIEEGIKELGSQILKEHPVENTQLQNEKLYLYYLQNGRDMYVDQELDINRLSDYDVDHIVPQSFLKDDSIDNKVLTRSDKARGKSDNVPSEEVVKKMKNYWRQLLNAKLITQRKFDNLTKAERGGLSELDKAGFIKRQLVETRQITKHVAQILDSRMNTKYDENDKLIREVKVITLKSKLVSDFRKDFQFYKVREINNYHHAHDAYLNAVVGTALIKKYPKLESEFVYGDYKVYDVRKMIAKSEQEIGKATAKYFFYSNIMNFFKTEITLANGEIRKRPLIETNGETGEIVWDKGRDFATVRKVLSMPQVNIVKKTEVQTGGFSKESILPKRNSDKLIARKKDWDPKKYGGFDSPTVAYSVLVVAKVEKGKSKKLKSVKELLGITIMERSSFEKNPIDFLEAKGYKEVKKDLIIKLPKYSLFELENGRKRMLASAGELQKGNELALPSKYVNFLYLASHYEKLKGSPEDNEQKQLFVEQHKHYLDEIIEQISEFSKRVILADANLDKVLSAYNKHRDKPIREQAENIIHLFTLTNLGAPAAFKYFDTTIDRKRYTSTKEVLDATLIHQSITGLYETRIDLSQLGGDGGGSSGSSGSSGSSGGIPWLMKKPLQLTTLVPLQEYEERLLKQTMLTGSYKEKLQSLFLKYDALWQHWENQVGHRRIKPHHIATGTVNPRPQKQYPINPKAKASIQTVINDLLKQGVLIQQNSIMNTPVYPVPKPDGKWRMVLDYREVNKTIPLIAAQNQHSAGILSSIFRGKYKTTLDLSNGFWAHSITPESYWLTAFTWLGQQYCWTRLPQGFLNSPALFNADVVDLLKEVPNVQVYVDDIYISHDDPREHLEQLEKVFSLLLNAGYVVSLKKSEIAQHEVEFLGFNITKEGRGLTETFKQKLLNITPPRDLKQLQSILGKLNFARNFIPNFSELVKPLYNIIATAPGKYITWTTDNSQQLQNIISMLNSAENLEERNPEVRLIMKVNTSPSAGYIRFYNEFAKRPIMYLNYVYTKAEVKFTNTEKLLTTIHKGLIKALDLGMGQEILVYSPIVSMTKIQKTPLPERKALPIRWITWMSYLEDPRIQFHYDKTLPELQQVPTVTDDIIAKIKHPSEFSMVFYTDGSAIKHPNVNKSHNAGMGIAQVQFKPEFTVINTWSIPLGDHTAQLAEVAAVEFACKKALKIDGPVLIVTDSFYVAESVNKELPYWQSNGFFNNKKKPLKHVSKWKSIADCIQLKPDIIIIHEKGHQPTASTFHTEGNNLADKLATQGSYVVNAGKRTADGSEFEKRTADGSEFESPKKKAKVE

SEQ ID NO: 587 - protein, 2085 aa, synthetic construct
MPAAKRVKLDGGDKKYSIGLDIGTNSVGWAVITDEYKVPSKKFKVLGNTDRHSIKKNLIGALLFDSGETAEATRLKRTARRRYTRRKNRICYLQEIFSNEMAKVDDSFFHRLEESFLVEEDKKHERHPIFGNIVDEVAYHEKYPTIYHLRKKLVDSTDKADLRLIYLALAHMIKFRGHFLIEGDLNPDNSDVDKLFIQLVQTYNQLFEENPINASGVDAKAILSARLSKSRRLENLIAQLPGEKKNGLFGNLIALSLGLTPNFKSNFDLAEDAKLQLSKDTYDDDLDNLLAQIGDQYADLFLAAKNLSDAILLSDILRVNTEITKAPLSASMIKRYDEHHQDLTLLKALVRQQLPEKYKEIFFDQSKNGYAGYIDGGASQEEFYKFIKPILEKMDGTEELLVKLNREDLLRKQRTFDNGSIPHQIHLGELHAILRRQEDFYPFLKDNREKIEKILTFRIPYYVGPLARGNSRFAWMTRKSEETITPWNFEEVVDKGASAQSFIERMTNFDKNLPNEKVLPKHSLLYEYFTVYNELTKVKYVTEGMRKPAFLSGEQKKAIVDLLFKTNRKVTVKQLKEDYFKKIECFDSVEISGVEDRFNASLGTYHDLLKIIKDKDFLDNEENEDILEDIVLTLTLFEDREMIEERLKTYAHLFDDKVMKQLKRRRYTGWGRLSRKLINGIRDKQSGKTILDFLKSDGFANRNFMQLIHDDSLTFKEDIQKAQVSGQGDSLHEHIANLAGSPAIKKGILQTVKVVDELVKVMGRHKPENIVIEMARENQTTQKGQKNSRERMKRIEEGIKELGSQILKEHPVENTQLQNEKLYLYYLQNGRDMYVDQELDINRLSDYDVDHIVPQSFLKDDSIDNKVLTRSDKARGKSDNVPSEEVVKKMKNYWRQLLNAKLITQRKFDNLTKAERGGLSELDKAGFIKRQLVETRQITKHVAQILDSRMNTKYDENDKLIREVKVITLKSKLVSDFRKDFQFYKVREINNYHHAHDAYLNAVVGTALIKKYPKLESEFVYGDYKVYDVRKMIAKSEQEIGKATAKYFFYSNIMNFFKTEITLANGEIRKRPLIETNGETGEIVWDKGRDFATVRKVLSMPQVNIVKKTEVQTGGFSKESILPKRNSDKLIARKKDWDPKKYGGFDSPTVAYSVLVVAKVEKGKSKKLKSVKELLGITIMERSSFEKNPIDFLEAKGYKEVKKDLIIKLPKYSLFELENGRKRMLASAGELQKGNELALPSKYVNFLYLASHYEKLKGSPEDNEQKQLFVEQHKHYLDEIIEQISEFSKRVILADANLDKVLSAYNKHRDKPIREQAENIIHLFTLTNLGAPAAFKYFDTTIDRKRYTSTKEVLDATLIHQSITGLYETRIDLSQLGGDGGGSSGGSGGGGGIPWLMKKPLQLTTLVPLQEYEERLLKQTMLTGSYKEKLQSLFLKYDALWQHWENQVGHRRIKPHHIATGTVNPRPQKQYPINPKAKASIQTVINDLLKQGVLIQQNSIMNTPVYPVPKPDGKWRMVLDYREVNKTIPLIAAQNQHSAGILSSIFRGKYKTTLDLSNGFWAHSITPESYWLTAFTWLGQQYCWTRLPQGFLNSPALFNADVVDLLKEVPNVQVYVDDIYISHDDPREHLEQLEKVFSLLLNAGYVVSLKKSEIAQHEVEFLGFNITKEGRGLTETFKQKLLNITPPRDLKQLQSILGKLNFARNFIPNFSELVKPLYNIIATAPGKYITWTTDNSQQLQNIISMLNSAENLEERNPEVRLIMKVNTSPSAGYIRFYNEFAKRPIMYLNYVYTKAEVKFTNTEKLLTTIHKGLIKALDLGMGQEILVYSPIVSMTKIQKTPLPERKALPIRWITWMSYLEDPRIQFHYDKTLPELQQVPTVTDDIIAKIKHPSEFSMVFYTDGSAIKHPNVNKSHNAGMGIAQVQFKPEFTVINTWSIPLGDHTAQLAEVAAVEFACKKALKIDGPVLIVTDSFYVAESVNKELPYWQSNGFFNNKKKPLKHVSKWKSIADCIQLKPDIIIIHEKGHQPTASTFHTEGNNLADKLATQGSYVVNAGKRTADGSEFEKRTADGSEFESPKKKAKVE

SEQ ID NO: 588 - protein, 2084 aa, synthetic construct
MPAAKRVKLDGGDKKYSIGLDIGTNSVGWAVITDEYKVPSKKFKVLGNTDRHSIKKNLIGALLFDSGETAEATRLKRTARRRYTRRKNRICYLQEIFSNEMAKVDDSFFHRLEESFLVEEDKKHERHPIFGNIVDEVAYHEKYPTIYHLRKKLVDSTDKADLRLIYLALAHMIKFRGHFLIEGDLNPDNSDVDKLFIQLVQTYNQLFEENPINASGVDAKAILSARLSKSRRLENLIAQLPGEKKNGLFGNLIALSLGLTPNFKSNFDLAEDAKLQLSKDTYDDDLDNLLAQIGDQYADLFLAAKNLSDAILLSDILRVNTEITKAPLSASMIKRYDEHHQDLTLLKALVRQQLPEKYKEIFFDQSKNGYAGYIDGGASQEEFYKFIKPILEKMDGTEELLVKLNREDLLRKQRTFDNGSIPHQIHLGELHAILRRQEDFYPFLKDNREKIEKILTFRIPYYVGPLARGNSRFAWMTRKSEETITPWNFEEVVDKGASAQSFIERMTNFDKNLPNEKVLPKHSLLYEYFTVYNELTKVKYVTEGMRKPAFLSGEQKKAIVDLLFKTNRKVTVKQLKEDYFKKIECFDSVEISGVEDRFNASLGTYHDLLKIIKDKDFLDNEENEDILEDIVLTLTLFEDREMIEERLKTYAHLFDDKVMKQLKRRRYTGWGRLSRKLINGIRDKQSGKTILDFLKSDGFANRNFMQLIHDDSLTFKEDIQKAQVSGQGDSLHEHIANLAGSPAIKKGILQTVKVVDELVKVMGRHKPENIVIEMARENQTTQKGQKNSRERMKRIEEGIKELGSQILKEHPVENTQLQNEKLYLYYLQNGRDMYVDQELDINRLSDYDVDHIVPQSFLKDDSIDNKVLTRSDKARGKSDNVPSEEVVKKMKNYWRQLLNAKLITQRKFDNLTKAERGGLSELDKAGFIKRQLVETRQITKHVAQILDSRMNTKYDENDKLIREVKVITLKSKLVSDFRKDFQFYKVREINNYHHAHDAYLNAVVGTALIKKYPKLESEFVYGDYKVYDVRKMIAKSEQEIGKATAKYFFYSNIMNFFKTEITLANGEIRKRPLIETNGETGEIVWDKGRDFATVRKVLSMPQVNIVKKTEVQTGGFSKESILPKRNSDKLIARKKDWDPKKYGGFDSPTVAYSVLVVAKVEKGKSKKLKSVKELLGITIMERSSFEKNPIDFLEAKGYKEVKKDLIIKLPKYSLFELENGRKRMLASAGELQKGNELALPSKYVNFLYLASHYEKLKGSPEDNEQKQLFVEQHKHYLDEIIEQISEFSKRVILADANLDKVLSAYNKHRDKPIREQAENIIHLFTLTNLGAPAAFKYFDTTIDRKRYTSTKEVLDATLIHQSITGLYETRIDLSQLGGDGGGGGEAAAKGGIPWLMKKPLQLTTLVPLQEYEERLLKQTMLTGSYKEKLQSLFLKYDALWQHWENQVGHRRIKPHHIATGTVNPRPQKQYPINPKAKASIQTVINDLLKQGVLIQQNSIMNTPVYPVPKPDGKWRMVLDYREVNKTIPLIAAQNQHSAGILSSIFRGKYKTTLDLSNGFWAHSITPESYWLTAFTWLGQQYCWTRLPQGFLNSPALFNADVVDLLKEVPNVQVYVDDIYISHDDPREHLEQLEKVFSLLLNAGYVVSLKKSEIAQHEVEFLGFNITKEGRGLTETFKQKLLNITPPRDLKQLQSILGKLNFARNFIPNFSELVKPLYNIIATAPGKYITWTTDNSQQLQNIISMLNSAENLEERNPEVRLIMKVNTSPSAGYIRFYNEFAKRPIMYLNYVYTKAEVKFTNTEKLLTTIHKGLIKALDLGMGQEILVYSPIVSMTKIQKTPLPERKALPIRWITWMSYLEDPRIQFHYDKTLPELQQVPTVTDDIIAKIKHPSEFSMVFYTDGSAIKHPNVNKSHNAGMGIAQVQFKPEFTVINTWSIPLGDHTAQLAEVAAVEFACKKALKIDGPVLIVTDSFYVAESVNKELPYWQSNGFFNNKKKPLKHVSKWKSIADCIQLKPDIIIIHEKGHQPTASTFHTEGNNLADKLATQGSYVVNAGKRTADGSEFEKRTADGSEFESPKKKAKVE

SEQ ID NO: 589 - protein, 2085 aa, synthetic construct
MPAAKRVKLDGGDKKYSIGLDIGTNSVGWAVITDEYKVPSKKFKVLGNTDRHSIKKNLIGALLFDSGETAEATRLKRTARRRYTRRKNRICYLQEIFSNEMAKVDDSFFHRLEESFLVEEDKKHERHPIFGNIVDEVAYHEKYPTIYHLRKKLVDSTDKADLRLIYLALAHMIKFRGHFLIEGDLNPDNSDVDKLFIQLVQTYNQLFEENPINASGVDAKAILSARLSKSRRLENLIAQLPGEKKNGLFGNLIALSLGLTPNFKSNFDLAEDAKLQLSKDTYDDDLDNLLAQIGDQYADLFLAAKNLSDAILLSDILRVNTEITKAPLSASMIKRYDEHHQDLTLLKALVRQQLPEKYKEIFFDQSKNGYAGYIDGGASQEEFYKFIKPILEKMDGTEELLVKLNREDLLRKQRTFDNGSIPHQIHLGELHAILRRQEDFYPFLKDNREKIEKILTFRIPYYVGPLARGNSRFAWMTRKSEETITPWNFEEVVDKGASAQSFIERMTNFDKNLPNEKVLPKHSLLYEYFTVYNELTKVKYVTEGMRKPAFLSGEQKKAIVDLLFKTNRKVTVKQLKEDYFKKIECFDSVEISGVEDRFNASLGTYHDLLKIIKDKDFLDNEENEDILEDIVLTLTLFEDREMIEERLKTYAHLFDDKVMKQLKRRRYTGWGRLSRKLINGIRDKQSGKTILDFLKSDGFANRNFMQLIHDDSLTFKEDIQKAQVSGQGDSLHEHIANLAGSPAIKKGILQTVKVVDELVKVMGRHKPENIVIEMARENQTTQKGQKNSRERMKRIEEGIKELGSQILKEHPVENTQLQNEKLYLYYLQNGRDMYVDQELDINRLSDYDVDHIVPQSFLKDDSIDNKVLTRSDKARGKSDNVPSEEVVKKMKNYWRQLLNAKLITQRKFDNLTKAERGGLSELDKAGFIKRQLVETRQITKHVAQILDSRMNTKYDENDKLIREVKVITLKSKLVSDFRKDFQFYKVREINNYHHAHDAYLNAVVGTALIKKYPKLESEFVYGDYKVYDVRKMIAKSEQEIGKATAKYFFYSNIMNFFKTEITLANGEIRKRPLIETNGETGEIVWDKGRDFATVRKVLSMPQVNIVKKTEVQTGGFSKESILPKRNSDKLIARKKDWDPKKYGGFDSPTVAYSVLVVAKVEKGKSKKLKSVKELLGITIMERSSFEKNPIDFLEAKGYKEVKKDLIIKLPKYSLFELENGRKRMLASAGELQKGNELALPSKYVNFLYLASHYEKLKGSPEDNEQKQLFVEQHKHYLDEIIEQISEFSKRVILADANLDKVLSAYNKHRDKPIREQAENIIHLFTLTNLGAPAAFKYFDTTIDRKRYTSTKEVLDATLIHQSITGLYETRIDLSQLGGDGGGGSGSSPAPGGIPWLMKKPLQLTTLVPLQEYEERLLKQTMLTGSYKEKLQSLFLKYDALWQHWENQVGHRRIKPHHIATGTVNPRPQKQYPINPKAKASIQTVINDLLKQGVLIQQNSIMNTPVYPVPKPDGKWRMVLDYREVNKTIPLIAAQNQHSAGILSSIFRGKYKTTLDLSNGFWAHSITPESYWLTAFTWLGQQYCWTRLPQGFLNSPALFNADVVDLLKEVPNVQVYVDDIYISHDDPREHLEQLEKVFSLLLNAGYVVSLKKSEIAQHEVEFLGFNITKEGRGLTETFKQKLLNITPPRDLKQLQSILGKLNFARNFIPNFSELVKPLYNIIATAPGKYITWTTDNSQQLQNIISMLNSAENLEERNPEVRLIMKVNTSPSAGYIRFYNEFAKRPIMYLNYVYTKAEVKFTNTEKLLTTIHKGLIKALDLGMGQEILVYSPIVSMTKIQKTPLPERKALPIRWITWMSYLEDPRIQFHYDKTLPELQQVPTVTDDIIAKIKHPSEFSMVFYTDGSAIKHPNVNKSHNAGMGIAQVQFKPEFTVINTWSIPLGDHTAQLAEVAAVEFACKKALKIDGPVLIVTDSFYVAESVNKELPYWQSNGFFNNKKKPLKHVSKWKSIADCIQLKPDIIIIHEKGHQPTASTFHTEGNNLADKLATQGSYVVNAGKRTADGSEFEKRTADGSEFESPKKKAKVE

SEQ ID NO: 590 - protein, 2195 aa, synthetic construct
MPAAKRVKLDGGDKKYSIGLDIGTNSVGWAVITDEYKVPSKKFKVLGNTDRHSIKKNLIGALLFDSGETAEATRLKRTARRRYTRRKNRICYLQEIFSNEMAKVDDSFFHRLEESFLVEEDKKHERHPIFGNIVDEVAYHEKYPTIYHLRKKLVDSTDKADLRLIYLALAHMIKFRGHFLIEGDLNPDNSDVDKLFIQLVQTYNQLFEENPINASGVDAKAILSARLSKSRRLENLIAQLPGEKKNGLFGNLIALSLGLTPNFKSNFDLAEDAKLQLSKDTYDDDLDNLLAQIGDQYADLFLAAKNLSDAILLSDILRVNTEITKAPLSASMIKRYDEHHQDLTLLKALVRQQLPEKYKEIFFDQSKNGYAGYIDGGASQEEFYKFIKPILEKMDGTEELLVKLNREDLLRKQRTFDNGSIPHQIHLGELHAILRRQEDFYPFLKDNREKIEKILTFRIPYYVGPLARGNSRFAWMTRKSEETITPWNFEEVVDKGASAQSFIERMTNFDKNLPNEKVLPKHSLLYEYFTVYNELTKVKYVTEGMRKPAFLSGEQKKAIVDLLFKTNRKVTVKQLKEDYFKKIECFDSVEISGVEDRFNASLGTYHDLLKIIKDKDFLDNEENEDILEDIVLTLTLFEDREMIEERLKTYAHLFDDKVMKQLKRRRYTGWGRLSRKLINGIRDKQSGKTILDFLKSDGFANRNFMQLIHDDSLTFKEDIQKAQVSGQGDSLHEHIANLAGSPAIKKGILQTVKVVDELVKVMGRHKPENIVIEMARENQTTQKGQKNSRERMKRIEEGIKELGSQILKEHPVENTQLQNEKLYLYYLQNGRDMYVDQELDINRLSDYDVDHIVPQSFLKDDSIDNKVLTRSDKARGKSDNVPSEEVVKKMKNYWRQLLNAKLITQRKFDNLTKAERGGLSELDKAGFIKRQLVETRQITKHVAQILDSRMNTKYDENDKLIREVKVITLKSKLVSDFRKDFQFYKVREINNYHHAHDAYLNAVVGTALIKKYPKLESEFVYGDYKVYDVRKMIAKSEQEIGKATAKYFFYSNIMNFFKTEITLANGEIRKRPLIETNGETGEIVWDKGRDFATVRKVLSMPQVNIVKKTEVQTGGFSKESILPKRNSDKLIARKKDWDPKKYGGFDSPTVAYSVLVVAKVEKGKSKKLKSVKELLGITIMERSSFEKNPIDFLEAKGYKEVKKDLIIKLPKYSLFELENGRKRMLASAGELQKGNELALPSKYVNFLYLASHYEKLKGSPEDNEQKQLFVEQHKHYLDEIIEQISEFSKRVILADANLDKVLSAYNKHRDKPIREQAENIIHLFTLTNLGAPAAFKYFDTTIDRKRYTSTKEVLDATLIHQSITGLYETRIDLSQLGGDGGEAAAKEAAAKEAAAKEAAAKEAAAKEAAAKGGMDPLQLLQPLEAEIKGTKLKAHWNSGATITCVPQAFLEEEVPIKNIWIKTIHGEKEQPVYYLTFKIQGRKVEAEVISSPYDYILVSPSDIPWLMKKPLQLTTLVPLQEYEERLLKQTMLTGSYKEKLQSLFLKYDALWQHWENQVGHRRIKPHHIATGTVNPRPQKQYPINPKAKASIQTVINDLLKQGVLIQQNSIMNTPVYPVPKPDGKWRMVLDYREVNKTIPLIAAQNQHSAGILSSIFRGKYKTTLDLSNGFWAHSITPESYWLTAFTWLGQQYCWTRLPQGFLNSPALFNADVVDLLKEVPNVQVYVDDIYISHDDPREHLEQLEKVFSLLLNAGYVVSLKKSEIAQHEVEFLGFNITKEGRGLTETFKQKLLNITPPRDLKQLQSILGLLNFARNFIPNFSELVKPLYNIIATAPGKYITWTTDNSQQLQNIISMLNSAENLEERNPEVRLIMKVNTSPSAGYIRFYNEFAKRPIMYLNYVYTKAEVKFTNTEKLLTTIHKGLIKALDLGMGQEILVYSPIVSMTKIQKTPLPERKALPIRWITWMSYLEDPRIQFHYDKTLPELQQVPTVTDDIIAKIKHPSEFSMVFYTDGSAIKHPNVNKSHNAGMGIAQVQFKPEFTVINTWSIPLGDHTAQLAEVAAVEFACKKALKIDGPVLIVTDSFYVAESVNKELPYWQSNGFFNNKKKPLKHVSKWKSIADCIQLKPDIIIIHEKGHQPTASTFHTEGNNLADKLATQGSYVVNAGKRTADGSEFEKRTADGSEFESPKKKAKVE

SEQ ID NO: 591 - protein, 2211 aa, synthetic construct
MPAAKRVKLDGGDKKYSIGLDIGTNSVGWAVITDEYKVPSKKFKVLGNTDRHSIKKNLIGALLFDSGETAEATRLKRTARRRYTRRKNRICYLQEIFSNEMAKVDDSFFHRLEESFLVEEDKKHERHPIFGNIVDEVAYHEKYPTIYHLRKKLVDSTDKADLRLIYLALAHMIKFRGHFLIEGDLNPDNSDVDKLFIQLVQTYNQLFEENPINASGVDAKAILSARLSKSRRLENLIAQLPGEKKNGLFGNLIALSLGLTPNFKSNFDLAEDAKLQLSKDTYDDDLDNLLAQIGDQYADLFLAAKNLSDAILLSDILRVNTEITKAPLSASMIKRYDEHHQDLTLLKALVRQQLPEKYKEIFFDQSKNGYAGYIDGGASQEEFYKFIKPILEKMDGTEELLVKLNREDLLRKQRTFDNGSIPHQIHLGELHAILRRQEDFYPFLKDNREKIEKILTFRIPYYVGPLARGNSRFAWMTRKSEETITPWNFEEVVDKGASAQSFIERMTNFDKNLPNEKVLPKHSLLYEYFTVYNELTKVKYVTEGMRKPAFLSGEQKKAIVDLLFKTNRKVTVKQLKEDYFKKIECFDSVEISGVEDRFNASLGTYHDLLKIIKDKDFLDNEENEDILEDIVLTLTLFEDREMIEERLKTYAHLFDDKVMKQLKRRRYTGWGRLSRKLINGIRDKQSGKTILDFLKSDGFANRNFMQLIHDDSLTFKEDIQKAQVSGQGDSLHEHIANLAGSPAIKKGILQTVKVVDELVKVMGRHKPENIVIEMARENQTTQKGQKNSRERMKRIEEGIKELGSQILKEHPVENTQLQNEKLYLYYLQNGRDMYVDQELDINRLSDYDVDHIVPQSFLKDDSIDNKVLTRSDKARGKSDNVPSEEVVKKMKNYWRQLLNAKLITQRKFDNLTKAERGGLSELDKAGFIKRQLVETRQITKHVAQILDSRMNTKYDENDKLIREVKVITLKSKLVSDFRKDFQFYKVREINNYHHAHDAYLNAVVGTALIKKYPKLESEFVYGDYKVYDVRKMIAKSEQEIGKATAKYFFYSNIMNFFKTEITLANGEIRKRPLIETNGETGEIVWDKGRDFATVRKVLSMPQVNIVKKTEVQTGGFSKESILPKRNSDKLIARKKDWDPKKYGGFDSPTVAYSVLVVAKVEKGKSKKLKSVKELLGITIMERSSFEKNPIDFLEAKGYKEVKKDLIIKLPKYSLFELENGRKRMLASAGELQKGNELALPSKYVNFLYLASHYEKLKGSPEDNEQKQLFVEQHKHYLDEIIEQISEFSKRVILADANLDKVLSAYNKHRDKPIREQAENIIHLFTLTNLGAPAAFKYFDTTIDRKRYTSTKEVLDATLIHQSITGLYETRIDLSQLGGDGGAEAAAKEAAAKEAAAKEAAAKALEAEAAAKEAAAKEAAAKEAAAKAGGMDPLQLLQPLEAEIKGTKLKAHWNSGATITCVPQAFLEEEVPIKNIWIKTIHGEKEQPVYYLTFKIQGRKVEAEVISSPYDYILVSPSDIPWLMKKPLQLTTLVPLQEYEERLLKQTMLTGSYKEKLQSLFLKYDALWQHWENQVGHRRIKPHHIATGTVNPRPQKQYPINPKAKASIQTVINDLLKQGVLIQQNSIMNTPVYPVPKPDGKWRMVLDYREVNKTIPLIAAQNQHSAGILSSIFRGKYKTTLDLSNGFWAHSITPESYWLTAFTWLGQQYCWTRLPQGFLNSPALFNADVVDLLKEVPNVQVYVDDIYISHDDPREHLEQLEKVFSLLLNAGYVVSLKKSEIAQHEVEFLGFNITKEGRGLTETFKQKLLNITPPRDLKQLQSILGLLNFARNFIPNFSELVKPLYNIIATAPGKYITWTTDNSQQLQNIISMLNSAENLEERNPEVRLIMKVNTSPSAGYIRFYNEFAKRPIMYLNYVYTKAEVKFTNTEKLLTTIHKGLIKALDLGMGQEILVYSPIVSMTKIQKTPLPERKALPIRWITWMSYLEDPRIQFHYDKTLPELQQVPTVTDDIIAKIKHPSEFSMVFYTDGSAIKHPNVNKSHNAGMGIAQVQFKPEFTVINTWSIPLGDHTAQLAEVAAVEFACKKALKIDGPVLIVTDSFYVAESVNKELPYWQSNGFFNNKKKPLKHVSKWKSIADCIQLKPDIIIIHEKGHQPTASTFHTEGNNLADKLATQGSYVVNAGKRTADGSEFEKRTADGSEFESPKKKAKVE

SEQ ID NO: 592 - protein, 2195 aa, synthetic construct
MPAAKRVKLDGGDKKYSIGLDIGTNSVGWAVITDEYKVPSKKFKVLGNTDRHSIKKNLIGALLFDSGETAEATRLKRTARRRYTRRKNRICYLQEIFSNEMAKVDDSFFHRLEESFLVEEDKKHERHPIFGNIVDEVAYHEKYPTIYHLRKKLVDSTDKADLRLIYLALAHMIKFRGHFLIEGDLNPDNSDVDKLFIQLVQTYNQLFEENPINASGVDAKAILSARLSKSRRLENLIAQLPGEKKNGLFGNLIALSLGLTPNFKSNFDLAEDAKLQLSKDTYDDDLDNLLAQIGDQYADLFLAAKNLSDAILLSDILRVNTEITKAPLSASMIKRYDEHHQDLTLLKALVRQQLPEKYKEIFFDQSKNGYAGYIDGGASQEEFYKFIKPILEKMDGTEELLVKLNREDLLRKQRTFDNGSIPHQIHLGELHAILRRQEDFYPFLKDNREKIEKILTFRIPYYVGPLARGNSRFAWMTRKSEETITPWNFEEVVDKGASAQSFIERMTNFDKNLPNEKVLPKHSLLYEYFTVYNELTKVKYVTEGMRKPAFLSGEQKKAIVDLLFKTNRKVTVKQLKEDYFKKIECFDSVEISGVEDRFNASLGTYHDLLKIIKDKDFLDNEENEDILEDIVLTLTLFEDREMIEERLKTYAHLFDDKVMKQLKRRRYTGWGRLSRKLINGIRDKQSGKTILDFLKSDGFANRNFMQLIHDDSLTFKEDIQKAQVSGQGDSLHEHIANLAGSPAIKKGILQTVKVVDELVKVMGRHKPENIVIEMARENQTTQKGQKNSRERMKRIEEGIKELGSQILKEHPVENTQLQNEKLYLYYLQNGRDMYVDQELDINRLSDYDVDHIVPQSFLKDDSIDNKVLTRSDKARGKSDNVPSEEVVKKMKNYWRQLLNAKLITQRKFDNLTKAERGGLSELDKAGFIKRQLVETRQITKHVAQILDSRMNTKYDENDKLIREVKVITLKSKLVSDFRKDFQFYKVREINNYHHAHDAYLNAVVGTALIKKYPKLESEFVYGDYKVYDVRKMIAKSEQEIGKATAKYFFYSNIMNFFKTEITLANGEIRKRPLIETNGETGEIVWDKGRDFATVRKVLSMPQVNIVKKTEVQTGGFSKESILPKRNSDKLIARKKDWDPKKYGGFDSPTVAYSVLVVAKVEKGKSKKLKSVKELLGITIMERSSFEKNPIDFLEAKGYKEVKKDLIIKLPKYSLFELENGRKRMLASAGELQKGNELALPSKYVNFLYLASHYEKLKGSPEDNEQKQLFVEQHKHYLDEIIEQISEFSKRVILADANLDKVLSAYNKHRDKPIREQAENIIHLFTLTNLGAPAAFKYFDTTIDRKRYTSTKEVLDATLIHQSITGLYETRIDLSQLGGDGGGGGGSGGGGSGGGGSGGGGSGGGGSGGGGSGGMDPLQLLQPLEAEIKGTKLKAHWNSGATITCVPQAFLEEEVPIKNIWIKTIHGEKEQPVYYLTFKIQGRKVEAEVISSPYDYILVSPSDIPWLMKKPLQLTTLVPLQEYEERLLKQTMLTGSYKEKLQSLFLKYDALWQHWENQVGHRRIKPHHIATGTVNPRPQKQYPINPKAKASIQTVINDLLKQGVLIQQNSIMNTPVYPVPKPDGKWRMVLDYREVNKTIPLIAAQNQHSAGILSSIFRGKYKTTLDLSNGFWAHSITPESYWLTAFTWLGQQYCWTRLPQGFLNSPALFNADVVDLLKEVPNVQVYVDDIYISHDDPREHLEQLEKVFSLLLNAGYVVSLKKSEIAQHEVEFLGFNITKEGRGLTETFKQKLLNITPPRDLKQLQSILGLLNFARNFIPNFSELVKPLYNIIATAPGKYITWTTDNSQQLQNIISMLNSAENLEERNPEVRLIMKVNTSPSAGYIRFYNEFAKRPIMYLNYVYTKAEVKFTNTEKLLTTIHKGLIKALDLGMGQEILVYSPIVSMTKIQKTPLPERKALPIRWITWMSYLEDPRIQFHYDKTLPELQQVPTVTDDIIAKIKHPSEFSMVFYTDGSAIKHPNVNKSHNAGMGIAQVQFKPEFTVINTWSIPLGDHTAQLAEVAAVEFACKKALKIDGPVLIVTDSFYVAESVNKELPYWQSNGFFNNKKKPLKHVSKWKSIADCIQLKPDIIIIHEKGHQPTASTFHTEGNNLADKLATQGSYVVNAGKRTADGSEFEKRTADGSEFESPKKKAKVE

SEQ ID NO: 593 - protein, 2190 aa, synthetic construct
MPAAKRVKLDGGDKKYSIGLDIGTNSVGWAVITDEYKVPSKKFKVLGNTDRHSIKKNLIGALLFDSGETAEATRLKRTARRRYTRRKNRICYLQEIFSNEMAKVDDSFFHRLEESFLVEEDKKHERHPIFGNIVDEVAYHEKYPTIYHLRKKLVDSTDKADLRLIYLALAHMIKFRGHFLIEGDLNPDNSDVDKLFIQLVQTYNQLFEENPINASGVDAKAILSARLSKSRRLENLIAQLPGEKKNGLFGNLIALSLGLTPNFKSNFDLAEDAKLQLSKDTYDDDLDNLLAQIGDQYADLFLAAKNLSDAILLSDILRVNTEITKAPLSASMIKRYDEHHQDLTLLKALVRQQLPEKYKEIFFDQSKNGYAGYIDGGASQEEFYKFIKPILEKMDGTEELLVKLNREDLLRKQRTFDNGSIPHQIHLGELHAILRRQEDFYPFLKDNREKIEKILTFRIPYYVGPLARGNSRFAWMTRKSEETITPWNFEEVVDKGASAQSFIERMTNFDKNLPNEKVLPKHSLLYEYFTVYNELTKVKYVTEGMRKPAFLSGEQKKAIVDLLFKTNRKVTVKQLKEDYFKKIECFDSVEISGVEDRFNASLGTYHDLLKIIKDKDFLDNEENEDILEDIVLTLTLFEDREMIEERLKTYAHLFDDKVMKQLKRRRYTGWGRLSRKLINGIRDKQSGKTILDFLKSDGFANRNFMQLIHDDSLTFKEDIQKAQVSGQGDSLHEHIANLAGSPAIKKGILQTVKVVDELVKVMGRHKPENIVIEMARENQTTQKGQKNSRERMKRIEEGIKELGSQILKEHPVENTQLQNEKLYLYYLQNGRDMYVDQELDINRLSDYDVDHIVPQSFLKDDSIDNKVLTRSDKARGKSDNVPSEEVVKKMKNYWRQLLNAKLITQRKFDNLTKAERGGLSELDKAGFIKRQLVETRQITKHVAQILDSRMNTKYDENDKLIREVKVITLKSKLVSDFRKDFQFYKVREINNYHHAHDAYLNAVVGTALIKKYPKLESEFVYGDYKVYDVRKMIAKSEQEIGKATAKYFFYSNIMNFFKTEITLANGEIRKRPLIETNGETGEIVWDKGRDFATVRKVLSMPQVNIVKKTEVQTGGFSKESILPKRNSDKLIARKKDWDPKKYGGFDSPTVAYSVLVVAKVEKGKSKKLKSVKELLGITIMERSSFEKNPIDFLEAKGYKEVKKDLIIKLPKYSLFELENGRKRMLASAGELQKGNELALPSKYVNFLYLASHYEKLKGSPEDNEQKQLFVEQHKHYLDEIIEQISEFSKRVILADANLDKVLSAYNKHRDKPIREQAENIIHLFTLTNLGAPAAFKYFDTTIDRKRYTSTKEVLDATLIHQSITGLYETRIDLSQLGGDGGEAAAKEAAAKEAAAKEAAAKEAAAKGGMDPLQLLQPLEAEIKGTKLKAHWNSGATITCVPQAFLEEEVPIKNIWIKTIHGEKEQPVYYLTFKIQGRKVEAEVISSPYDYILVSPSDIPWLMKKPLQLTTLVPLQEYEERLLKQTMLTGSYKEKLQSLFLKYDALWQHWENQVGHRRIKPHHIATGTVNPRPQKQYPINPKAKASIQTVINDLLKQGVLIQQNSIMNTPVYPVPKPDGKWRMVLDYREVNKTIPLIAAQNQHSAGILSSIFRGKYKTTLDLSNGFWAHSITPESYWLTAFTWLGQQYCWTRLPQGFLNSPALFNADVVDLLKEVPNVQVYVDDIYISHDDPREHLEQLEKVFSLLLNAGYVVSLKKSEIAQHEVEFLGFNITKEGRGLTETFKQKLLNITPPRDLKQLQSILGLLNFARNFIPNFSELVKPLYNIIATAPGKYITWTTDNSQQLQNIISMLNSAENLEERNPEVRLIMKVNTSPSAGYIRFYNEFAKRPIMYLNYVYTKAEVKFTNTEKLLTTIHKGLIKALDLGMGQEILVYSPIVSMTKIQKTPLPERKALPIRWITWMSYLEDPRIQFHYDKTLPELQQVPTVTDDIIAKIKHPSEFSMVFYTDGSAIKHPNVNKSHNAGMGIAQVQFKPEFTVINTWSIPLGDHTAQLAEVAAVEFACKKALKIDGPVLIVTDSFYVAESVNKELPYWQSNGFFNNKKKPLKHVSKWKSIADCIQLKPDIIIIHEKGHQPTASTFHTEGNNLADKLATQGSYVVNAGKRTADGSEFEKRTADGSEFESPKKKAKVE

SEQ ID NO: 594 - protein, 2174 aa, synthetic construct
MPAAKRVKLDGGDKKYSIGLDIGTNSVGWAVITDEYKVPSKKFKVLGNTDRHSIKKNLIGALLFDSGETAEATRLKRTARRRYTRRKNRICYLQEIFSNEMAKVDDSFFHRLEESFLVEEDKKHERHPIFGNIVDEVAYHEKYPTIYHLRKKLVDSTDKADLRLIYLALAHMIKFRGHFLIEGDLNPDNSDVDKLFIQLVQTYNQLFEENPINASGVDAKAILSARLSKSRRLENLIAQLPGEKKNGLFGNLIALSLGLTPNFKSNFDLAEDAKLQLSKDTYDDDLDNLLAQIGDQYADLFLAAKNLSDAILLSDILRVNTEITKAPLSASMIKRYDEHHQDLTLLKALVRQQLPEKYKEIFFDQSKNGYAGYIDGGASQEEFYKFIKPILEKMDGTEELLVKLNREDLLRKQRTFDNGSIPHQIHLGELHAILRRQEDFYPFLKDNREKIEKILTFRIPYYVGPLARGNSRFAWMTRKSEETITPWNFEEVVDKGASAQSFIERMTNFDKNLPNEKVLPKHSLLYEYFTVYNELTKVKYVTEGMRKPAFLSGEQKKAIVDLLFKTNRKVTVKQLKEDYFKKIECFDSVEISGVEDRFNASLGTYHDLLKIIKDKDFLDNEENEDILEDIVLTLTLFEDREMIEERLKTYAHLFDDKVMKQLKRRRYTGWGRLSRKLINGIRDKQSGKTILDFLKSDGFANRNFMQLIHDDSLTFKEDIQKAQVSGQGDSLHEHIANLAGSPAIKKGILQTVKVVDELVKVMGRHKPENIVIEMARENQTTQKGQKNSRERMKRIEEGIKELGSQILKEHPVENTQLQNEKLYLYYLQNGRDMYVDQELDINRLSDYDVDHIVPQSFLKDDSIDNKVLTRSDKARGKSDNVPSEEVVKKMKNYWRQLLNAKLITQRKFDNLTKAERGGLSELDKAGFIKRQLVETRQITKHVAQILDSRMNTKYDENDKLIREVKVITLKSKLVSDFRKDFQFYKVREINNYHHAHDAYLNAVVGTALIKKYPKLESEFVYGDYKVYDVRKMIAKSEQEIGKATAKYFFYSNIMNFFKTEITLANGEIRKRPLIETNGETGEIVWDKGRDFATVRKVLSMPQVNIVKKTEVQTGGFSKESILPKRNSDKLIARKKDWDPKKYGGFDSPTVAYSVLVVAKVEKGKSKKLKSVKELLGITIMERSSFEKNPIDFLEAKGYKEVKKDLIIKLPKYSLFELENGRKRMLASAGELQKGNELALPSKYVNFLYLASHYEKLKGSPEDNEQKQLFVEQHKHYLDEIIEQISEFSKRVILADANLDKVLSAYNKHRDKPIREQAENIIHLFTLTNLGAPAAFKYFDTTIDRKRYTSTKEVLDATLIHQSITGLYETRIDLSQLGGDGGGGGPAPGGSGGMDPLQLLQPLEAEIKGTKLKAHWNSGATITCVPQAFLEEEVPIKNIWIKTIHGEKEQPVYYLTFKIQGRKVEAEVISSPYDYILVSPSDIPWLMKKPLQLTTLVPLQEYEERLLKQTMLTGSYKEKLQSLFLKYDALWQHWENQVGHRRIKPHHIATGTVNPRPQKQYPINPKAKASIQTVINDLLKQGVLIQQNSIMNTPVYPVPKPDGKWRMVLDYREVNKTIPLIAAQNQHSAGILSSIFRGKYKTTLDLSNGFWAHSITPESYWLTAFTWLGQQYCWTRLPQGFLNSPALFNADVVDLLKEVPNVQVYVDDIYISHDDPREHLEQLEKVFSLLLNAGYVVSLKKSEIAQHEVEFLGFNITKEGRGLTETFKQKLLNITPPRDLKQLQSILGLLNFARNFIPNFSELVKPLYNIIATAPGKYITWTTDNSQQLQNIISMLNSAENLEERNPEVRLIMKVNTSPSAGYIRFYNEFAKRPIMYLNYVYTKAEVKFTNTEKLLTTIHKGLIKALDLGMGQEILVYSPIVSMTKIQKTPLPERKALPIRWITWMSYLEDPRIQFHYDKTLPELQQVPTVTDDIIAKIKHPSEFSMVFYTDGSAIKHPNVNKSHNAGMGIAQVQFKPEFTVINTWSIPLGDHTAQLAEVAAVEFACKKALKIDGPVLIVTDSFYVAESVNKELPYWQSNGFFNNKKKPLKHVSKWKSIADCIQLKPDIIIIHEKGHQPTASTFHTEGNNLADKLATQGSYVVNAGKRTADGSEFEKRTADGSEFESPKKKAKVE

SEQ ID NO: 595 - protein, 2176 aa, synthetic construct
MPAAKRVKLDGGDKKYSIGLDIGTNSVGWAVITDEYKVPSKKFKVLGNTDRHSIKKNLIGALLFDSGETAEATRLKRTARRRYTRRKNRICYLQEIFSNEMAKVDDSFFHRLEESFLVEEDKKHERHPIFGNIVDEVAYHEKYPTIYHLRKKLVDSTDKADLRLIYLALAHMIKFRGHFLIEGDLNPDNSDVDKLFIQLVQTYNQLFEENPINASGVDAKAILSARLSKSRRLENLIAQLPGEKKNGLFGNLIALSLGLTPNFKSNFDLAEDAKLQLSKDTYDDDLDNLLAQIGDQYADLFLAAKNLSDAILLSDILRVNTEITKAPLSASMIKRYDEHHQDLTLLKALVRQQLPEKYKEIFFDQSKNGYAGYIDGGASQEEFYKFIKPILEKMDGTEELLVKLNREDLLRKQRTFDNGSIPHQIHLGELHAILRRQEDFYPFLKDNREKIEKILTFRIPYYVGPLARGNSRFAWMTRKSEETITPWNFEEVVDKGASAQSFIERMTNFDKNLPNEKVLPKHSLLYEYFTVYNELTKVKYVTEGMRKPAFLSGEQKKAIVDLLFKTNRKVTVKQLKEDYFKKIECFDSVEISGVEDRFNASLGTYHDLLKIIKDKDFLDNEENEDILEDIVLTLTLFEDREMIEERLKTYAHLFDDKVMKQLKRRRYTGWGRLSRKLINGIRDKQSGKTILDFLKSDGFANRNFMQLIHDDSLTFKEDIQKAQVSGQGDSLHEHIANLAGSPAIKKGILQTVKVVDELVKVMGRHKPENIVIEMARENQTTQKGQKNSRERMKRIEEGIKELGSQILKEHPVENTQLQNEKLYLYYLQNGRDMYVDQELDINRLSDYDVDHIVPQSFLKDDSIDNKVLTRSDKARGKSDNVPSEEVVKKMKNYWRQLLNAKLITQRKFDNLTKAERGGLSELDKAGFIKRQLVETRQITKHVAQILDSRMNTKYDENDKLIREVKVITLKSKLVSDFRKDFQFYKVREINNYHHAHDAYLNAVVGTALIKKYPKLESEFVYGDYKVYDVRKMIAKSEQEIGKATAKYFFYSNIMNFFKTEITLANGEIRKRPLIETNGETGEIVWDKGRDFATVRKVLSMPQVNIVKKTEVQTGGFSKESILPKRNSDKLIARKKDWDPKKYGGFDSPTVAYSVLVVAKVEKGKSKKLKSVKELLGITIMERSSFEKNPIDFLEAKGYKEVKKDLIIKLPKYSLFELENGRKRMLASAGELQKGNELALPSKYVNFLYLASHYEKLKGSPEDNEQKQLFVEQHKHYLDEIIEQISEFSKRVILADANLDKVLSAYNKHRDKPIREQAENIIHLFTLTNLGAPAAFKYFDTTIDRKRYTSTKEVLDATLIHQSITGLYETRIDLSQLGGDGGGGSEAAAKPAPGGMDPLQLLQPLEAEIKGTKLKAHWNSGATITCVPQAFLEEEVPIKNIWIKTIHGEKEQPVYYLTFKIQGRKVEAEVISSPYDYILVSPSDIPWLMKKPLQLTTLVPLQEYEERLLKQTMLTGSYKEKLQSLFLKYDALWQHWENQVGHRRIKPHHIATGTVNPRPQKQYPINPKAKASIQTVINDLLKQGVLIQQNSIMNTPVYPVPKPDGKWRMVLDYREVNKTIPLIAAQNQHSAGILSSIFRGKYKTTLDLSNGFWAHSITPESYWLTAFTWLGQQYCWTRLPQGFLNSPALFNADVVDLLKEVPNVQVYVDDIYISHDDPREHLEQLEKVFSLLLNAGYVVSLKKSEIAQHEVEFLGFNITKEGRGLTETFKQKLLNITPPRDLKQLQSILGLLNFARNFIPNFSELVKPLYNIIATAPGKYITWTTDNSQQLQNIISMLNSAENLEERNPEVRLIMKVNTSPSAGYIRFYNEFAKRPIMYLNYVYTKAEVKFTNTEKLLTTIHKGLIKALDLGMGQEILVYSPIVSMTKIQKTPLPERKALPIRWITWMSYLEDPRIQFHYDKTLPELQQVPTVTDDIIAKIKHPSEFSMVFYTDGSAIKHPNVNKSHNAGMGIAQVQFKPEFTVINTWSIPLGDHTAQLAEVAAVEFACKKALKIDGPVLIVTDSFYVAESVNKELPYWQSNGFFNNKKKPLKHVSKWKSIADCIQLKPDIIIIHEKGHQPTASTFHTEGNNLADKLATQGSYVVNAGKRTADGSEFEKRTADGSEFESPKKKAKVE

SEQ ID NO: 596 - protein, 2180 aa, synthetic construct
MPAAKRVKLDGGDKKYSIGLDIGTNSVGWAVITDEYKVPSKKFKVLGNTDRHSIKKNLIGALLFDSGETAEATRLKRTARRRYTRRKNRICYLQEIFSNEMAKVDDSFFHRLEESFLVEEDKKHERHPIFGNIVDEVAYHEKYPTIYHLRKKLVDSTDKADLRLIYLALAHMIKFRGHFLIEGDLNPDNSDVDKLFIQLVQTYNQLFEENPINASGVDAKAILSARLSKSRRLENLIAQLPGEKKNGLFGNLIALSLGLTPNFKSNFDLAEDAKLQLSKDTYDDDLDNLLAQIGDQYADLFLAAKNLSDAILLSDILRVNTEITKAPLSASMIKRYDEHHQDLTLLKALVRQQLPEKYKEIFFDQSKNGYAGYIDGGASQEEFYKFIKPILEKMDGTEELLVKLNREDLLRKQRTFDNGSIPHQIHLGELHAILRRQEDFYPFLKDNREKIEKILTFRIPYYVGPLARGNSRFAWMTRKSEETITPWNFEEVVDKGASAQSFIERMTNFDKNLPNEKVLPKHSLLYEYFTVYNELTKVKYVTEGMRKPAFLSGEQKKAIVDLLFKTNRKVTVKQLKEDYFKKIECFDSVEISGVEDRFNASLGTYHDLLKIIKDKDFLDNEENEDILEDIVLTLTLFEDREMIEERLKTYAHLFDDKVMKQLKRRRYTGWGRLSRKLINGIRDKQSGKTILDFLKSDGFANRNFMQLIHDDSLTFKEDIQKAQVSGQGDSLHEHIANLAGSPAIKKGILQTVKVVDELVKVMGRHKPENIVIEMARENQTTQKGQKNSRERMKRIEEGIKELGSQILKEHPVENTQLQNEKLYLYYLQNGRDMYVDQELDINRLSDYDVDHIVPQSFLKDDSIDNKVLTRSDKARGKSDNVPSEEVVKKMKNYWRQLLNAKLITQRKFDNLTKAERGGLSELDKAGFIKRQLVETRQITKHVAQILDSRMNTKYDENDKLIREVKVITLKSKLVSDFRKDFQFYKVREINNYHHAHDAYLNAVVGTALIKKYPKLESEFVYGDYKVYDVRKMIAKSEQEIGKATAKYFFYSNIMNFFKTEITLANGEIRKRPLIETNGETGEIVWDKGRDFATVRKVLSMPQVNIVKKTEVQTGGFSKESILPKRNSDKLIARKKDWDPKKYGGFDSPTVAYSVLVVAKVEKGKSKKLKSVKELLGITIMERSSFEKNPIDFLEAKGYKEVKKDLIIKLPKYSLFELENGRKRMLASAGELQKGNELALPSKYVNFLYLASHYEKLKGSPEDNEQKQLFVEQHKHYLDEIIEQISEFSKRVILADANLDKVLSAYNKHRDKPIREQAENIIHLFTLTNLGAPAAFKYFDTTIDRKRYTSTKEVLDATLIHQSITGLYETRIDLSQLGGDGGEAAAKGGGGSEAAAKGGMDPLQLLQPLEAEIKGTKLKAHWNSGATITCVPQAFLEEEVPIKNIWIKTIHGEKEQPVYYLTFKIQGRKVEAEVISSPYDYILVSPSDIPWLMKKPLQLTTLVPLQEYEERLLKQTMLTGSYKEKLQSLFLKYDALWQHWENQVGHRRIKPHHIATGTVNPRPQKQYPINPKAKASIQTVINDLLKQGVLIQQNSIMNTPVYPVPKPDGKWRMVLDYREVNKTIPLIAAQNQHSAGILSSIFRGKYKTTLDLSNGFWAHSITPESYWLTAFTWLGQQYCWTRLPQGFLNSPALFNADVVDLLKEVPNVQVYVDDIYISHDDPREHLEQLEKVFSLLLNAGYVVSLKKSEIAQHEVEFLGFNITKEGRGLTETFKQKLLNITPPRDLKQLQSILGLLNFARNFIPNFSELVKPLYNIIATAPGKYITWTTDNSQQLQNIISMLNSAENLEERNPEVRLIMKVNTSPSAGYIRFYNEFAKRPIMYLNYVYTKAEVKFTNTEKLLTTIHKGLIKALDLGMGQEILVYSPIVSMTKIQKTPLPERKALPIRWITWMSYLEDPRIQFHYDKTLPELQQVPTVTDDIIAKIKHPSEFSMVFYTDGSAIKHPNVNKSHNAGMGIAQVQFKPEFTVINTWSIPLGDHTAQLAEVAAVEFACKKALKIDGPVLIVTDSFYVAESVNKELPYWQSNGFFNNKKKPLKHVSKWKSIADCIQLKPDIIIIHEKGHQPTASTFHTEGNNLADKLATQGSYVVNAGKRTADGSEFEKRTADGSEFESPKKKAKVE

SEQ ID NO: 597 - protein, 2175 aa, synthetic construct
MPAAKRVKLDGGDKKYSIGLDIGTNSVGWAVITDEYKVPSKKFKVLGNTDRHSIKKNLIGALLFDSGETAEATRLKRTARRRYTRRKNRICYLQEIFSNEMAKVDDSFFHRLEESFLVEEDKKHERHPIFGNIVDEVAYHEKYPTIYHLRKKLVDSTDKADLRLIYLALAHMIKFRGHFLIEGDLNPDNSDVDKLFIQLVQTYNQLFEENPINASGVDAKAILSARLSKSRRLENLIAQLPGEKKNGLFGNLIALSLGLTPNFKSNFDLAEDAKLQLSKDTYDDDLDNLLAQIGDQYADLFLAAKNLSDAILLSDILRVNTEITKAPLSASMIKRYDEHHQDLTLLKALVRQQLPEKYKEIFFDQSKNGYAGYIDGGASQEEFYKFIKPILEKMDGTEELLVKLNREDLLRKQRTFDNGSIPHQIHLGELHAILRRQEDFYPFLKDNREKIEKILTFRIPYYVGPLARGNSRFAWMTRKSEETITPWNFEEVVDKGASAQSFIERMTNFDKNLPNEKVLPKHSLLYEYFTVYNELTKVKYVTEGMRKPAFLSGEQKKAIVDLLFKTNRKVTVKQLKEDYFKKIECFDSVEISGVEDRFNASLGTYHDLLKIIKDKDFLDNEENEDILEDIVLTLTLFEDREMIEERLKTYAHLFDDKVMKQLKRRRYTGWGRLSRKLINGIRDKQSGKTILDFLKSDGFANRNFMQLIHDDSLTFKEDIQKAQVSGQGDSLHEHIANLAGSPAIKKGILQTVKVVDELVKVMGRHKPENIVIEMARENQTTQKGQKNSRERMKRIEEGIKELGSQILKEHPVENTQLQNEKLYLYYLQNGRDMYVDQELDINRLSDYDVDHIVPQSFLKDDSIDNKVLTRSDKARGKSDNVPSEEVVKKMKNYWRQLLNAKLITQRKFDNLTKAERGGLSELDKAGFIKRQLVETRQITKHVAQILDSRMNTKYDENDKLIREVKVITLKSKLVSDFRKDFQFYKVREINNYHHAHDAYLNAVVGTALIKKYPKLESEFVYGDYKVYDVRKMIAKSEQEIGKATAKYFFYSNIMNFFKTEITLANGEIRKRPLIETNGETGEIVWDKGRDFATVRKVLSMPQVNIVKKTEVQTGGFSKESILPKRNSDKLIARKKDWDPKKYGGFDSPTVAYSVLVVAKVEKGKSKKLKSVKELLGITIMERSSFEKNPIDFLEAKGYKEVKKDLIIKLPKYSLFELENGRKRMLASAGELQKGNELALPSKYVNFLYLASHYEKLKGSPEDNEQKQLFVEQHKHYLDEIIEQISEFSKRVILADANLDKVLSAYNKHRDKPIREQAENIIHLFTLTNLGAPAAFKYFDTTIDRKRYTSTKEVLDATLIHQSITGLYETRIDLSQLGGDGGGGGGSGGGGSGGMDPLQLLQPLEAEIKGTKLKAHWNSGATITCVPQAFLEEEVPIKNIWIKTIHGEKEQPVYYLTFKIQGRKVEAEVISSPYDYILVSPSDIPWLMKKPLQLTTLVPLQEYEERLLKQTMLTGSYKEKLQSLFLKYDALWQHWENQVGHRRIKPHHIATGTVNPRPQKQYPINPKAKASIQTVINDLLKQGVLIQQNSIMNTPVYPVPKPDGKWRMVLDYREVNKTIPLIAAQNQHSAGILSSIFRGKYKTTLDLSNGFWAHSITPESYWLTAFTWLGQQYCWTRLPQGFLNSPALFNADVVDLLKEVPNVQVYVDDIYISHDDPREHLEQLEKVFSLLLNAGYVVSLKKSEIAQHEVEFLGFNITKEGRGLTETFKQKLLNITPPRDLKQLQSILGLLNFARNFIPNFSELVKPLYNIIATAPGKYITWTTDNSQQLQNIISMLNSAENLEERNPEVRLIMKVNTSPSAGYIRFYNEFAKRPIMYLNYVYTKAEVKFTNTEKLLTTIHKGLIKALDLGMGQEILVYSPIVSMTKIQKTPLPERKALPIRWITWMSYLEDPRIQFHYDKTLPELQQVPTVTDDIIAKIKHPSEFSMVFYTDGSAIKHPNVNKSHNAGMGIAQVQFKPEFTVINTWSIPLGDHTAQLAEVAAVEFACKKALKIDGPVLIVTDSFYVAESVNKELPYWQSNGFFNNKKKPLKHVSKWKSIADCIQLKPDIIIIHEKGHQPTASTFHTEGNNLADKLATQGSYVVNAGKRTADGSEFEKRTADGSEFESPKKKAKVE

SEQ ID NO: 598 - protein, 2175 aa, synthetic construct
MPAAKRVKLDGGDKKYSIGLDIGTNSVGWAVITDEYKVPSKKFKVLGNTDRHSIKKNLIGALLFDSGETAEATRLKRTARRRYTRRKNRICYLQEIFSNEMAKVDDSFFHRLEESFLVEEDKKHERHPIFGNIVDEVAYHEKYPTIYHLRKKLVDSTDKADLRLIYLALAHMIKFRGHFLIEGDLNPDNSDVDKLFIQLVQTYNQLFEENPINASGVDAKAILSARLSKSRRLENLIAQLPGEKKNGLFGNLIALSLGLTPNFKSNFDLAEDAKLQLSKDTYDDDLDNLLAQIGDQYADLFLAAKNLSDAILLSDILRVNTEITKAPLSASMIKRYDEHHQDLTLLKALVRQQLPEKYKEIFFDQSKNGYAGYIDGGASQEEFYKFIKPILEKMDGTEELLVKLNREDLLRKQRTFDNGSIPHQIHLGELHAILRRQEDFYPFLKDNREKIEKILTFRIPYYVGPLARGNSRFAWMTRKSEETITPWNFEEVVDKGASAQSFIERMTNFDKNLPNEKVLPKHSLLYEYFTVYNELTKVKYVTEGMRKPAFLSGEQKKAIVDLLFKTNRKVTVKQLKEDYFKKIECFDSVEISGVEDRFNASLGTYHDLLKIIKDKDFLDNEENEDILEDIVLTLTLFEDREMIEERLKTYAHLFDDKVMKQLKRRRYTGWGRLSRKLINGIRDKQSGKTILDFLKSDGFANRNFMQLIHDDSLTFKEDIQKAQVSGQGDSLHEHIANLAGSPAIKKGILQTVKVVDELVKVMGRHKPENIVIEMARENQTTQKGQKNSRERMKRIEEGIKELGSQILKEHPVENTQLQNEKLYLYYLQNGRDMYVDQELDINRLSDYDVDHIVPQSFLKDDSIDNKVLTRSDKARGKSDNVPSEEVVKKMKNYWRQLLNAKLITQRKFDNLTKAERGGLSELDKAGFIKRQLVETRQITKHVAQILDSRMNTKYDENDKLIREVKVITLKSKLVSDFRKDFQFYKVREINNYHHAHDAYLNAVVGTALIKKYPKLESEFVYGDYKVYDVRKMIAKSEQEIGKATAKYFFYSNIMNFFKTEITLANGEIRKRPLIETNGETGEIVWDKGRDFATVRKVLSMPQVNIVKKTEVQTGGFSKESILPKRNSDKLIARKKDWDPKKYGGFDSPTVAYSVLVVAKVEKGKSKKLKSVKELLGITIMERSSFEKNPIDFLEAKGYKEVKKDLIIKLPKYSLFELENGRKRMLASAGELQKGNELALPSKYVNFLYLASHYEKLKGSPEDNEQKQLFVEQHKHYLDEIIEQISEFSKRVILADANLDKVLSAYNKHRDKPIREQAENIIHLFTLTNLGAPAAFKYFDTTIDRKRYTSTKEVLDATLIHQSITGLYETRIDLSQLGGDGGEAAAKEAAAKGGMDPLQLLQPLEAEIKGTKLKAHWNSGATITCVPQAFLEEEVPIKNIWIKTIHGEKEQPVYYLTFKIQGRKVEAEVISSPYDYILVSPSDIPWLMKKPLQLTTLVPLQEYEERLLKQTMLTGSYKEKLQSLFLKYDALWQHWENQVGHRRIKPHHIATGTVNPRPQKQYPINPKAKASIQTVINDLLKQGVLIQQNSIMNTPVYPVPKPDGKWRMVLDYREVNKTIPLIAAQNQHSAGILSSIFRGKYKTTLDLSNGFWAHSITPESYWLTAFTWLGQQYCWTRLPQGFLNSPALFNADVVDLLKEVPNVQVYVDDIYISHDDPREHLEQLEKVFSLLLNAGYVVSLKKSEIAQHEVEFLGFNITKEGRGLTETFKQKLLNITPPRDLKQLQSILGLLNFARNFIPNFSELVKPLYNIIATAPGKYITWTTDNSQQLQNIISMLNSAENLEERNPEVRLIMKVNTSPSAGYIRFYNEFAKRPIMYLNYVYTKAEVKFTNTEKLLTTIHKGLIKALDLGMGQEILVYSPIVSMTKIQKTPLPERKALPIRWITWMSYLEDPRIQFHYDKTLPELQQVPTVTDDIIAKIKHPSEFSMVFYTDGSAIKHPNVNKSHNAGMGIAQVQFKPEFTVINTWSIPLGDHTAQLAEVAAVEFACKKALKIDGPVLIVTDSFYVAESVNKELPYWQSNGFFNNKKKPLKHVSKWKSIADCIQLKPDIIIIHEKGHQPTASTFHTEGNNLADKLATQGSYVVNAGKRTADGSEFEKRTADGSEFESPKKKAKVE

SEQ ID NO: 599 - protein, 2176 aa, synthetic construct
MPAAKRVKLDGGDKKYSIGLDIGTNSVGWAVITDEYKVPSKKFKVLGNTDRHSIKKNLIGALLFDSGETAEATRLKRTARRRYTRRKNRICYLQEIFSNEMAKVDDSFFHRLEESFLVEEDKKHERHPIFGNIVDEVAYHEKYPTIYHLRKKLVDSTDKADLRLIYLALAHMIKFRGHFLIEGDLNPDNSDVDKLFIQLVQTYNQLFEENPINASGVDAKAILSARLSKSRRLENLIAQLPGEKKNGLFGNLIALSLGLTPNFKSNFDLAEDAKLQLSKDTYDDDLDNLLAQIGDQYADLFLAAKNLSDAILLSDILRVNTEITKAPLSASMIKRYDEHHQDLTLLKALVRQQLPEKYKEIFFDQSKNGYAGYIDGGASQEEFYKFIKPILEKMDGTEELLVKLNREDLLRKQRTFDNGSIPHQIHLGELHAILRRQEDFYPFLKDNREKIEKILTFRIPYYVGPLARGNSRFAWMTRKSEETITPWNFEEVVDKGASAQSFIERMTNFDKNLPNEKVLPKHSLLYEYFTVYNELTKVKYVTEGMRKPAFLSGEQKKAIVDLLFKTNRKVTVKQLKEDYFKKIECFDSVEISGVEDRFNASLGTYHDLLKIIKDKDFLDNEENEDILEDIVLTLTLFEDREMIEERLKTYAHLFDDKVMKQLKRRRYTGWGRLSRKLINGIRDKQSGKTILDFLKSDGFANRNFMQLIHDDSLTFKEDIQKAQVSGQGDSLHEHIANLAGSPAIKKGILQTVKVVDELVKVMGRHKPENIVIEMARENQTTQKGQKNSRERMKRIEEGIKELGSQILKEHPVENTQLQNEKLYLYYLQNGRDMYVDQELDINRLSDYDVDHIVPQSFLKDDSIDNKVLTRSDKARGKSDNVPSEEVVKKMKNYWRQLLNAKLITQRKFDNLTKAERGGLSELDKAGFIKRQLVETRQITKHVAQILDSRMNTKYDENDKLIREVKVITLKSKLVSDFRKDFQFYKVREINNYHHAHDAYLNAVVGTALIKKYPKLESEFVYGDYKVYDVRKMIAKSEQEIGKATAKYFFYSNIMNFFKTEITLANGEIRKRPLIETNGETGEIVWDKGRDFATVRKVLSMPQVNIVKKTEVQTGGFSKESILPKRNSDKLIARKKDWDPKKYGGFDSPTVAYSVLVVAKVEKGKSKKLKSVKELLGITIMERSSFEKNPIDFLEAKGYKEVKKDLIIKLPKYSLFELENGRKRMLASAGELQKGNELALPSKYVNFLYLASHYEKLKGSPEDNEQKQLFVEQHKHYLDEIIEQISEFSKRVILADANLDKVLSAYNKHRDKPIREQAENIIHLFTLTNLGAPAAFKYFDTTIDRKRYTSTKEVLDATLIHQSITGLYETRIDLSQLGGDGGGSSEAAAKGGGGGMDPLQLLQPLEAEIKGTKLKAHWNSGATITCVPQAFLEEEVPIKNIWIKTIHGEKEQPVYYLTFKIQGRKVEAEVISSPYDYILVSPSDIPWLMKKPLQLTTLVPLQEYEERLLKQTMLTGSYKEKLQSLFLKYDALWQHWENQVGHRRIKPHHIATGTVNPRPQKQYPINPKAKASIQTVINDLLKQGVLIQQNSIMNTPVYPVPKPDGKWRMVLDYREVNKTIPLIAAQNQHSAGILSSIFRGKYKTTLDLSNGFWAHSITPESYWLTAFTWLGQQYCWTRLPQGFLNSPALFNADVVDLLKEVPNVQVYVDDIYISHDDPREHLEQLEKVFSLLLNAGYVVSLKKSEIAQHEVEFLGFNITKEGRGLTETFKQKLLNITPPRDLKQLQSILGLLNFARNFIPNFSELVKPLYNIIATAPGKYITWTTDNSQQLQNIISMLNSAENLEERNPEVRLIMKVNTSPSAGYIRFYNEFAKRPIMYLNYVYTKAEVKFTNTEKLLTTIHKGLIKALDLGMGQEILVYSPIVSMTKIQKTPLPERKALPIRWITWMSYLEDPRIQFHYDKTLPELQQVPTVTDDIIAKIKHPSEFSMVFYTDGSAIKHPNVNKSHNAGMGIAQVQFKPEFTVINTWSIPLGDHTAQLAEVAAVEFACKKALKIDGPVLIVTDSFYVAESVNKELPYWQSNGFFNNKKKPLKHVSKWKSIADCIQLKPDIIIIHEKGHQPTASTFHTEGNNLADKLATQGSYVVNAGKRTADGSEFEKRTADGSEFESPKKKAKVE

SEQ ID NO: 600 - protein, 2174 aa, synthetic construct
MPAAKRVKLDGGDKKYSIGLDIGTNSVGWAVITDEYKVPSKKFKVLGNTDRHSIKKNLIGALLFDSGETAEATRLKRTARRRYTRRKNRICYLQEIFSNEMAKVDDSFFHRLEESFLVEEDKKHERHPIFGNIVDEVAYHEKYPTIYHLRKKLVDSTDKADLRLIYLALAHMIKFRGHFLIEGDLNPDNSDVDKLFIQLVQTYNQLFEENPINASGVDAKAILSARLSKSRRLENLIAQLPGEKKNGLFGNLIALSLGLTPNFKSNFDLAEDAKLQLSKDTYDDDLDNLLAQIGDQYADLFLAAKNLSDAILLSDILRVNTEITKAPLSASMIKRYDEHHQDLTLLKALVRQQLPEKYKEIFFDQSKNGYAGYIDGGASQEEFYKFIKPILEKMDGTEELLVKLNREDLLRKQRTFDNGSIPHQIHLGELHAILRRQEDFYPFLKDNREKIEKILTFRIPYYVGPLARGNSRFAWMTRKSEETITPWNFEEVVDKGASAQSFIERMTNFDKNLPNEKVLPKHSLLYEYFTVYNELTKVKYVTEGMRKPAFLSGEQKKAIVDLLFKTNRKVTVKQLKEDYFKKIECFDSVEISGVEDRFNASLGTYHDLLKIIKDKDFLDNEENEDILEDIVLTLTLFEDREMIEERLKTYAHLFDDKVMKQLKRRRYTGWGRLSRKLINGIRDKQSGKTILDFLKSDGFANRNFMQLIHDDSLTFKEDIQKAQVSGQGDSLHEHIANLAGSPAIKKGILQTVKVVDELVKVMGRHKPENIVIEMARENQTTQKGQKNSRERMKRIEEGIKELGSQILKEHPVENTQLQNEKLYLYYLQNGRDMYVDQELDINRLSDYDVDHIVPQSFLKDDSIDNKVLTRSDKARGKSDNVPSEEVVKKMKNYWRQLLNAKLITQRKFDNLTKAERGGLSELDKAGFIKRQLVETRQITKHVAQILDSRMNTKYDENDKLIREVKVITLKSKLVSDFRKDFQFYKVREINNYHHAHDAYLNAVVGTALIKKYPKLESEFVYGDYKVYDVRKMIAKSEQEIGKATAKYFFYSNIMNFFKTEITLANGEIRKRPLIETNGETGEIVWDKGRDFATVRKVLSMPQVNIVKKTEVQTGGFSKESILPKRNSDKLIARKKDWDPKKYGGFDSPTVAYSVLVVAKVEKGKSKKLKSVKELLGITIMERSSFEKNPIDFLEAKGYKEVKKDLIIKLPKYSLFELENGRKRMLASAGELQKGNELALPSKYVNFLYLASHYEKLKGSPEDNEQKQLFVEQHKHYLDEIIEQISEFSKRVILADANLDKVLSAYNKHRDKPIREQAENIIHLFTLTNLGAPAAFKYFDTTIDRKRYTSTKEVLDATLIHQSITGLYETRIDLSQLGGDGGPAPAPAPAPGGMDPLQLLQPLEAEIKGTKLKAHWNSGATITCVPQAFLEEEVPIKNIWIKTIHGEKEQPVYYLTFKIQGRKVEAEVISSPYDYILVSPSDIPWLMKKPLQLTTLVPLQEYEERLLKQTMLTGSYKEKLQSLFLKYDALWQHWENQVGHRRIKPHHIATGTVNPRPQKQYPINPKAKASIQTVINDLLKQGVLIQQNSIMNTPVYPVPKPDGKWRMVLDYREVNKTIPLIAAQNQHSAGILSSIFRGKYKTTLDLSNGFWAHSITPESYWLTAFTWLGQQYCWTRLPQGFLNSPALFNADVVDLLKEVPNVQVYVDDIYISHDDPREHLEQLEKVFSLLLNAGYVVSLKKSEIAQHEVEFLGFNITKEGRGLTETFKQKLLNITPPRDLKQLQSILGLLNFARNFIPNFSELVKPLYNIIATAPGKYITWTTDNSQQLQNIISMLNSAENLEERNPEVRLIMKVNTSPSAGYIRFYNEFAKRPIMYLNYVYTKAEVKFTNTEKLLTTIHKGLIKALDLGMGQEILVYSPIVSMTKIQKTPLPERKALPIRWITWMSYLEDPRIQFHYDKTLPELQQVPTVTDDIIAKIKHPSEFSMVFYTDGSAIKHPNVNKSHNAGMGIAQVQFKPEFTVINTWSIPLGDHTAQLAEVAAVEFACKKALKIDGPVLIVTDSFYVAESVNKELPYWQSNGFFNNKKKPLKHVSKWKSIADCIQLKPDIIIIHEKGHQPTASTFHTEGNNLADKLATQGSYVVNAGKRTADGSEFEKRTADGSEFESPKKKAKVE

SEQ ID NO: 601 - protein, 2180 aa, synthetic construct
MPAAKRVKLDGGDKKYSIGLDIGTNSVGWAVITDEYKVPSKKFKVLGNTDRHSIKKNLIGALLFDSGETAEATRLKRTARRRYTRRKNRICYLQEIFSNEMAKVDDSFFHRLEESFLVEEDKKHERHPIFGNIVDEVAYHEKYPTIYHLRKKLVDSTDKADLRLIYLALAHMIKFRGHFLIEGDLNPDNSDVDKLFIQLVQTYNQLFEENPINASGVDAKAILSARLSKSRRLENLIAQLPGEKKNGLFGNLIALSLGLTPNFKSNFDLAEDAKLQLSKDTYDDDLDNLLAQIGDQYADLFLAAKNLSDAILLSDILRVNTEITKAPLSASMIKRYDEHHQDLTLLKALVRQQLPEKYKEIFFDQSKNGYAGYIDGGASQEEFYKFIKPILEKMDGTEELLVKLNREDLLRKQRTFDNGSIPHQIHLGELHAILRRQEDFYPFLKDNREKIEKILTFRIPYYVGPLARGNSRFAWMTRKSEETITPWNFEEVVDKGASAQSFIERMTNFDKNLPNEKVLPKHSLLYEYFTVYNELTKVKYVTEGMRKPAFLSGEQKKAIVDLLFKTNRKVTVKQLKEDYFKKIECFDSVEISGVEDRFNASLGTYHDLLKIIKDKDFLDNEENEDILEDIVLTLTLFEDREMIEERLKTYAHLFDDKVMKQLKRRRYTGWGRLSRKLINGIRDKQSGKTILDFLKSDGFANRNFMQLIHDDSLTFKEDIQKAQVSGQGDSLHEHIANLAGSPAIKKGILQTVKVVDELVKVMGRHKPENIVIEMARENQTTQKGQKNSRERMKRIEEGIKELGSQILKEHPVENTQLQNEKLYLYYLQNGRDMYVDQELDINRLSDYDVDHIVPQSFLKDDSIDNKVLTRSDKARGKSDNVPSEEVVKKMKNYWRQLLNAKLITQRKFDNLTKAERGGLSELDKAGFIKRQLVETRQITKHVAQILDSRMNTKYDENDKLIREVKVITLKSKLVSDFRKDFQFYKVREINNYHHAHDAYLNAVVGTALIKKYPKLESEFVYGDYKVYDVRKMIAKSEQEIGKATAKYFFYSNIMNFFKTEITLANGEIRKRPLIETNGETGEIVWDKGRDFATVRKVLSMPQVNIVKKTEVQTGGFSKESILPKRNSDKLIARKKDWDPKKYGGFDSPTVAYSVLVVAKVEKGKSKKLKSVKELLGITIMERSSFEKNPIDFLEAKGYKEVKKDLIIKLPKYSLFELENGRKRMLASAGELQKGNELALPSKYVNFLYLASHYEKLKGSPEDNEQKQLFVEQHKHYLDEIIEQISEFSKRVILADANLDKVLSAYNKHRDKPIREQAENIIHLFTLTNLGAPAAFKYFDTTIDRKRYTSTKEVLDATLIHQSITGLYETRIDLSQLGGDGGGGGGSGGGGSGGGGSGGMDPLQLLQPLEAEIKGTKLKAHWNSGATITCVPQAFLEEEVPIKNIWIKTIHGEKEQPVYYLTFKIQGRKVEAEVISSPYDYILVSPSDIPWLMKKPLQLTTLVPLQEYEERLLKQTMLTGSYKEKLQSLFLKYDALWQHWENQVGHRRIKPHHIATGTVNPRPQKQYPINPKAKASIQTVINDLLKQGVLIQQNSIMNTPVYPVPKPDGKWRMVLDYREVNKTIPLIAAQNQHSAGILSSIFRGKYKTTLDLSNGFWAHSITPESYWLTAFTWLGQQYCWTRLPQGFLNSPALFNADVVDLLKEVPNVQVYVDDIYISHDDPREHLEQLEKVFSLLLNAGYVVSLKKSEIAQHEVEFLGFNITKEGRGLTETFKQKLLNITPPRDLKQLQSILGLLNFARNFIPNFSELVKPLYNIIATAPGKYITWTTDNSQQLQNIISMLNSAENLEERNPEVRLIMKVNTSPSAGYIRFYNEFAKRPIMYLNYVYTKAEVKFTNTEKLLTTIHKGLIKALDLGMGQEILVYSPIVSMTKIQKTPLPERKALPIRWITWMSYLEDPRIQFHYDKTLPELQQVPTVTDDIIAKIKHPSEFSMVFYTDGSAIKHPNVNKSHNAGMGIAQVQFKPEFTVINTWSIPLGDHTAQLAEVAAVEFACKKALKIDGPVLIVTDSFYVAESVNKELPYWQSNGFFNNKKKPLKHVSKWKSIADCIQLKPDIIIIHEKGHQPTASTFHTEGNNLADKLATQGSYVVNAGKRTADGSEFEKRTADGSEFESPKKKAKVE

SEQ ID NO: 602 - protein, 2176 aa, synthetic construct
MPAAKRVKLDGGDKKYSIGLDIGTNSVGWAVITDEYKVPSKKFKVLGNTDRHSIKKNLIGALLFDSGETAEATRLKRTARRRYTRRKNRICYLQEIFSNEMAKVDDSFFHRLEESFLVEEDKKHERHPIFGNIVDEVAYHEKYPTIYHLRKKLVDSTDKADLRLIYLALAHMIKFRGHFLIEGDLNPDNSDVDKLFIQLVQTYNQLFEENPINASGVDAKAILSARLSKSRRLENLIAQLPGEKKNGLFGNLIALSLGLTPNFKSNFDLAEDAKLQLSKDTYDDDLDNLLAQIGDQYADLFLAAKNLSDAILLSDILRVNTEITKAPLSASMIKRYDEHHQDLTLLKALVRQQLPEKYKEIFFDQSKNGYAGYIDGGASQEEFYKFIKPILEKMDGTEELLVKLNREDLLRKQRTFDNGSIPHQIHLGELHAILRRQEDFYPFLKDNREKIEKILTFRIPYYVGPLARGNSRFAWMTRKSEETITPWNFEEVVDKGASAQSFIERMTNFDKNLPNEKVLPKHSLLYEYFTVYNELTKVKYVTEGMRKPAFLSGEQKKAIVDLLFKTNRKVTVKQLKEDYFKKIECFDSVEISGVEDRFNASLGTYHDLLKIIKDKDFLDNEENEDILEDIVLTLTLFEDREMIEERLKTYAHLFDDKVMKQLKRRRYTGWGRLSRKLINGIRDKQSGKTILDFLKSDGFANRNFMQLIHDDSLTFKEDIQKAQVSGQGDSLHEHIANLAGSPAIKKGILQTVKVVDELVKVMGRHKPENIVIEMARENQTTQKGQKNSRERMKRIEEGIKELGSQILKEHPVENTQLQNEKLYLYYLQNGRDMYVDQELDINRLSDYDVDHIVPQSFLKDDSIDNKVLTRSDKARGKSDNVPSEEVVKKMKNYWRQLLNAKLITQRKFDNLTKAERGGLSELDKAGFIKRQLVETRQITKHVAQILDSRMNTKYDENDKLIREVKVITLKSKLVSDFRKDFQFYKVREINNYHHAHDAYLNAVVGTALIKKYPKLESEFVYGDYKVYDVRKMIAKSEQEIGKATAKYFFYSNIMNFFKTEITLANGEIRKRPLIETNGETGEIVWDKGRDFATVRKVLSMPQVNIVKKTEVQTGGFSKESILPKRNSDKLIARKKDWDPKKYGGFDSPTVAYSVLVVAKVEKGKSKKLKSVKELLGITIMERSSFEKNPIDFLEAKGYKEVKKDLIIKLPKYSLFELENGRKRMLASAGELQKGNELALPSKYVNFLYLASHYEKLKGSPEDNEQKQLFVEQHKHYLDEIIEQISEFSKRVILADANLDKVLSAYNKHRDKPIREQAENIIHLFTLTNLGAPAAFKYFDTTIDRKRYTSTKEVLDATLIHQSITGLYETRIDLSQLGGDGGPAPEAAAKGSSGGMDPLQLLQPLEAEIKGTKLKAHWNSGATITCVPQAFLEEEVPIKNIWIKTIHGEKEQPVYYLTFKIQGRKVEAEVISSPYDYILVSPSDIPWLMKKPLQLTTLVPLQEYEERLLKQTMLTGSYKEKLQSLFLKYDALWQHWENQVGHRRIKPHHIATGTVNPRPQKQYPINPKAKASIQTVINDLLKQGVLIQQNSIMNTPVYPVPKPDGKWRMVLDYREVNKTIPLIAAQNQHSAGILSSIFRGKYKTTLDLSNGFWAHSITPESYWLTAFTWLGQQYCWTRLPQGFLNSPALFNADVVDLLKEVPNVQVYVDDIYISHDDPREHLEQLEKVFSLLLNAGYVVSLKKSEIAQHEVEFLGFNITKEGRGLTETFKQKLLNITPPRDLKQLQSILGLLNFARNFIPNFSELVKPLYNIIATAPGKYITWTTDNSQQLQNIISMLNSAENLEERNPEVRLIMKVNTSPSAGYIRFYNEFAKRPIMYLNYVYTKAEVKFTNTEKLLTTIHKGLIKALDLGMGQEILVYSPIVSMTKIQKTPLPERKALPIRWITWMSYLEDPRIQFHYDKTLPELQQVPTVTDDIIAKIKHPSEFSMVFYTDGSAIKHPNVNKSHNAGMGIAQVQFKPEFTVINTWSIPLGDHTAQLAEVAAVEFACKKALKIDGPVLIVTDSFYVAESVNKELPYWQSNGFFNNKKKPLKHVSKWKSIADCIQLKPDIIIIHEKGHQPTASTFHTEGNNLADKLATQGSYVVNAGKRTADGSEFEKRTADGSEFESPKKKAKVE

SEQ ID NO: 603 - protein, 2173 aa, synthetic construct
MPAAKRVKLDGGDKKYSIGLDIGTNSVGWAVITDEYKVPSKKFKVLGNTDRHSIKKNLIGALLFDSGETAEATRLKRTARRRYTRRKNRICYLQEIFSNEMAKVDDSFFHRLEESFLVEEDKKHERHPIFGNIVDEVAYHEKYPTIYHLRKKLVDSTDKADLRLIYLALAHMIKFRGHFLIEGDLNPDNSDVDKLFIQLVQTYNQLFEENPINASGVDAKAILSARLSKSRRLENLIAQLPGEKKNGLFGNLIALSLGLTPNFKSNFDLAEDAKLQLSKDTYDDDLDNLLAQIGDQYADLFLAAKNLSDAILLSDILRVNTEITKAPLSASMIKRYDEHHQDLTLLKALVRQQLPEKYKEIFFDQSKNGYAGYIDGGASQEEFYKFIKPILEKMDGTEELLVKLNREDLLRKQRTFDNGSIPHQIHLGELHAILRRQEDFYPFLKDNREKIEKILTFRIPYYVGPLARGNSRFAWMTRKSEETITPWNFEEVVDKGASAQSFIERMTNFDKNLPNEKVLPKHSLLYEYFTVYNELTKVKYVTEGMRKPAFLSGEQKKAIVDLLFKTNRKVTVKQLKEDYFKKIECFDSVEISGVEDRFNASLGTYHDLLKIIKDKDFLDNEENEDILEDIVLTLTLFEDREMIEERLKTYAHLFDDKVMKQLKRRRYTGWGRLSRKLINGIRDKQSGKTILDFLKSDGFANRNFMQLIHDDSLTFKEDIQKAQVSGQGDSLHEHIANLAGSPAIKKGILQTVKVVDELVKVMGRHKPENIVIEMARENQTTQKGQKNSRERMKRIEEGIKELGSQILKEHPVENTQLQNEKLYLYYLQNGRDMYVDQELDINRLSDYDVDHIVPQSFLKDDSIDNKVLTRSDKARGKSDNVPSEEVVKKMKNYWRQLLNAKLITQRKFDNLTKAERGGLSELDKAGFIKRQLVETRQITKHVAQILDSRMNTKYDENDKLIREVKVITLKSKLVSDFRKDFQFYKVREINNYHHAHDAYLNAVVGTALIKKYPKLESEFVYGDYKVYDVRKMIAKSEQEIGKATAKYFFYSNIMNFFKTEITLANGEIRKRPLIETNGETGEIVWDKGRDFATVRKVLSMPQVNIVKKTEVQTGGFSKESILPKRNSDKLIARKKDWDPKKYGGFDSPTVAYSVLVVAKVEKGKSKKLKSVKELLGITIMERSSFEKNPIDFLEAKGYKEVKKDLIIKLPKYSLFELENGRKRMLASAGELQKGNELALPSKYVNFLYLASHYEKLKGSPEDNEQKQLFVEQHKHYLDEIIEQISEFSKRVILADANLDKVLSAYNKHRDKPIREQAENIIHLFTLTNLGAPAAFKYFDTTIDRKRYTSTKEVLDATLIHQSITGLYETRIDLSQLGGDGGGSSEAAAKGGMDPLQLLQPLEAEIKGTKLKAHWNSGATITCVPQAFLEEEVPIKNIWIKTIHGEKEQPVYYLTFKIQGRKVEAEVISSPYDYILVSPSDIPWLMKKPLQLTTLVPLQEYEERLLKQTMLTGSYKEKLQSLFLKYDALWQHWENQVGHRRIKPHHIATGTVNPRPQKQYPINPKAKASIQTVINDLLKQGVLIQQNSIMNTPVYPVPKPDGKWRMVLDYREVNKTIPLIAAQNQHSAGILSSIFRGKYKTTLDLSNGFWAHSITPESYWLTAFTWLGQQYCWTRLPQGFLNSPALFNADVVDLLKEVPNVQVYVDDIYISHDDPREHLEQLEKVFSLLLNAGYVVSLKKSEIAQHEVEFLGFNITKEGRGLTETFKQKLLNITPPRDLKQLQSILGLLNFARNFIPNFSELVKPLYNIIATAPGKYITWTTDNSQQLQNIISMLNSAENLEERNPEVRLIMKVNTSPSAGYIRFYNEFAKRPIMYLNYVYTKAEVKFTNTEKLLTTIHKGLIKALDLGMGQEILVYSPIVSMTKIQKTPLPERKALPIRWITWMSYLEDPRIQFHYDKTLPELQQVPTVTDDIIAKIKHPSEFSMVFYTDGSAIKHPNVNKSHNAGMGIAQVQFKPEFTVINTWSIPLGDHTAQLAEVAAVEFACKKALKIDGPVLIVTDSFYVAESVNKELPYWQSNGFFNNKKKPLKHVSKWKSIADCIQLKPDIIIIHEKGHQPTASTFHTEGNNLADKLATQGSYVVNAGKRTADGSEFEKRTADGSEFESPKKKAKVE

SEQ ID NO: 604 - protein, 2183 aa, synthetic construct
MPAAKRVKLDGGDKKYSIGLDIGTNSVGWAVITDEYKVPSKKFKVLGNTDRHSIKKNLIGALLFDSGETAEATRLKRTARRRYTRRKNRICYLQEIFSNEMAKVDDSFFHRLEESFLVEEDKKHERHPIFGNIVDEVAYHEKYPTIYHLRKKLVDSTDKADLRLIYLALAHMIKFRGHFLIEGDLNPDNSDVDKLFIQLVQTYNQLFEENPINASGVDAKAILSARLSKSRRLENLIAQLPGEKKNGLFGNLIALSLGLTPNFKSNFDLAEDAKLQLSKDTYDDDLDNLLAQIGDQYADLFLAAKNLSDAILLSDILRVNTEITKAPLSASMIKRYDEHHQDLTLLKALVRQQLPEKYKEIFFDQSKNGYAGYIDGGASQEEFYKFIKPILEKMDGTEELLVKLNREDLLRKQRTFDNGSIPHQIHLGELHAILRRQEDFYPFLKDNREKIEKILTFRIPYYVGPLARGNSRFAWMTRKSEETITPWNFEEVVDKGASAQSFIERMTNFDKNLPNEKVLPKHSLLYEYFTVYNELTKVKYVTEGMRKPAFLSGEQKKAIVDLLFKTNRKVTVKQLKEDYFKKIECFDSVEISGVEDRFNASLGTYHDLLKIIKDKDFLDNEENEDILEDIVLTLTLFEDREMIEERLKTYAHLFDDKVMKQLKRRRYTGWGRLSRKLINGIRDKQSGKTILDFLKSDGFANRNFMQLIHDDSLTFKEDIQKAQVSGQGDSLHEHIANLAGSPAIKKGILQTVKVVDELVKVMGRHKPENIVIEMARENQTTQKGQKNSRERMKRIEEGIKELGSQILKEHPVENTQLQNEKLYLYYLQNGRDMYVDQELDINRLSDYDVDHIVPQSFLKDDSIDNKVLTRSDKARGKSDNVPSEEVVKKMKNYWRQLLNAKLITQRKFDNLTKAERGGLSELDKAGFIKRQLVETRQITKHVAQILDSRMNTKYDENDKLIREVKVITLKSKLVSDFRKDFQFYKVREINNYHHAHDAYLNAVVGTALIKKYPKLESEFVYGDYKVYDVRKMIAKSEQEIGKATAKYFFYSNIMNFFKTEITLANGEIRKRPLIETNGETGEIVWDKGRDFATVRKVLSMPQVNIVKKTEVQTGGFSKESILPKRNSDKLIARKKDWDPKKYGGFDSPTVAYSVLVVAKVEKGKSKKLKSVKELLGITIMERSSFEKNPIDFLEAKGYKEVKKDLIIKLPKYSLFELENGRKRMLASAGELQKGNELALPSKYVNFLYLASHYEKLKGSPEDNEQKQLFVEQHKHYLDEIIEQISEFSKRVILADANLDKVLSAYNKHRDKPIREQAENIIHLFTLTNLGAPAAFKYFDTTIDRKRYTSTKEVLDATLIHQSITGLYETRIDLSQLGGDGGGGSGGSGGSGGSGGSGGSGGMDPLQLLQPLEAEIKGTKLKAHWNSGATITCVPQAFLEEEVPIKNIWIKTIHGEKEQPVYYLTFKIQGRKVEAEVISSPYDYILVSPSDIPWLMKKPLQLTTLVPLQEYEERLLKQTMLTGSYKEKLQSLFLKYDALWQHWENQVGHRRIKPHHIATGTVNPRPQKQYPINPKAKASIQTVINDLLKQGVLIQQNSIMNTPVYPVPKPDGKWRMVLDYREVNKTIPLIAAQNQHSAGILSSIFRGKYKTTLDLSNGFWAHSITPESYWLTAFTWLGQQYCWTRLPQGFLNSPALFNADVVDLLKEVPNVQVYVDDIYISHDDPREHLEQLEKVFSLLLNAGYVVSLKKSEIAQHEVEFLGFNITKEGRGLTETFKQKLLNITPPRDLKQLQSILGLLNFARNFIPNFSELVKPLYNIIATAPGKYITWTTDNSQQLQNIISMLNSAENLEERNPEVRLIMKVNTSPSAGYIRFYNEFAKRPIMYLNYVYTKAEVKFTNTEKLLTTIHKGLIKALDLGMGQEILVYSPIVSMTKIQKTPLPERKALPIRWITWMSYLEDPRIQFHYDKTLPELQQVPTVTDDIIAKIKHPSEFSMVFYTDGSAIKHPNVNKSHNAGMGIAQVQFKPEFTVINTWSIPLGDHTAQLAEVAAVEFACKKALKIDGPVLIVTDSFYVAESVNKELPYWQSNGFFNNKKKPLKHVSKWKSIADCIQLKPDIIIIHEKGHQPTASTFHTEGNNLADKLATQGSYVVNAGKRTADGSEFEKRTADGSEFESPKKKAKVE

SEQ ID NO: 605 - protein, 2171 aa, synthetic construct
MPAAKRVKLDGGDKKYSIGLDIGTNSVGWAVITDEYKVPSKKFKVLGNTDRHSIKKNLIGALLFDSGETAEATRLKRTARRRYTRRKNRICYLQEIFSNEMAKVDDSFFHRLEESFLVEEDKKHERHPIFGNIVDEVAYHEKYPTIYHLRKKLVDSTDKADLRLIYLALAHMIKFRGHFLIEGDLNPDNSDVDKLFIQLVQTYNQLFEENPINASGVDAKAILSARLSKSRRLENLIAQLPGEKKNGLFGNLIALSLGLTPNFKSNFDLAEDAKLQLSKDTYDDDLDNLLAQIGDQYADLFLAAKNLSDAILLSDILRVNTEITKAPLSASMIKRYDEHHQDLTLLKALVRQQLPEKYKEIFFDQSKNGYAGYIDGGASQEEFYKFIKPILEKMDGTEELLVKLNREDLLRKQRTFDNGSIPHQIHLGELHAILRRQEDFYPFLKDNREKIEKILTFRIPYYVGPLARGNSRFAWMTRKSEETITPWNFEEVVDKGASAQSFIERMTNFDKNLPNEKVLPKHSLLYEYFTVYNELTKVKYVTEGMRKPAFLSGEQKKAIVDLLFKTNRKVTVKQLKEDYFKKIECFDSVEISGVEDRFNASLGTYHDLLKIIKDKDFLDNEENEDILEDIVLTLTLFEDREMIEERLKTYAHLFDDKVMKQLKRRRYTGWGRLSRKLINGIRDKQSGKTILDFLKSDGFANRNFMQLIHDDSLTFKEDIQKAQVSGQGDSLHEHIANLAGSPAIKKGILQTVKVVDELVKVMGRHKPENIVIEMARENQTTQKGQKNSRERMKRIEEGIKELGSQILKEHPVENTQLQNEKLYLYYLQNGRDMYVDQELDINRLSDYDVDHIVPQSFLKDDSIDNKVLTRSDKARGKSDNVPSEEVVKKMKNYWRQLLNAKLITQRKFDNLTKAERGGLSELDKAGFIKRQLVETRQITKHVAQILDSRMNTKYDENDKLIREVKVITLKSKLVSDFRKDFQFYKVREINNYHHAHDAYLNAVVGTALIKKYPKLESEFVYGDYKVYDVRKMIAKSEQEIGKATAKYFFYSNIMNFFKTEITLANGEIRKRPLIETNGETGEIVWDKGRDFATVRKVLSMPQVNIVKKTEVQTGGFSKESILPKRNSDKLIARKKDWDPKKYGGFDSPTVAYSVLVVAKVEKGKSKKLKSVKELLGITIMERSSFEKNPIDFLEAKGYKEVKKDLIIKLPKYSLFELENGRKRMLASAGELQKGNELALPSKYVNFLYLASHYEKLKGSPEDNEQKQLFVEQHKHYLDEIIEQISEFSKRVILADANLDKVLSAYNKHRDKPIREQAENIIHLFTLTNLGAPAAFKYFDTTIDRKRYTSTKEVLDATLIHQSITGLYETRIDLSQLGGDGGGGGGSSGGMDPLQLLQPLEAEIKGTKLKAHWNSGATITCVPQAFLEEEVPIKNIWIKTIHGEKEQPVYYLTFKIQGRKVEAEVISSPYDYILVSPSDIPWLMKKPLQLTTLVPLQEYEERLLKQTMLTGSYKEKLQSLFLKYDALWQHWENQVGHRRIKPHHIATGTVNPRPQKQYPINPKAKASIQTVINDLLKQGVLIQQNSIMNTPVYPVPKPDGKWRMVLDYREVNKTIPLIAAQNQHSAGILSSIFRGKYKTTLDLSNGFWAHSITPESYWLTAFTWLGQQYCWTRLPQGFLNSPALFNADVVDLLKEVPNVQVYVDDIYISHDDPREHLEQLEKVFSLLLNAGYVVSLKKSEIAQHEVEFLGFNITKEGRGLTETFKQKLLNITPPRDLKQLQSILGLLNFARNFIPNFSELVKPLYNIIATAPGKYITWTTDNSQQLQNIISMLNSAENLEERNPEVRLIMKVNTSPSAGYIRFYNEFAKRPIMYLNYVYTKAEVKFTNTEKLLTTIHKGLIKALDLGMGQEILVYSPIVSMTKIQKTPLPERKALPIRWITWMSYLEDPRIQFHYDKTLPELQQVPTVTDDIIAKIKHPSEFSMVFYTDGSAIKHPNVNKSHNAGMGIAQVQFKPEFTVINTWSIPLGDHTAQLAEVAAVEFACKKALKIDGPVLIVTDSFYVAESVNKELPYWQSNGFFNNKKKPLKHVSKWKSIADCIQLKPDIIIIHEKGHQPTASTFHTEGNNLADKLATQGSYVVNAGKRTADGSEFEKRTADGSEFESPKKKAKVE

SEQ ID NO: 606 - protein, 2174 aa, synthetic construct
MPAAKRVKLDGGDKKYSIGLDIGTNSVGWAVITDEYKVPSKKFKVLGNTDRHSIKKNLIGALLFDSGETAEATRLKRTARRRYTRRKNRICYLQEIFSNEMAKVDDSFFHRLEESFLVEEDKKHERHPIFGNIVDEVAYHEKYPTIYHLRKKLVDSTDKADLRLIYLALAHMIKFRGHFLIEGDLNPDNSDVDKLFIQLVQTYNQLFEENPINASGVDAKAILSARLSKSRRLENLIAQLPGEKKNGLFGNLIALSLGLTPNFKSNFDLAEDAKLQLSKDTYDDDLDNLLAQIGDQYADLFLAAKNLSDAILLSDILRVNTEITKAPLSASMIKRYDEHHQDLTLLKALVRQQLPEKYKEIFFDQSKNGYAGYIDGGASQEEFYKFIKPILEKMDGTEELLVKLNREDLLRKQRTFDNGSIPHQIHLGELHAILRRQEDFYPFLKDNREKIEKILTFRIPYYVGPLARGNSRFAWMTRKSEETITPWNFEEVVDKGASAQSFIERMTNFDKNLPNEKVLPKHSLLYEYFTVYNELTKVKYVTEGMRKPAFLSGEQKKAIVDLLFKTNRKVTVKQLKEDYFKKIECFDSVEISGVEDRFNASLGTYHDLLKIIKDKDFLDNEENEDILEDIVLTLTLFEDREMIEERLKTYAHLFDDKVMKQLKRRRYTGWGRLSRKLINGIRDKQSGKTILDFLKSDGFANRNFMQLIHDDSLTFKEDIQKAQVSGQGDSLHEHIANLAGSPAIKKGILQTVKVVDELVKVMGRHKPENIVIEMARENQTTQKGQKNSRERMKRIEEGIKELGSQILKEHPVENTQLQNEKLYLYYLQNGRDMYVDQELDINRLSDYDVDHIVPQSFLKDDSIDNKVLTRSDKARGKSDNVPSEEVVKKMKNYWRQLLNAKLITQRKFDNLTKAERGGLSELDKAGFIKRQLVETRQITKHVAQILDSRMNTKYDENDKLIREVKVITLKSKLVSDFRKDFQFYKVREINNYHHAHDAYLNAVVGTALIKKYPKLESEFVYGDYKVYDVRKMIAKSEQEIGKATAKYFFYSNIMNFFKTEITLANGEIRKRPLIETNGETGEIVWDKGRDFATVRKVLSMPQVNIVKKTEVQTGGFSKESILPKRNSDKLIARKKDWDPKKYGGFDSPTVAYSVLVVAKVEKGKSKKLKSVKELLGITIMERSSFEKNPIDFLEAKGYKEVKKDLIIKLPKYSLFELENGRKRMLASAGELQKGNELALPSKYVNFLYLASHYEKLKGSPEDNEQKQLFVEQHKHYLDEIIEQISEFSKRVILADANLDKVLSAYNKHRDKPIREQAENIIHLFTLTNLGAPAAFKYFDTTIDRKRYTSTKEVLDATLIHQSITGLYETRIDLSQLGGDGGGGSGGSGGSGGMDPLQLLQPLEAEIKGTKLKAHWNSGATITCVPQAFLEEEVPIKNIWIKTIHGEKEQPVYYLTFKIQGRKVEAEVISSPYDYILVSPSDIPWLMKKPLQLTTLVPLQEYEERLLKQTMLTGSYKEKLQSLFLKYDALWQHWENQVGHRRIKPHHIATGTVNPRPQKQYPINPKAKASIQTVINDLLKQGVLIQQNSIMNTPVYPVPKPDGKWRMVLDYREVNKTIPLIAAQNQHSAGILSSIFRGKYKTTLDLSNGFWAHSITPESYWLTAFTWLGQQYCWTRLPQGFLNSPALFNADVVDLLKEVPNVQVYVDDIYISHDDPREHLEQLEKVFSLLLNAGYVVSLKKSEIAQHEVEFLGFNITKEGRGLTETFKQKLLNITPPRDLKQLQSILGLLNFARNFIPNFSELVKPLYNIIATAPGKYITWTTDNSQQLQNIISMLNSAENLEERNPEVRLIMKVNTSPSAGYIRFYNEFAKRPIMYLNYVYTKAEVKFTNTEKLLTTIHKGLIKALDLGMGQEILVYSPIVSMTKIQKTPLPERKALPIRWITWMSYLEDPRIQFHYDKTLPELQQVPTVTDDIIAKIKHPSEFSMVFYTDGSAIKHPNVNKSHNAGMGIAQVQFKPEFTVINTWSIPLGDHTAQLAEVAAVEFACKKALKIDGPVLIVTDSFYVAESVNKELPYWQSNGFFNNKKKPLKHVSKWKSIADCIQLKPDIIIIHEKGHQPTASTFHTEGNNLADKLATQGSYVVNAGKRTADGSEFEKRTADGSEFESPKKKAKVE

SEQ ID NO: 607 - protein, 2173 aa, synthetic construct
MPAAKRVKLDGGDKKYSIGLDIGTNSVGWAVITDEYKVPSKKFKVLGNTDRHSIKKNLIGALLFDSGETAEATRLKRTARRRYTRRKNRICYLQEIFSNEMAKVDDSFFHRLEESFLVEEDKKHERHPIFGNIVDEVAYHEKYPTIYHLRKKLVDSTDKADLRLIYLALAHMIKFRGHFLIEGDLNPDNSDVDKLFIQLVQTYNQLFEENPINASGVDAKAILSARLSKSRRLENLIAQLPGEKKNGLFGNLIALSLGLTPNFKSNFDLAEDAKLQLSKDTYDDDLDNLLAQIGDQYADLFLAAKNLSDAILLSDILRVNTEITKAPLSASMIKRYDEHHQDLTLLKALVRQQLPEKYKEIFFDQSKNGYAGYIDGGASQEEFYKFIKPILEKMDGTEELLVKLNREDLLRKQRTFDNGSIPHQIHLGELHAILRRQEDFYPFLKDNREKIEKILTFRIPYYVGPLARGNSRFAWMTRKSEETITPWNFEEVVDKGASAQSFIERMTNFDKNLPNEKVLPKHSLLYEYFTVYNELTKVKYVTEGMRKPAFLSGEQKKAIVDLLFKTNRKVTVKQLKEDYFKKIECFDSVEISGVEDRFNASLGTYHDLLKIIKDKDFLDNEENEDILEDIVLTLTLFEDREMIEERLKTYAHLFDDKVMKQLKRRRYTGWGRLSRKLINGIRDKQSGKTILDFLKSDGFANRNFMQLIHDDSLTFKEDIQKAQVSGQGDSLHEHIANLAGSPAIKKGILQTVKVVDELVKVMGRHKPENIVIEMARENQTTQKGQKNSRERMKRIEEGIKELGSQILKEHPVENTQLQNEKLYLYYLQNGRDMYVDQELDINRLSDYDVDHIVPQSFLKDDSIDNKVLTRSDKARGKSDNVPSEEVVKKMKNYWRQLLNAKLITQRKFDNLTKAERGGLSELDKAGFIKRQLVETRQITKHVAQILDSRMNTKYDENDKLIREVKVITLKSKLVSDFRKDFQFYKVREINNYHHAHDAYLNAVVGTALIKKYPKLESEFVYGDYKVYDVRKMIAKSEQEIGKATAKYFFYSNIMNFFKTEITLANGEIRKRPLIETNGETGEIVWDKGRDFATVRKVLSMPQVNIVKKTEVQTGGFSKESILPKRNSDKLIARKKDWDPKKYGGFDSPTVAYSVLVVAKVEKGKSKKLKSVKELLGITIMERSSFEKNPIDFLEAKGYKEVKKDLIIKLPKYSLFELENGRKRMLASAGELQKGNELALPSKYVNFLYLASHYEKLKGSPEDNEQKQLFVEQHKHYLDEIIEQISEFSKRVILADANLDKVLSAYNKHRDKPIREQAENIIHLFTLTNLGAPAAFKYFDTTIDRKRYTSTKEVLDATLIHQSITGLYETRIDLSQLGGDGGGGSEAAAKGGMDPLQLLQPLEAEIKGTKLKAHWNSGATITCVPQAFLEEEVPIKNIWIKTIHGEKEQPVYYLTFKIQGRKVEAEVISSPYDYILVSPSDIPWLMKKPLQLTTLVPLQEYEERLLKQTMLTGSYKEKLQSLFLKYDALWQHWENQVGHRRIKPHHIATGTVNPRPQKQYPINPKAKASIQTVINDLLKQGVLIQQNSIMNTPVYPVPKPDGKWRMVLDYREVNKTIPLIAAQNQHSAGILSSIFRGKYKTTLDLSNGFWAHSITPESYWLTAFTWLGQQYCWTRLPQGFLNSPALFNADVVDLLKEVPNVQVYVDDIYISHDDPREHLEQLEKVFSLLLNAGYVVSLKKSEIAQHEVEFLGFNITKEGRGLTETFKQKLLNITPPRDLKQLQSILGLLNFARNFIPNFSELVKPLYNIIATAPGKYITWTTDNSQQLQNIISMLNSAENLEERNPEVRLIMKVNTSPSAGYIRFYNEFAKRPIMYLNYVYTKAEVKFTNTEKLLTTIHKGLIKALDLGMGQEILVYSPIVSMTKIQKTPLPERKALPIRWITWMSYLEDPRIQFHYDKTLPELQQVPTVTDDIIAKIKHPSEFSMVFYTDGSAIKHPNVNKSHNAGMGIAQVQFKPEFTVINTWSIPLGDHTAQLAEVAAVEFACKKALKIDGPVLIVTDSFYVAESVNKELPYWQSNGFFNNKKKPLKHVSKWKSIADCIQLKPDIIIIHEKGHQPTASTFHTEGNNLADKLATQGSYVVNAGKRTADGSEFEKRTADGSEFESPKKKAKVE

SEQ ID NO: 608 - protein, 2170 aa, synthetic construct
MPAAKRVKLDGGDKKYSIGLDIGTNSVGWAVITDEYKVPSKKFKVLGNTDRHSIKKNLIGALLFDSGETAEATRLKRTARRRYTRRKNRICYLQEIFSNEMAKVDDSFFHRLEESFLVEEDKKHERHPIFGNIVDEVAYHEKYPTIYHLRKKLVDSTDKADLRLIYLALAHMIKFRGHFLIEGDLNPDNSDVDKLFIQLVQTYNQLFEENPINASGVDAKAILSARLSKSRRLENLIAQLPGEKKNGLFGNLIALSLGLTPNFKSNFDLAEDAKLQLSKDTYDDDLDNLLAQIGDQYADLFLAAKNLSDAILLSDILRVNTEITKAPLSASMIKRYDEHHQDLTLLKALVRQQLPEKYKEIFFDQSKNGYAGYIDGGASQEEFYKFIKPILEKMDGTEELLVKLNREDLLRKQRTFDNGSIPHQIHLGELHAILRRQEDFYPFLKDNREKIEKILTFRIPYYVGPLARGNSRFAWMTRKSEETITPWNFEEVVDKGASAQSFIERMTNFDKNLPNEKVLPKHSLLYEYFTVYNELTKVKYVTEGMRKPAFLSGEQKKAIVDLLFKTNRKVTVKQLKEDYFKKIECFDSVEISGVEDRFNASLGTYHDLLKIIKDKDFLDNEENEDILEDIVLTLTLFEDREMIEERLKTYAHLFDDKVMKQLKRRRYTGWGRLSRKLINGIRDKQSGKTILDFLKSDGFANRNFMQLIHDDSLTFKEDIQKAQVSGQGDSLHEHIANLAGSPAIKKGILQTVKVVDELVKVMGRHKPENIVIEMARENQTTQKGQKNSRERMKRIEEGIKELGSQILKEHPVENTQLQNEKLYLYYLQNGRDMYVDQELDINRLSDYDVDHIVPQSFLKDDSIDNKVLTRSDKARGKSDNVPSEEVVKKMKNYWRQLLNAKLITQRKFDNLTKAERGGLSELDKAGFIKRQLVETRQITKHVAQILDSRMNTKYDENDKLIREVKVITLKSKLVSDFRKDFQFYKVREINNYHHAHDAYLNAVVGTALIKKYPKLESEFVYGDYKVYDVRKMIAKSEQEIGKATAKYFFYSNIMNFFKTEITLANGEIRKRPLIETNGETGEIVWDKGRDFATVRKVLSMPQVNIVKKTEVQTGGFSKESILPKRNSDKLIARKKDWDPKKYGGFDSPTVAYSVLVVAKVEKGKSKKLKSVKELLGITIMERSSFEKNPIDFLEAKGYKEVKKDLIIKLPKYSLFELENGRKRMLASAGELQKGNELALPSKYVNFLYLASHYEKLKGSPEDNEQKQLFVEQHKHYLDEIIEQISEFSKRVILADANLDKVLSAYNKHRDKPIREQAENIIHLFTLTNLGAPAAFKYFDTTIDRKRYTSTKEVLDATLIHQSITGLYETRIDLSQLGGDGGEAAAKGGMDPLQLLQPLEAEIKGTKLKAHWNSGATITCVPQAFLEEEVPIKNIWIKTIHGEKEQPVYYLTFKIQGRKVEAEVISSPYDYILVSPSDIPWLMKKPLQLTTLVPLQEYEERLLKQTMLTGSYKEKLQSLFLKYDALWQHWENQVGHRRIKPHHIATGTVNPRPQKQYPINPKAKASIQTVINDLLKQGVLIQQNSIMNTPVYPVPKPDGKWRMVLDYREVNKTIPLIAAQNQHSAGILSSIFRGKYKTTLDLSNGFWAHSITPESYWLTAFTWLGQQYCWTRLPQGFLNSPALFNADVVDLLKEVPNVQVYVDDIYISHDDPREHLEQLEKVFSLLLNAGYVVSLKKSEIAQHEVEFLGFNITKEGRGLTETFKQKLLNITPPRDLKQLQSILGLLNFARNFIPNFSELVKPLYNIIATAPGKYITWTTDNSQQLQNIISMLNSAENLEERNPEVRLIMKVNTSPSAGYIRFYNEFAKRPIMYLNYVYTKAEVKFTNTEKLLTTIHKGLIKALDLGMGQEILVYSPIVSMTKIQKTPLPERKALPIRWITWMSYLEDPRIQFHYDKTLPELQQVPTVTDDIIAKIKHPSEFSMVFYTDGSAIKHPNVNKSHNAGMGIAQVQFKPEFTVINTWSIPLGDHTAQLAEVAAVEFACKKALKIDGPVLIVTDSFYVAESVNKELPYWQSNGFFNNKKKPLKHVSKWKSIADCIQLKPDIIIIHEKGHQPTASTFHTEGNNLADKLATQGSYVVNAGKRTADGSEFEKRTADGSEFESPKKKAKVE

SEQ ID NO: 609 - protein, 2174 aa, synthetic construct
MPAAKRVKLDGGDKKYSIGLDIGTNSVGWAVITDEYKVPSKKFKVLGNTDRHSIKKNLIGALLFDSGETAEATRLKRTARRRYTRRKNRICYLQEIFSNEMAKVDDSFFHRLEESFLVEEDKKHERHPIFGNIVDEVAYHEKYPTIYHLRKKLVDSTDKADLRLIYLALAHMIKFRGHFLIEGDLNPDNSDVDKLFIQLVQTYNQLFEENPINASGVDAKAILSARLSKSRRLENLIAQLPGEKKNGLFGNLIALSLGLTPNFKSNFDLAEDAKLQLSKDTYDDDLDNLLAQIGDQYADLFLAAKNLSDAILLSDILRVNTEITKAPLSASMIKRYDEHHQDLTLLKALVRQQLPEKYKEIFFDQSKNGYAGYIDGGASQEEFYKFIKPILEKMDGTEELLVKLNREDLLRKQRTFDNGSIPHQIHLGELHAILRRQEDFYPFLKDNREKIEKILTFRIPYYVGPLARGNSRFAWMTRKSEETITPWNFEEVVDKGASAQSFIERMTNFDKNLPNEKVLPKHSLLYEYFTVYNELTKVKYVTEGMRKPAFLSGEQKKAIVDLLFKTNRKVTVKQLKEDYFKKIECFDSVEISGVEDRFNASLGTYHDLLKIIKDKDFLDNEENEDILEDIVLTLTLFEDREMIEERLKTYAHLFDDKVMKQLKRRRYTGWGRLSRKLINGIRDKQSGKTILDFLKSDGFANRNFMQLIHDDSLTFKEDIQKAQVSGQGDSLHEHIANLAGSPAIKKGILQTVKVVDELVKVMGRHKPENIVIEMARENQTTQKGQKNSRERMKRIEEGIKELGSQILKEHPVENTQLQNEKLYLYYLQNGRDMYVDQELDINRLSDYDVDHIVPQSFLKDDSIDNKVLTRSDKARGKSDNVPSEEVVKKMKNYWRQLLNAKLITQRKFDNLTKAERGGLSELDKAGFIKRQLVETRQITKHVAQILDSRMNTKYDENDKLIREVKVITLKSKLVSDFRKDFQFYKVREINNYHHAHDAYLNAVVGTALIKKYPKLESEFVYGDYKVYDVRKMIAKSEQEIGKATAKYFFYSNIMNFFKTEITLANGEIRKRPLIETNGETGEIVWDKGRDFATVRKVLSMPQVNIVKKTEVQTGGFSKESILPKRNSDKLIARKKDWDPKKYGGFDSPTVAYSVLVVAKVEKGKSKKLKSVKELLGITIMERSSFEKNPIDFLEAKGYKEVKKDLIIKLPKYSLFELENGRKRMLASAGELQKGNELALPSKYVNFLYLASHYEKLKGSPEDNEQKQLFVEQHKHYLDEIIEQISEFSKRVILADANLDKVLSAYNKHRDKPIREQAENIIHLFTLTNLGAPAAFKYFDTTIDRKRYTSTKEVLDATLIHQSITGLYETRIDLSQLGGDGGGGSPAPGSSGGMDPLQLLQPLEAEIKGTKLKAHWNSGATITCVPQAFLEEEVPIKNIWIKTIHGEKEQPVYYLTFKIQGRKVEAEVISSPYDYILVSPSDIPWLMKKPLQLTTLVPLQEYEERLLKQTMLTGSYKEKLQSLFLKYDALWQHWENQVGHRRIKPHHIATGTVNPRPQKQYPINPKAKASIQTVINDLLKQGVLIQQNSIMNTPVYPVPKPDGKWRMVLDYREVNKTIPLIAAQNQHSAGILSSIFRGKYKTTLDLSNGFWAHSITPESYWLTAFTWLGQQYCWTRLPQGFLNSPALFNADVVDLLKEVPNVQVYVDDIYISHDDPREHLEQLEKVFSLLLNAGYVVSLKKSEIAQHEVEFLGFNITKEGRGLTETFKQKLLNITPPRDLKQLQSILGLLNFARNFIPNFSELVKPLYNIIATAPGKYITWTTDNSQQLQNIISMLNSAENLEERNPEVRLIMKVNTSPSAGYIRFYNEFAKRPIMYLNYVYTKAEVKFTNTEKLLTTIHKGLIKALDLGMGQEILVYSPIVSMTKIQKTPLPERKALPIRWITWMSYLEDPRIQFHYDKTLPELQQVPTVTDDIIAKIKHPSEFSMVFYTDGSAIKHPNVNKSHNAGMGIAQVQFKPEFTVINTWSIPLGDHTAQLAEVAAVEFACKKALKIDGPVLIVTDSFYVAESVNKELPYWQSNGFFNNKKKPLKHVSKWKSIADCIQLKPDIIIIHEKGHQPTASTFHTEGNNLADKLATQGSYVVNAGKRTADGSEFEKRTADGSEFESPKKKAKVE

SEQ ID NO: 610 - protein, 2174 aa, synthetic construct
MPAAKRVKLDGGDKKYSIGLDIGTNSVGWAVITDEYKVPSKKFKVLGNTDRHSIKKNLIGALLFDSGETAEATRLKRTARRRYTRRKNRICYLQEIFSNEMAKVDDSFFHRLEESFLVEEDKKHERHPIFGNIVDEVAYHEKYPTIYHLRKKLVDSTDKADLRLIYLALAHMIKFRGHFLIEGDLNPDNSDVDKLFIQLVQTYNQLFEENPINASGVDAKAILSARLSKSRRLENLIAQLPGEKKNGLFGNLIALSLGLTPNFKSNFDLAEDAKLQLSKDTYDDDLDNLLAQIGDQYADLFLAAKNLSDAILLSDILRVNTEITKAPLSASMIKRYDEHHQDLTLLKALVRQQLPEKYKEIFFDQSKNGYAGYIDGGASQEEFYKFIKPILEKMDGTEELLVKLNREDLLRKQRTFDNGSIPHQIHLGELHAILRRQEDFYPFLKDNREKIEKILTFRIPYYVGPLARGNSRFAWMTRKSEETITPWNFEEVVDKGASAQSFIERMTNFDKNLPNEKVLPKHSLLYEYFTVYNELTKVKYVTEGMRKPAFLSGEQKKAIVDLLFKTNRKVTVKQLKEDYFKKIECFDSVEISGVEDRFNASLGTYHDLLKIIKDKDFLDNEENEDILEDIVLTLTLFEDREMIEERLKTYAHLFDDKVMKQLKRRRYTGWGRLSRKLINGIRDKQSGKTILDFLKSDGFANRNFMQLIHDDSLTFKEDIQKAQVSGQGDSLHEHIANLAGSPAIKKGILQTVKVVDELVKVMGRHKPENIVIEMARENQTTQKGQKNSRERMKRIEEGIKELGSQILKEHPVENTQLQNEKLYLYYLQNGRDMYVDQELDINRLSDYDVDHIVPQSFLKDDSIDNKVLTRSDKARGKSDNVPSEEVVKKMKNYWRQLLNAKLITQRKFDNLTKAERGGLSELDKAGFIKRQLVETRQITKHVAQILDSRMNTKYDENDKLIREVKVITLKSKLVSDFRKDFQFYKVREINNYHHAHDAYLNAVVGTALIKKYPKLESEFVYGDYKVYDVRKMIAKSEQEIGKATAKYFFYSNIMNFFKTEITLANGEIRKRPLIETNGETGEIVWDKGRDFATVRKVLSMPQVNIVKKTEVQTGGFSKESILPKRNSDKLIARKKDWDPKKYGGFDSPTVAYSVLVVAKVEKGKSKKLKSVKELLGITIMERSSFEKNPIDFLEAKGYKEVKKDLIIKLPKYSLFELENGRKRMLASAGELQKGNELALPSKYVNFLYLASHYEKLKGSPEDNEQKQLFVEQHKHYLDEIIEQISEFSKRVILADANLDKVLSAYNKHRDKPIREQAENIIHLFTLTNLGAPAAFKYFDTTIDRKRYTSTKEVLDATLIHQSITGLYETRIDLSQLGGDGGGSSGGGGGSGGMDPLQLLQPLEAEIKGTKLKAHWNSGATITCVPQAFLEEEVPIKNIWIKTIHGEKEQPVYYLTFKIQGRKVEAEVISSPYDYILVSPSDIPWLMKKPLQLTTLVPLQEYEERLLKQTMLTGSYKEKLQSLFLKYDALWQHWENQVGHRRIKPHHIATGTVNPRPQKQYPINPKAKASIQTVINDLLKQGVLIQQNSIMNTPVYPVPKPDGKWRMVLDYREVNKTIPLIAAQNQHSAGILSSIFRGKYKTTLDLSNGFWAHSITPESYWLTAFTWLGQQYCWTRLPQGFLNSPALFNADVVDLLKEVPNVQVYVDDIYISHDDPREHLEQLEKVFSLLLNAGYVVSLKKSEIAQHEVEFLGFNITKEGRGLTETFKQKLLNITPPRDLKQLQSILGLLNFARNFIPNFSELVKPLYNIIATAPGKYITWTTDNSQQLQNIISMLNSAENLEERNPEVRLIMKVNTSPSAGYIRFYNEFAKRPIMYLNYVYTKAEVKFTNTEKLLTTIHKGLIKALDLGMGQEILVYSPIVSMTKIQKTPLPERKALPIRWITWMSYLEDPRIQFHYDKTLPELQQVPTVTDDIIAKIKHPSEFSMVFYTDGSAIKHPNVNKSHNAGMGIAQVQFKPEFTVINTWSIPLGDHTAQLAEVAAVEFACKKALKIDGPVLIVTDSFYVAESVNKELPYWQSNGFFNNKKKPLKHVSKWKSIADCIQLKPDIIIIHEKGHQPTASTFHTEGNNLADKLATQGSYVVNAGKRTADGSEFEKRTADGSEFESPKKKAKVE

SEQ ID NO: 611 - protein, 2180 aa, synthetic construct
MPAAKRVKLDGGDKKYSIGLDIGTNSVGWAVITDEYKVPSKKFKVLGNTDRHSIKKNLIGALLFDSGETAEATRLKRTARRRYTRRKNRICYLQEIFSNEMAKVDDSFFHRLEESFLVEEDKKHERHPIFGNIVDEVAYHEKYPTIYHLRKKLVDSTDKADLRLIYLALAHMIKFRGHFLIEGDLNPDNSDVDKLFIQLVQTYNQLFEENPINASGVDAKAILSARLSKSRRLENLIAQLPGEKKNGLFGNLIALSLGLTPNFKSNFDLAEDAKLQLSKDTYDDDLDNLLAQIGDQYADLFLAAKNLSDAILLSDILRVNTEITKAPLSASMIKRYDEHHQDLTLLKALVRQQLPEKYKEIFFDQSKNGYAGYIDGGASQEEFYKFIKPILEKMDGTEELLVKLNREDLLRKQRTFDNGSIPHQIHLGELHAILRRQEDFYPFLKDNREKIEKILTFRIPYYVGPLARGNSRFAWMTRKSEETITPWNFEEVVDKGASAQSFIERMTNFDKNLPNEKVLPKHSLLYEYFTVYNELTKVKYVTEGMRKPAFLSGEQKKAIVDLLFKTNRKVTVKQLKEDYFKKIECFDSVEISGVEDRFNASLGTYHDLLKIIKDKDFLDNEENEDILEDIVLTLTLFEDREMIEERLKTYAHLFDDKVMKQLKRRRYTGWGRLSRKLINGIRDKQSGKTILDFLKSDGFANRNFMQLIHDDSLTFKEDIQKAQVSGQGDSLHEHIANLAGSPAIKKGILQTVKVVDELVKVMGRHKPENIVIEMARENQTTQKGQKNSRERMKRIEEGIKELGSQILKEHPVENTQLQNEKLYLYYLQNGRDMYVDQELDINRLSDYDVDHIVPQSFLKDDSIDNKVLTRSDKARGKSDNVPSEEVVKKMKNYWRQLLNAKLITQRKFDNLTKAERGGLSELDKAGFIKRQLVETRQITKHVAQILDSRMNTKYDENDKLIREVKVITLKSKLVSDFRKDFQFYKVREINNYHHAHDAYLNAVVGTALIKKYPKLESEFVYGDYKVYDVRKMIAKSEQEIGKATAKYFFYSNIMNFFKTEITLANGEIRKRPLIETNGETGEIVWDKGRDFATVRKVLSMPQVNIVKKTEVQTGGFSKESILPKRNSDKLIARKKDWDPKKYGGFDSPTVAYSVLVVAKVEKGKSKKLKSVKELLGITIMERSSFEKNPIDFLEAKGYKEVKKDLIIKLPKYSLFELENGRKRMLASAGELQKGNELALPSKYVNFLYLASHYEKLKGSPEDNEQKQLFVEQHKHYLDEIIEQISEFSKRVILADANLDKVLSAYNKHRDKPIREQAENIIHLFTLTNLGAPAAFKYFDTTIDRKRYTSTKEVLDATLIHQSITGLYETRIDLSQLGGDGGGGGGSEAAAKGGGGSGGMDPLQLLQPLEAEIKGTKLKAHWNSGATITCVPQAFLEEEVPIKNIWIKTIHGEKEQPVYYLTFKIQGRKVEAEVISSPYDYILVSPSDIPWLMKKPLQLTTLVPLQEYEERLLKQTMLTGSYKEKLQSLFLKYDALWQHWENQVGHRRIKPHHIATGTVNPRPQKQYPINPKAKASIQTVINDLLKQGVLIQQNSIMNTPVYPVPKPDGKWRMVLDYREVNKTIPLIAAQNQHSAGILSSIFRGKYKTTLDLSNGFWAHSITPESYWLTAFTWLGQQYCWTRLPQGFLNSPALFNADVVDLLKEVPNVQVYVDDIYISHDDPREHLEQLEKVFSLLLNAGYVVSLKKSEIAQHEVEFLGFNITKEGRGLTETFKQKLLNITPPRDLKQLQSILGLLNFARNFIPNFSELVKPLYNIIATAPGKYITWTTDNSQQLQNIISMLNSAENLEERNPEVRLIMKVNTSPSAGYIRFYNEFAKRPIMYLNYVYTKAEVKFTNTEKLLTTIHKGLIKALDLGMGQEILVYSPIVSMTKIQKTPLPERKALPIRWITWMSYLEDPRIQFHYDKTLPELQQVPTVTDDIIAKIKHPSEFSMVFYTDGSAIKHPNVNKSHNAGMGIAQVQFKPEFTVINTWSIPLGDHTAQLAEVAAVEFACKKALKIDGPVLIVTDSFYVAESVNKELPYWQSNGFFNNKKKPLKHVSKWKSIADCIQLKPDIIIIHEKGHQPTASTFHTEGNNLADKLATQGSYVVNAGKRTADGSEFEKRTADGSEFESPKKKAKVE

SEQ ID NO: 612 - protein, 2174 aa, synthetic construct
MPAAKRVKLDGGDKKYSIGLDIGTNSVGWAVITDEYKVPSKKFKVLGNTDRHSIKKNLIGALLFDSGETAEATRLKRTARRRYTRRKNRICYLQEIFSNEMAKVDDSFFHRLEESFLVEEDKKHERHPIFGNIVDEVAYHEKYPTIYHLRKKLVDSTDKADLRLIYLALAHMIKFRGHFLIEGDLNPDNSDVDKLFIQLVQTYNQLFEENPINASGVDAKAILSARLSKSRRLENLIAQLPGEKKNGLFGNLIALSLGLTPNFKSNFDLAEDAKLQLSKDTYDDDLDNLLAQIGDQYADLFLAAKNLSDAILLSDILRVNTEITKAPLSASMIKRYDEHHQDLTLLKALVRQQLPEKYKEIFFDQSKNGYAGYIDGGASQEEFYKFIKPILEKMDGTEELLVKLNREDLLRKQRTFDNGSIPHQIHLGELHAILRRQEDFYPFLKDNREKIEKILTFRIPYYVGPLARGNSRFAWMTRKSEETITPWNFEEVVDKGASAQSFIERMTNFDKNLPNEKVLPKHSLLYEYFTVYNELTKVKYVTEGMRKPAFLSGEQKKAIVDLLFKTNRKVTVKQLKEDYFKKIECFDSVEISGVEDRFNASLGTYHDLLKIIKDKDFLDNEENEDILEDIVLTLTLFEDREMIEERLKTYAHLFDDKVMKQLKRRRYTGWGRLSRKLINGIRDKQSGKTILDFLKSDGFANRNFMQLIHDDSLTFKEDIQKAQVSGQGDSLHEHIANLAGSPAIKKGILQTVKVVDELVKVMGRHKPENIVIEMARENQTTQKGQKNSRERMKRIEEGIKELGSQILKEHPVENTQLQNEKLYLYYLQNGRDMYVDQELDINRLSDYDVDHIVPQSFLKDDSIDNKVLTRSDKARGKSDNVPSEEVVKKMKNYWRQLLNAKLITQRKFDNLTKAERGGLSELDKAGFIKRQLVETRQITKHVAQILDSRMNTKYDENDKLIREVKVITLKSKLVSDFRKDFQFYKVREINNYHHAHDAYLNAVVGTALIKKYPKLESEFVYGDYKVYDVRKMIAKSEQEIGKATAKYFFYSNIMNFFKTEITLANGEIRKRPLIETNGETGEIVWDKGRDFATVRKVLSMPQVNIVKKTEVQTGGFSKESILPKRNSDKLIARKKDWDPKKYGGFDSPTVAYSVLVVAKVEKGKSKKLKSVKELLGITIMERSSFEKNPIDFLEAKGYKEVKKDLIIKLPKYSLFELENGRKRMLASAGELQKGNELALPSKYVNFLYLASHYEKLKGSPEDNEQKQLFVEQHKHYLDEIIEQISEFSKRVILADANLDKVLSAYNKHRDKPIREQAENIIHLFTLTNLGAPAAFKYFDTTIDRKRYTSTKEVLDATLIHQSITGLYETRIDLSQLGGDGGGSSPAPGGGGGMDPLQLLQPLEAEIKGTKLKAHWNSGATITCVPQAFLEEEVPIKNIWIKTIHGEKEQPVYYLTFKIQGRKVEAEVISSPYDYILVSPSDIPWLMKKPLQLTTLVPLQEYEERLLKQTMLTGSYKEKLQSLFLKYDALWQHWENQVGHRRIKPHHIATGTVNPRPQKQYPINPKAKASIQTVINDLLKQGVLIQQNSIMNTPVYPVPKPDGKWRMVLDYREVNKTIPLIAAQNQHSAGILSSIFRGKYKTTLDLSNGFWAHSITPESYWLTAFTWLGQQYCWTRLPQGFLNSPALFNADVVDLLKEVPNVQVYVDDIYISHDDPREHLEQLEKVFSLLLNAGYVVSLKKSEIAQHEVEFLGFNITKEGRGLTETFKQKLLNITPPRDLKQLQSILGLLNFARNFIPNFSELVKPLYNIIATAPGKYITWTTDNSQQLQNIISMLNSAENLEERNPEVRLIMKVNTSPSAGYIRFYNEFAKRPIMYLNYVYTKAEVKFTNTEKLLTTIHKGLIKALDLGMGQEILVYSPIVSMTKIQKTPLPERKALPIRWITWMSYLEDPRIQFHYDKTLPELQQVPTVTDDIIAKIKHPSEFSMVFYTDGSAIKHPNVNKSHNAGMGIAQVQFKPEFTVINTWSIPLGDHTAQLAEVAAVEFACKKALKIDGPVLIVTDSFYVAESVNKELPYWQSNGFFNNKKKPLKHVSKWKSIADCIQLKPDIIIIHEKGHQPTASTFHTEGNNLADKLATQGSYVVNAGKRTADGSEFEKRTADGSEFESPKKKAKVE

SEQ ID NO: 613 - protein, 2176 aa, synthetic construct
MPAAKRVKLDGGDKKYSIGLDIGTNSVGWAVITDEYKVPSKKFKVLGNTDRHSIKKNLIGALLFDSGETAEATRLKRTARRRYTRRKNRICYLQEIFSNEMAKVDDSFFHRLEESFLVEEDKKHERHPIFGNIVDEVAYHEKYPTIYHLRKKLVDSTDKADLRLIYLALAHMIKFRGHFLIEGDLNPDNSDVDKLFIQLVQTYNQLFEENPINASGVDAKAILSARLSKSRRLENLIAQLPGEKKNGLFGNLIALSLGLTPNFKSNFDLAEDAKLQLSKDTYDDDLDNLLAQIGDQYADLFLAAKNLSDAILLSDILRVNTEITKAPLSASMIKRYDEHHQDLTLLKALVRQQLPEKYKEIFFDQSKNGYAGYIDGGASQEEFYKFIKPILEKMDGTEELLVKLNREDLLRKQRTFDNGSIPHQIHLGELHAILRRQEDFYPFLKDNREKIEKILTFRIPYYVGPLARGNSRFAWMTRKSEETITPWNFEEVVDKGASAQSFIERMTNFDKNLPNEKVLPKHSLLYEYFTVYNELTKVKYVTEGMRKPAFLSGEQKKAIVDLLFKTNRKVTVKQLKEDYFKKIECFDSVEISGVEDRFNASLGTYHDLLKIIKDKDFLDNEENEDILEDIVLTLTLFEDREMIEERLKTYAHLFDDKVMKQLKRRRYTGWGRLSRKLINGIRDKQSGKTILDFLKSDGFANRNFMQLIHDDSLTFKEDIQKAQVSGQGDSLHEHIANLAGSPAIKKGILQTVKVVDELVKVMGRHKPENIVIEMARENQTTQKGQKNSRERMKRIEEGIKELGSQILKEHPVENTQLQNEKLYLYYLQNGRDMYVDQELDINRLSDYDVDHIVPQSFLKDDSIDNKVLTRSDKARGKSDNVPSEEVVKKMKNYWRQLLNAKLITQRKFDNLTKAERGGLSELDKAGFIKRQLVETRQITKHVAQILDSRMNTKYDENDKLIREVKVITLKSKLVSDFRKDFQFYKVREINNYHHAHDAYLNAVVGTALIKKYPKLESEFVYGDYKVYDVRKMIAKSEQEIGKATAKYFFYSNIMNFFKTEITLANGEIRKRPLIETNGETGEIVWDKGRDFATVRKVLSMPQVNIVKKTEVQTGGFSKESILPKRNSDKLIARKKDWDPKKYGGFDSPTVAYSVLVVAKVEKGKSKKLKSVKELLGITIMERSSFEKNPIDFLEAKGYKEVKKDLIIKLPKYSLFELENGRKRMLASAGELQKGNELALPSKYVNFLYLASHYEKLKGSPEDNEQKQLFVEQHKHYLDEIIEQISEFSKRVILADANLDKVLSAYNKHRDKPIREQAENIIHLFTLTNLGAPAAFKYFDTTIDRKRYTSTKEVLDATLIHQSITGLYETRIDLSQLGGDGGGGGGSSEAAAKGGMDPLQLLQPLEAEIKGTKLKAHWNSGATITCVPQAFLEEEVPIKNIWIKTIHGEKEQPVYYLTFKIQGRKVEAEVISSPYDYILVSPSDIPWLMKKPLQLTTLVPLQEYEERLLKQTMLTGSYKEKLQSLFLKYDALWQHWENQVGHRRIKPHHIATGTVNPRPQKQYPINPKAKASIQTVINDLLKQGVLIQQNSIMNTPVYPVPKPDGKWRMVLDYREVNKTIPLIAAQNQHSAGILSSIFRGKYKTTLDLSNGFWAHSITPESYWLTAFTWLGQQYCWTRLPQGFLNSPALFNADVVDLLKEVPNVQVYVDDIYISHDDPREHLEQLEKVFSLLLNAGYVVSLKKSEIAQHEVEFLGFNITKEGRGLTETFKQKLLNITPPRDLKQLQSILGLLNFARNFIPNFSELVKPLYNIIATAPGKYITWTTDNSQQLQNIISMLNSAENLEERNPEVRLIMKVNTSPSAGYIRFYNEFAKRPIMYLNYVYTKAEVKFTNTEKLLTTIHKGLIKALDLGMGQEILVYSPIVSMTKIQKTPLPERKALPIRWITWMSYLEDPRIQFHYDKTLPELQQVPTVTDDIIAKIKHPSEFSMVFYTDGSAIKHPNVNKSHNAGMGIAQVQFKPEFTVINTWSIPLGDHTAQLAEVAAVEFACKKALKIDGPVLIVTDSFYVAESVNKELPYWQSNGFFNNKKKPLKHVSKWKSIADCIQLKPDIIIIHEKGHQPTASTFHTEGNNLADKLATQGSYVVNAGKRTADGSEFEKRTADGSEFESPKKKAKVE

SEQ ID NO: 614 - protein, 2176 aa, synthetic construct
MPAAKRVKLDGGDKKYSIGLDIGTNSVGWAVITDEYKVPSKKFKVLGNTDRHSIKKNLIGALLFDSGETAEATRLKRTARRRYTRRKNRICYLQEIFSNEMAKVDDSFFHRLEESFLVEEDKKHERHPIFGNIVDEVAYHEKYPTIYHLRKKLVDSTDKADLRLIYLALAHMIKFRGHFLIEGDLNPDNSDVDKLFIQLVQTYNQLFEENPINASGVDAKAILSARLSKSRRLENLIAQLPGEKKNGLFGNLIALSLGLTPNFKSNFDLAEDAKLQLSKDTYDDDLDNLLAQIGDQYADLFLAAKNLSDAILLSDILRVNTEITKAPLSASMIKRYDEHHQDLTLLKALVRQQLPEKYKEIFFDQSKNGYAGYIDGGASQEEFYKFIKPILEKMDGTEELLVKLNREDLLRKQRTFDNGSIPHQIHLGELHAILRRQEDFYPFLKDNREKIEKILTFRIPYYVGPLARGNSRFAWMTRKSEETITPWNFEEVVDKGASAQSFIERMTNFDKNLPNEKVLPKHSLLYEYFTVYNELTKVKYVTEGMRKPAFLSGEQKKAIVDLLFKTNRKVTVKQLKEDYFKKIECFDSVEISGVEDRFNASLGTYHDLLKIIKDKDFLDNEENEDILEDIVLTLTLFEDREMIEERLKTYAHLFDDKVMKQLKRRRYTGWGRLSRKLINGIRDKQSGKTILDFLKSDGFANRNFMQLIHDDSLTFKEDIQKAQVSGQGDSLHEHIANLAGSPAIKKGILQTVKVVDELVKVMGRHKPENIVIEMARENQTTQKGQKNSRERMKRIEEGIKELGSQILKEHPVENTQLQNEKLYLYYLQNGRDMYVDQELDINRLSDYDVDHIVPQSFLKDDSIDNKVLTRSDKARGKSDNVPSEEVVKKMKNYWRQLLNAKLITQRKFDNLTKAERGGLSELDKAGFIKRQLVETRQITKHVAQILDSRMNTKYDENDKLIREVKVITLKSKLVSDFRKDFQFYKVREINNYHHAHDAYLNAVVGTALIKKYPKLESEFVYGDYKVYDVRKMIAKSEQEIGKATAKYFFYSNIMNFFKTEITLANGEIRKRPLIETNGETGEIVWDKGRDFATVRKVLSMPQVNIVKKTEVQTGGFSKESILPKRNSDKLIARKKDWDPKKYGGFDSPTVAYSVLVVAKVEKGKSKKLKSVKELLGITIMERSSFEKNPIDFLEAKGYKEVKKDLIIKLPKYSLFELENGRKRMLASAGELQKGNELALPSKYVNFLYLASHYEKLKGSPEDNEQKQLFVEQHKHYLDEIIEQISEFSKRVILADANLDKVLSAYNKHRDKPIREQAENIIHLFTLTNLGAPAAFKYFDTTIDRKRYTSTKEVLDATLIHQSITGLYETRIDLSQLGGDGGGGSGSSEAAAKGGMDPLQLLQPLEAEIKGTKLKAHWNSGATITCVPQAFLEEEVPIKNIWIKTIHGEKEQPVYYLTFKIQGRKVEAEVISSPYDYILVSPSDIPWLMKKPLQLTTLVPLQEYEERLLKQTMLTGSYKEKLQSLFLKYDALWQHWENQVGHRRIKPHHIATGTVNPRPQKQYPINPKAKASIQTVINDLLKQGVLIQQNSIMNTPVYPVPKPDGKWRMVLDYREVNKTIPLIAAQNQHSAGILSSIFRGKYKTTLDLSNGFWAHSITPESYWLTAFTWLGQQYCWTRLPQGFLNSPALFNADVVDLLKEVPNVQVYVDDIYISHDDPREHLEQLEKVFSLLLNAGYVVSLKKSEIAQHEVEFLGFNITKEGRGLTETFKQKLLNITPPRDLKQLQSILGLLNFARNFIPNFSELVKPLYNIIATAPGKYITWTTDNSQQLQNIISMLNSAENLEERNPEVRLIMKVNTSPSAGYIRFYNEFAKRPIMYLNYVYTKAEVKFTNTEKLLTTIHKGLIKALDLGMGQEILVYSPIVSMTKIQKTPLPERKALPIRWITWMSYLEDPRIQFHYDKTLPELQQVPTVTDDIIAKIKHPSEFSMVFYTDGSAIKHPNVNKSHNAGMGIAQVQFKPEFTVINTWSIPLGDHTAQLAEVAAVEFACKKALKIDGPVLIVTDSFYVAESVNKELPYWQSNGFFNNKKKPLKHVSKWKSIADCIQLKPDIIIIHEKGHQPTASTFHTEGNNLADKLATQGSYVVNAGKRTADGSEFEKRTADGSEFESPKKKAKVE

SEQ ID NO: 615 - protein, 2185 aa, synthetic construct
MPAAKRVKLDGGDKKYSIGLDIGTNSVGWAVITDEYKVPSKKFKVLGNTDRHSIKKNLIGALLFDSGETAEATRLKRTARRRYTRRKNRICYLQEIFSNEMAKVDDSFFHRLEESFLVEEDKKHERHPIFGNIVDEVAYHEKYPTIYHLRKKLVDSTDKADLRLIYLALAHMIKFRGHFLIEGDLNPDNSDVDKLFIQLVQTYNQLFEENPINASGVDAKAILSARLSKSRRLENLIAQLPGEKKNGLFGNLIALSLGLTPNFKSNFDLAEDAKLQLSKDTYDDDLDNLLAQIGDQYADLFLAAKNLSDAILLSDILRVNTEITKAPLSASMIKRYDEHHQDLTLLKALVRQQLPEKYKEIFFDQSKNGYAGYIDGGASQEEFYKFIKPILEKMDGTEELLVKLNREDLLRKQRTFDNGSIPHQIHLGELHAILRRQEDFYPFLKDNREKIEKILTFRIPYYVGPLARGNSRFAWMTRKSEETITPWNFEEVVDKGASAQSFIERMTNFDKNLPNEKVLPKHSLLYEYFTVYNELTKVKYVTEGMRKPAFLSGEQKKAIVDLLFKTNRKVTVKQLKEDYFKKIECFDSVEISGVEDRFNASLGTYHDLLKIIKDKDFLDNEENEDILEDIVLTLTLFEDREMIEERLKTYAHLFDDKVMKQLKRRRYTGWGRLSRKLINGIRDKQSGKTILDFLKSDGFANRNFMQLIHDDSLTFKEDIQKAQVSGQGDSLHEHIANLAGSPAIKKGILQTVKVVDELVKVMGRHKPENIVIEMARENQTTQKGQKNSRERMKRIEEGIKELGSQILKEHPVENTQLQNEKLYLYYLQNGRDMYVDQELDINRLSDYDVDHIVPQSFLKDDSIDNKVLTRSDKARGKSDNVPSEEVVKKMKNYWRQLLNAKLITQRKFDNLTKAERGGLSELDKAGFIKRQLVETRQITKHVAQILDSRMNTKYDENDKLIREVKVITLKSKLVSDFRKDFQFYKVREINNYHHAHDAYLNAVVGTALIKKYPKLESEFVYGDYKVYDVRKMIAKSEQEIGKATAKYFFYSNIMNFFKTEITLANGEIRKRPLIETNGETGEIVWDKGRDFATVRKVLSMPQVNIVKKTEVQTGGFSKESILPKRNSDKLIARKKDWDPKKYGGFDSPTVAYSVLVVAKVEKGKSKKLKSVKELLGITIMERSSFEKNPIDFLEAKGYKEVKKDLIIKLPKYSLFELENGRKRMLASAGELQKGNELALPSKYVNFLYLASHYEKLKGSPEDNEQKQLFVEQHKHYLDEIIEQISEFSKRVILADANLDKVLSAYNKHRDKPIREQAENIIHLFTLTNLGAPAAFKYFDTTIDRKRYTSTKEVLDATLIHQSITGLYETRIDLSQLGGDGGGGGGSGGGGSGGGGSGGGGSGGMDPLQLLQPLEAEIKGTKLKAHWNSGATITCVPQAFLEEEVPIKNIWIKTIHGEKEQPVYYLTFKIQGRKVEAEVISSPYDYILVSPSDIPWLMKKPLQLTTLVPLQEYEERLLKQTMLTGSYKEKLQSLFLKYDALWQHWENQVGHRRIKPHHIATGTVNPRPQKQYPINPKAKASIQTVINDLLKQGVLIQQNSIMNTPVYPVPKPDGKWRMVLDYREVNKTIPLIAAQNQHSAGILSSIFRGKYKTTLDLSNGFWAHSITPESYWLTAFTWLGQQYCWTRLPQGFLNSPALFNADVVDLLKEVPNVQVYVDDIYISHDDPREHLEQLEKVFSLLLNAGYVVSLKKSEIAQHEVEFLGFNITKEGRGLTETFKQKLLNITPPRDLKQLQSILGLLNFARNFIPNFSELVKPLYNIIATAPGKYITWTTDNSQQLQNIISMLNSAENLEERNPEVRLIMKVNTSPSAGYIRFYNEFAKRPIMYLNYVYTKAEVKFTNTEKLLTTIHKGLIKALDLGMGQEILVYSPIVSMTKIQKTPLPERKALPIRWITWMSYLEDPRIQFHYDKTLPELQQVPTVTDDIIAKIKHPSEFSMVFYTDGSAIKHPNVNKSHNAGMGIAQVQFKPEFTVINTWSIPLGDHTAQLAEVAAVEFACKKALKIDGPVLIVTDSFYVAESVNKELPYWQSNGFFNNKKKPLKHVSKWKSIADCIQLKPDIIIIHEKGHQPTASTFHTEGNNLADKLATQGSYVVNAGKRTADGSEFEKRTADGSEFESPKKKAKVE

SEQ ID NO: 616 - protein, 2176 aa, synthetic construct
MPAAKRVKLDGGDKKYSIGLDIGTNSVGWAVITDEYKVPSKKFKVLGNTDRHSIKKNLIGALLFDSGETAEATRLKRTARRRYTRRKNRICYLQEIFSNEMAKVDDSFFHRLEESFLVEEDKKHERHPIFGNIVDEVAYHEKYPTIYHLRKKLVDSTDKADLRLIYLALAHMIKFRGHFLIEGDLNPDNSDVDKLFIQLVQTYNQLFEENPINASGVDAKAILSARLSKSRRLENLIAQLPGEKKNGLFGNLIALSLGLTPNFKSNFDLAEDAKLQLSKDTYDDDLDNLLAQIGDQYADLFLAAKNLSDAILLSDILRVNTEITKAPLSASMIKRYDEHHQDLTLLKALVRQQLPEKYKEIFFDQSKNGYAGYIDGGASQEEFYKFIKPILEKMDGTEELLVKLNREDLLRKQRTFDNGSIPHQIHLGELHAILRRQEDFYPFLKDNREKIEKILTFRIPYYVGPLARGNSRFAWMTRKSEETITPWNFEEVVDKGASAQSFIERMTNFDKNLPNEKVLPKHSLLYEYFTVYNELTKVKYVTEGMRKPAFLSGEQKKAIVDLLFKTNRKVTVKQLKEDYFKKIECFDSVEISGVEDRFNASLGTYHDLLKIIKDKDFLDNEENEDILEDIVLTLTLFEDREMIEERLKTYAHLFDDKVMKQLKRRRYTGWGRLSRKLINGIRDKQSGKTILDFLKSDGFANRNFMQLIHDDSLTFKEDIQKAQVSGQGDSLHEHIANLAGSPAIKKGILQTVKVVDELVKVMGRHKPENIVIEMARENQTTQKGQKNSRERMKRIEEGIKELGSQILKEHPVENTQLQNEKLYLYYLQNGRDMYVDQELDINRLSDYDVDHIVPQSFLKDDSIDNKVLTRSDKARGKSDNVPSEEVVKKMKNYWRQLLNAKLITQRKFDNLTKAERGGLSELDKAGFIKRQLVETRQITKHVAQILDSRMNTKYDENDKLIREVKVITLKSKLVSDFRKDFQFYKVREINNYHHAHDAYLNAVVGTALIKKYPKLESEFVYGDYKVYDVRKMIAKSEQEIGKATAKYFFYSNIMNFFKTEITLANGEIRKRPLIETNGETGEIVWDKGRDFATVRKVLSMPQVNIVKKTEVQTGGFSKESILPKRNSDKLIARKKDWDPKKYGGFDSPTVAYSVLVVAKVEKGKSKKLKSVKELLGITIMERSSFEKNPIDFLEAKGYKEVKKDLIIKLPKYSLFELENGRKRMLASAGELQKGNELALPSKYVNFLYLASHYEKLKGSPEDNEQKQLFVEQHKHYLDEIIEQISEFSKRVILADANLDKVLSAYNKHRDKPIREQAENIIHLFTLTNLGAPAAFKYFDTTIDRKRYTSTKEVLDATLIHQSITGLYETRIDLSQLGGDGGPAPEAAAKGGGGGMDPLQLLQPLEAEIKGTKLKAHWNSGATITCVPQAFLEEEVPIKNIWIKTIHGEKEQPVYYLTFKIQGRKVEAEVISSPYDYILVSPSDIPWLMKKPLQLTTLVPLQEYEERLLKQTMLTGSYKEKLQSLFLKYDALWQHWENQVGHRRIKPHHIATGTVNPRPQKQYPINPKAKASIQTVINDLLKQGVLIQQNSIMNTPVYPVPKPDGKWRMVLDYREVNKTIPLIAAQNQHSAGILSSIFRGKYKTTLDLSNGFWAHSITPESYWLTAFTWLGQQYCWTRLPQGFLNSPALFNADVVDLLKEVPNVQVYVDDIYISHDDPREHLEQLEKVFSLLLNAGYVVSLKKSEIAQHEVEFLGFNITKEGRGLTETFKQKLLNITPPRDLKQLQSILGLLNFARNFIPNFSELVKPLYNIIATAPGKYITWTTDNSQQLQNIISMLNSAENLEERNPEVRLIMKVNTSPSAGYIRFYNEFAKRPIMYLNYVYTKAEVKFTNTEKLLTTIHKGLIKALDLGMGQEILVYSPIVSMTKIQKTPLPERKALPIRWITWMSYLEDPRIQFHYDKTLPELQQVPTVTDDIIAKIKHPSEFSMVFYTDGSAIKHPNVNKSHNAGMGIAQVQFKPEFTVINTWSIPLGDHTAQLAEVAAVEFACKKALKIDGPVLIVTDSFYVAESVNKELPYWQSNGFFNNKKKPLKHVSKWKSIADCIQLKPDIIIIHEKGHQPTASTFHTEGNNLADKLATQGSYVVNAGKRTADGSEFEKRTADGSEFESPKKKAKVE

SEQ ID NO: 617 - protein, 2174 aa, synthetic construct
MPAAKRVKLDGGDKKYSIGLDIGTNSVGWAVITDEYKVPSKKFKVLGNTDRHSIKKNLIGALLFDSGETAEATRLKRTARRRYTRRKNRICYLQEIFSNEMAKVDDSFFHRLEESFLVEEDKKHERHPIFGNIVDEVAYHEKYPTIYHLRKKLVDSTDKADLRLIYLALAHMIKFRGHFLIEGDLNPDNSDVDKLFIQLVQTYNQLFEENPINASGVDAKAILSARLSKSRRLENLIAQLPGEKKNGLFGNLIALSLGLTPNFKSNFDLAEDAKLQLSKDTYDDDLDNLLAQIGDQYADLFLAAKNLSDAILLSDILRVNTEITKAPLSASMIKRYDEHHQDLTLLKALVRQQLPEKYKEIFFDQSKNGYAGYIDGGASQEEFYKFIKPILEKMDGTEELLVKLNREDLLRKQRTFDNGSIPHQIHLGELHAILRRQEDFYPFLKDNREKIEKILTFRIPYYVGPLARGNSRFAWMTRKSEETITPWNFEEVVDKGASAQSFIERMTNFDKNLPNEKVLPKHSLLYEYFTVYNELTKVKYVTEGMRKPAFLSGEQKKAIVDLLFKTNRKVTVKQLKEDYFKKIECFDSVEISGVEDRFNASLGTYHDLLKIIKDKDFLDNEENEDILEDIVLTLTLFEDREMIEERLKTYAHLFDDKVMKQLKRRRYTGWGRLSRKLINGIRDKQSGKTILDFLKSDGFANRNFMQLIHDDSLTFKEDIQKAQVSGQGDSLHEHIANLAGSPAIKKGILQTVKVVDELVKVMGRHKPENIVIEMARENQTTQKGQKNSRERMKRIEEGIKELGSQILKEHPVENTQLQNEKLYLYYLQNGRDMYVDQELDINRLSDYDVDHIVPQSFLKDDSIDNKVLTRSDKARGKSDNVPSEEVVKKMKNYWRQLLNAKLITQRKFDNLTKAERGGLSELDKAGFIKRQLVETRQITKHVAQILDSRMNTKYDENDKLIREVKVITLKSKLVSDFRKDFQFYKVREINNYHHAHDAYLNAVVGTALIKKYPKLESEFVYGDYKVYDVRKMIAKSEQEIGKATAKYFFYSNIMNFFKTEITLANGEIRKRPLIETNGETGEIVWDKGRDFATVRKVLSMPQVNIVKKTEVQTGGFSKESILPKRNSDKLIARKKDWDPKKYGGFDSPTVAYSVLVVAKVEKGKSKKLKSVKELLGITIMERSSFEKNPIDFLEAKGYKEVKKDLIIKLPKYSLFELENGRKRMLASAGELQKGNELALPSKYVNFLYLASHYEKLKGSPEDNEQKQLFVEQHKHYLDEIIEQISEFSKRVILADANLDKVLSAYNKHRDKPIREQAENIIHLFTLTNLGAPAAFKYFDTTIDRKRYTSTKEVLDATLIHQSITGLYETRIDLSQLGGDGGPAPGSSGGGGGMDPLQLLQPLEAEIKGTKLKAHWNSGATITCVPQAFLEEEVPIKNIWIKTIHGEKEQPVYYLTFKIQGRKVEAEVISSPYDYILVSPSDIPWLMKKPLQLTTLVPLQEYEERLLKQTMLTGSYKEKLQSLFLKYDALWQHWENQVGHRRIKPHHIATGTVNPRPQKQYPINPKAKASIQTVINDLLKQGVLIQQNSIMNTPVYPVPKPDGKWRMVLDYREVNKTIPLIAAQNQHSAGILSSIFRGKYKTTLDLSNGFWAHSITPESYWLTAFTWLGQQYCWTRLPQGFLNSPALFNADVVDLLKEVPNVQVYVDDIYISHDDPREHLEQLEKVFSLLLNAGYVVSLKKSEIAQHEVEFLGFNITKEGRGLTETFKQKLLNITPPRDLKQLQSILGLLNFARNFIPNFSELVKPLYNIIATAPGKYITWTTDNSQQLQNIISMLNSAENLEERNPEVRLIMKVNTSPSAGYIRFYNEFAKRPIMYLNYVYTKAEVKFTNTEKLLTTIHKGLIKALDLGMGQEILVYSPIVSMTKIQKTPLPERKALPIRWITWMSYLEDPRIQFHYDKTLPELQQVPTVTDDIIAKIKHPSEFSMVFYTDGSAIKHPNVNKSHNAGMGIAQVQFKPEFTVINTWSIPLGDHTAQLAEVAAVEFACKKALKIDGPVLIVTDSFYVAESVNKELPYWQSNGFFNNKKKPLKHVSKWKSIADCIQLKPDIIIIHEKGHQPTASTFHTEGNNLADKLATQGSYVVNAGKRTADGSEFEKRTADGSEFESPKKKAKVE

SEQ ID NO: 618 - protein, 2174 aa, synthetic construct
MPAAKRVKLDGGDKKYSIGLDIGTNSVGWAVITDEYKVPSKKFKVLGNTDRHSIKKNLIGALLFDSGETAEATRLKRTARRRYTRRKNRICYLQEIFSNEMAKVDDSFFHRLEESFLVEEDKKHERHPIFGNIVDEVAYHEKYPTIYHLRKKLVDSTDKADLRLIYLALAHMIKFRGHFLIEGDLNPDNSDVDKLFIQLVQTYNQLFEENPINASGVDAKAILSARLSKSRRLENLIAQLPGEKKNGLFGNLIALSLGLTPNFKSNFDLAEDAKLQLSKDTYDDDLDNLLAQIGDQYADLFLAAKNLSDAILLSDILRVNTEITKAPLSASMIKRYDEHHQDLTLLKALVRQQLPEKYKEIFFDQSKNGYAGYIDGGASQEEFYKFIKPILEKMDGTEELLVKLNREDLLRKQRTFDNGSIPHQIHLGELHAILRRQEDFYPFLKDNREKIEKILTFRIPYYVGPLARGNSRFAWMTRKSEETITPWNFEEVVDKGASAQSFIERMTNFDKNLPNEKVLPKHSLLYEYFTVYNELTKVKYVTEGMRKPAFLSGEQKKAIVDLLFKTNRKVTVKQLKEDYFKKIECFDSVEISGVEDRFNASLGTYHDLLKIIKDKDFLDNEENEDILEDIVLTLTLFEDREMIEERLKTYAHLFDDKVMKQLKRRRYTGWGRLSRKLINGIRDKQSGKTILDFLKSDGFANRNFMQLIHDDSLTFKEDIQKAQVSGQGDSLHEHIANLAGSPAIKKGILQTVKVVDELVKVMGRHKPENIVIEMARENQTTQKGQKNSRERMKRIEEGIKELGSQILKEHPVENTQLQNEKLYLYYLQNGRDMYVDQELDINRLSDYDVDHIVPQSFLKDDSIDNKVLTRSDKARGKSDNVPSEEVVKKMKNYWRQLLNAKLITQRKFDNLTKAERGGLSELDKAGFIKRQLVETRQITKHVAQILDSRMNTKYDENDKLIREVKVITLKSKLVSDFRKDFQFYKVREINNYHHAHDAYLNAVVGTALIKKYPKLESEFVYGDYKVYDVRKMIAKSEQEIGKATAKYFFYSNIMNFFKTEITLANGEIRKRPLIETNGETGEIVWDKGRDFATVRKVLSMPQVNIVKKTEVQTGGFSKESILPKRNSDKLIARKKDWDPKKYGGFDSPTVAYSVLVVAKVEKGKSKKLKSVKELLGITIMERSSFEKNPIDFLEAKGYKEVKKDLIIKLPKYSLFELENGRKRMLASAGELQKGNELALPSKYVNFLYLASHYEKLKGSPEDNEQKQLFVEQHKHYLDEIIEQISEFSKRVILADANLDKVLSAYNKHRDKPIREQAENIIHLFTLTNLGAPAAFKYFDTTIDRKRYTSTKEVLDATLIHQSITGLYETRIDLSQLGGDGGPAPGGSGGGGGMDPLQLLQPLEAEIKGTKLKAHWNSGATITCVPQAFLEEEVPIKNIWIKTIHGEKEQPVYYLTFKIQGRKVEAEVISSPYDYILVSPSDIPWLMKKPLQLTTLVPLQEYEERLLKQTMLTGSYKEKLQSLFLKYDALWQHWENQVGHRRIKPHHIATGTVNPRPQKQYPINPKAKASIQTVINDLLKQGVLIQQNSIMNTPVYPVPKPDGKWRMVLDYREVNKTIPLIAAQNQHSAGILSSIFRGKYKTTLDLSNGFWAHSITPESYWLTAFTWLGQQYCWTRLPQGFLNSPALFNADVVDLLKEVPNVQVYVDDIYISHDDPREHLEQLEKVFSLLLNAGYVVSLKKSEIAQHEVEFLGFNITKEGRGLTETFKQKLLNITPPRDLKQLQSILGLLNFARNFIPNFSELVKPLYNIIATAPGKYITWTTDNSQQLQNIISMLNSAENLEERNPEVRLIMKVNTSPSAGYIRFYNEFAKRPIMYLNYVYTKAEVKFTNTEKLLTTIHKGLIKALDLGMGQEILVYSPIVSMTKIQKTPLPERKALPIRWITWMSYLEDPRIQFHYDKTLPELQQVPTVTDDIIAKIKHPSEFSMVFYTDGSAIKHPNVNKSHNAGMGIAQVQFKPEFTVINTWSIPLGDHTAQLAEVAAVEFACKKALKIDGPVLIVTDSFYVAESVNKELPYWQSNGFFNNKKKPLKHVSKWKSIADCIQLKPDIIIIHEKGHQPTASTFHTEGNNLADKLATQGSYVVNAGKRTADGSEFEKRTADGSEFESPKKKAKVE

SEQ ID NO: 619 - protein, 2173 aa, synthetic construct
MPAAKRVKLDGGDKKYSIGLDIGTNSVGWAVITDEYKVPSKKFKVLGNTDRHSIKKNLIGALLFDSGETAEATRLKRTARRRYTRRKNRICYLQEIFSNEMAKVDDSFFHRLEESFLVEEDKKHERHPIFGNIVDEVAYHEKYPTIYHLRKKLVDSTDKADLRLIYLALAHMIKFRGHFLIEGDLNPDNSDVDKLFIQLVQTYNQLFEENPINASGVDAKAILSARLSKSRRLENLIAQLPGEKKNGLFGNLIALSLGLTPNFKSNFDLAEDAKLQLSKDTYDDDLDNLLAQIGDQYADLFLAAKNLSDAILLSDILRVNTEITKAPLSASMIKRYDEHHQDLTLLKALVRQQLPEKYKEIFFDQSKNGYAGYIDGGASQEEFYKFIKPILEKMDGTEELLVKLNREDLLRKQRTFDNGSIPHQIHLGELHAILRRQEDFYPFLKDNREKIEKILTFRIPYYVGPLARGNSRFAWMTRKSEETITPWNFEEVVDKGASAQSFIERMTNFDKNLPNEKVLPKHSLLYEYFTVYNELTKVKYVTEGMRKPAFLSGEQKKAIVDLLFKTNRKVTVKQLKEDYFKKIECFDSVEISGVEDRFNASLGTYHDLLKIIKDKDFLDNEENEDILEDIVLTLTLFEDREMIEERLKTYAHLFDDKVMKQLKRRRYTGWGRLSRKLINGIRDKQSGKTILDFLKSDGFANRNFMQLIHDDSLTFKEDIQKAQVSGQGDSLHEHIANLAGSPAIKKGILQTVKVVDELVKVMGRHKPENIVIEMARENQTTQKGQKNSRERMKRIEEGIKELGSQILKEHPVENTQLQNEKLYLYYLQNGRDMYVDQELDINRLSDYDVDHIVPQSFLKDDSIDNKVLTRSDKARGKSDNVPSEEVVKKMKNYWRQLLNAKLITQRKFDNLTKAERGGLSELDKAGFIKRQLVETRQITKHVAQILDSRMNTKYDENDKLIREVKVITLKSKLVSDFRKDFQFYKVREINNYHHAHDAYLNAVVGTALIKKYPKLESEFVYGDYKVYDVRKMIAKSEQEIGKATAKYFFYSNIMNFFKTEITLANGEIRKRPLIETNGETGEIVWDKGRDFATVRKVLSMPQVNIVKKTEVQTGGFSKESILPKRNSDKLIARKKDWDPKKYGGFDSPTVAYSVLVVAKVEKGKSKKLKSVKELLGITIMERSSFEKNPIDFLEAKGYKEVKKDLIIKLPKYSLFELENGRKRMLASAGELQKGNELALPSKYVNFLYLASHYEKLKGSPEDNEQKQLFVEQHKHYLDEIIEQISEFSKRVILADANLDKVLSAYNKHRDKPIREQAENIIHLFTLTNLGAPAAFKYFDTTIDRKRYTSTKEVLDATLIHQSITGLYETRIDLSQLGGDGGEAAAKPAPGGMDPLQLLQPLEAEIKGTKLKAHWNSGATITCVPQAFLEEEVPIKNIWIKTIHGEKEQPVYYLTFKIQGRKVEAEVISSPYDYILVSPSDIPWLMKKPLQLTTLVPLQEYEERLLKQTMLTGSYKEKLQSLFLKYDALWQHWENQVGHRRIKPHHIATGTVNPRPQKQYPINPKAKASIQTVINDLLKQGVLIQQNSIMNTPVYPVPKPDGKWRMVLDYREVNKTIPLIAAQNQHSAGILSSIFRGKYKTTLDLSNGFWAHSITPESYWLTAFTWLGQQYCWTRLPQGFLNSPALFNADVVDLLKEVPNVQVYVDDIYISHDDPREHLEQLEKVFSLLLNAGYVVSLKKSEIAQHEVEFLGFNITKEGRGLTETFKQKLLNITPPRDLKQLQSILGLLNFARNFIPNFSELVKPLYNIIATAPGKYITWTTDNSQQLQNIISMLNSAENLEERNPEVRLIMKVNTSPSAGYIRFYNEFAKRPIMYLNYVYTKAEVKFTNTEKLLTTIHKGLIKALDLGMGQEILVYSPIVSMTKIQKTPLPERKALPIRWITWMSYLEDPRIQFHYDKTLPELQQVPTVTDDIIAKIKHPSEFSMVFYTDGSAIKHPNVNKSHNAGMGIAQVQFKPEFTVINTWSIPLGDHTAQLAEVAAVEFACKKALKIDGPVLIVTDSFYVAESVNKELPYWQSNGFFNNKKKPLKHVSKWKSIADCIQLKPDIIIIHEKGHQPTASTFHTEGNNLADKLATQGSYVVNAGKRTADGSEFEKRTADGSEFESPKKKAKVE

SEQ ID NO: 620 - protein, 2176 aa, synthetic construct
MPAAKRVKLDGGDKKYSIGLDIGTNSVGWAVITDEYKVPSKKFKVLGNTDRHSIKKNLIGALLFDSGETAEATRLKRTARRRYTRRKNRICYLQEIFSNEMAKVDDSFFHRLEESFLVEEDKKHERHPIFGNIVDEVAYHEKYPTIYHLRKKLVDSTDKADLRLIYLALAHMIKFRGHFLIEGDLNPDNSDVDKLFIQLVQTYNQLFEENPINASGVDAKAILSARLSKSRRLENLIAQLPGEKKNGLFGNLIALSLGLTPNFKSNFDLAEDAKLQLSKDTYDDDLDNLLAQIGDQYADLFLAAKNLSDAILLSDILRVNTEITKAPLSASMIKRYDEHHQDLTLLKALVRQQLPEKYKEIFFDQSKNGYAGYIDGGASQEEFYKFIKPILEKMDGTEELLVKLNREDLLRKQRTFDNGSIPHQIHLGELHAILRRQEDFYPFLKDNREKIEKILTFRIPYYVGPLARGNSRFAWMTRKSEETITPWNFEEVVDKGASAQSFIERMTNFDKNLPNEKVLPKHSLLYEYFTVYNELTKVKYVTEGMRKPAFLSGEQKKAIVDLLFKTNRKVTVKQLKEDYFKKIECFDSVEISGVEDRFNASLGTYHDLLKIIKDKDFLDNEENEDILEDIVLTLTLFEDREMIEERLKTYAHLFDDKVMKQLKRRRYTGWGRLSRKLINGIRDKQSGKTILDFLKSDGFANRNFMQLIHDDSLTFKEDIQKAQVSGQGDSLHEHIANLAGSPAIKKGILQTVKVVDELVKVMGRHKPENIVIEMARENQTTQKGQKNSRERMKRIEEGIKELGSQILKEHPVENTQLQNEKLYLYYLQNGRDMYVDQELDINRLSDYDVDHIVPQSFLKDDSIDNKVLTRSDKARGKSDNVPSEEVVKKMKNYWRQLLNAKLITQRKFDNLTKAERGGLSELDKAGFIKRQLVETRQITKHVAQILDSRMNTKYDENDKLIREVKVITLKSKLVSDFRKDFQFYKVREINNYHHAHDAYLNAVVGTALIKKYPKLESEFVYGDYKVYDVRKMIAKSEQEIGKATAKYFFYSNIMNFFKTEITLANGEIRKRPLIETNGETGEIVWDKGRDFATVRKVLSMPQVNIVKKTEVQTGGFSKESILPKRNSDKLIARKKDWDPKKYGGFDSPTVAYSVLVVAKVEKGKSKKLKSVKELLGITIMERSSFEKNPIDFLEAKGYKEVKKDLIIKLPKYSLFELENGRKRMLASAGELQKGNELALPSKYVNFLYLASHYEKLKGSPEDNEQKQLFVEQHKHYLDEIIEQISEFSKRVILADANLDKVLSAYNKHRDKPIREQAENIIHLFTLTNLGAPAAFKYFDTTIDRKRYTSTKEVLDATLIHQSITGLYETRIDLSQLGGDGGGGGEAAAKGSSGGMDPLQLLQPLEAEIKGTKLKAHWNSGATITCVPQAFLEEEVPIKNIWIKTIHGEKEQPVYYLTFKIQGRKVEAEVISSPYDYILVSPSDIPWLMKKPLQLTTLVPLQEYEERLLKQTMLTGSYKEKLQSLFLKYDALWQHWENQVGHRRIKPHHIATGTVNPRPQKQYPINPKAKASIQTVINDLLKQGVLIQQNSIMNTPVYPVPKPDGKWRMVLDYREVNKTIPLIAAQNQHSAGILSSIFRGKYKTTLDLSNGFWAHSITPESYWLTAFTWLGQQYCWTRLPQGFLNSPALFNADVVDLLKEVPNVQVYVDDIYISHDDPREHLEQLEKVFSLLLNAGYVVSLKKSEIAQHEVEFLGFNITKEGRGLTETFKQKLLNITPPRDLKQLQSILGLLNFARNFIPNFSELVKPLYNIIATAPGKYITWTTDNSQQLQNIISMLNSAENLEERNPEVRLIMKVNTSPSAGYIRFYNEFAKRPIMYLNYVYTKAEVKFTNTEKLLTTIHKGLIKALDLGMGQEILVYSPIVSMTKIQKTPLPERKALPIRWITWMSYLEDPRIQFHYDKTLPELQQVPTVTDDIIAKIKHPSEFSMVFYTDGSAIKHPNVNKSHNAGMGIAQVQFKPEFTVINTWSIPLGDHTAQLAEVAAVEFACKKALKIDGPVLIVTDSFYVAESVNKELPYWQSNGFFNNKKKPLKHVSKWKSIADCIQLKPDIIIIHEKGHQPTASTFHTEGNNLADKLATQGSYVVNAGKRTADGSEFEKRTADGSEFESPKKKAKVE

SEQ ID NO: 621 - protein, 2176 aa, synthetic construct
MPAAKRVKLDGGDKKYSIGLDIGTNSVGWAVITDEYKVPSKKFKVLGNTDRHSIKKNLIGALLFDSGETAEATRLKRTARRRYTRRKNRICYLQEIFSNEMAKVDDSFFHRLEESFLVEEDKKHERHPIFGNIVDEVAYHEKYPTIYHLRKKLVDSTDKADLRLIYLALAHMIKFRGHFLIEGDLNPDNSDVDKLFIQLVQTYNQLFEENPINASGVDAKAILSARLSKSRRLENLIAQLPGEKKNGLFGNLIALSLGLTPNFKSNFDLAEDAKLQLSKDTYDDDLDNLLAQIGDQYADLFLAAKNLSDAILLSDILRVNTEITKAPLSASMIKRYDEHHQDLTLLKALVRQQLPEKYKEIFFDQSKNGYAGYIDGGASQEEFYKFIKPILEKMDGTEELLVKLNREDLLRKQRTFDNGSIPHQIHLGELHAILRRQEDFYPFLKDNREKIEKILTFRIPYYVGPLARGNSRFAWMTRKSEETITPWNFEEVVDKGASAQSFIERMTNFDKNLPNEKVLPKHSLLYEYFTVYNELTKVKYVTEGMRKPAFLSGEQKKAIVDLLFKTNRKVTVKQLKEDYFKKIECFDSVEISGVEDRFNASLGTYHDLLKIIKDKDFLDNEENEDILEDIVLTLTLFEDREMIEERLKTYAHLFDDKVMKQLKRRRYTGWGRLSRKLINGIRDKQSGKTILDFLKSDGFANRNFMQLIHDDSLTFKEDIQKAQVSGQGDSLHEHIANLAGSPAIKKGILQTVKVVDELVKVMGRHKPENIVIEMARENQTTQKGQKNSRERMKRIEEGIKELGSQILKEHPVENTQLQNEKLYLYYLQNGRDMYVDQELDINRLSDYDVDHIVPQSFLKDDSIDNKVLTRSDKARGKSDNVPSEEVVKKMKNYWRQLLNAKLITQRKFDNLTKAERGGLSELDKAGFIKRQLVETRQITKHVAQILDSRMNTKYDENDKLIREVKVITLKSKLVSDFRKDFQFYKVREINNYHHAHDAYLNAVVGTALIKKYPKLESEFVYGDYKVYDVRKMIAKSEQEIGKATAKYFFYSNIMNFFKTEITLANGEIRKRPLIETNGETGEIVWDKGRDFATVRKVLSMPQVNIVKKTEVQTGGFSKESILPKRNSDKLIARKKDWDPKKYGGFDSPTVAYSVLVVAKVEKGKSKKLKSVKELLGITIMERSSFEKNPIDFLEAKGYKEVKKDLIIKLPKYSLFELENGRKRMLASAGELQKGNELALPSKYVNFLYLASHYEKLKGSPEDNEQKQLFVEQHKHYLDEIIEQISEFSKRVILADANLDKVLSAYNKHRDKPIREQAENIIHLFTLTNLGAPAAFKYFDTTIDRKRYTSTKEVLDATLIHQSITGLYETRIDLSQLGGDGGGGGEAAAKPAPGGMDPLQLLQPLEAEIKGTKLKAHWNSGATITCVPQAFLEEEVPIKNIWIKTIHGEKEQPVYYLTFKIQGRKVEAEVISSPYDYILVSPSDIPWLMKKPLQLTTLVPLQEYEERLLKQTMLTGSYKEKLQSLFLKYDALWQHWENQVGHRRIKPHHIATGTVNPRPQKQYPINPKAKASIQTVINDLLKQGVLIQQNSIMNTPVYPVPKPDGKWRMVLDYREVNKTIPLIAAQNQHSAGILSSIFRGKYKTTLDLSNGFWAHSITPESYWLTAFTWLGQQYCWTRLPQGFLNSPALFNADVVDLLKEVPNVQVYVDDIYISHDDPREHLEQLEKVFSLLLNAGYVVSLKKSEIAQHEVEFLGFNITKEGRGLTETFKQKLLNITPPRDLKQLQSILGLLNFARNFIPNFSELVKPLYNIIATAPGKYITWTTDNSQQLQNIISMLNSAENLEERNPEVRLIMKVNTSPSAGYIRFYNEFAKRPIMYLNYVYTKAEVKFTNTEKLLTTIHKGLIKALDLGMGQEILVYSPIVSMTKIQKTPLPERKALPIRWITWMSYLEDPRIQFHYDKTLPELQQVPTVTDDIIAKIKHPSEFSMVFYTDGSAIKHPNVNKSHNAGMGIAQVQFKPEFTVINTWSIPLGDHTAQLAEVAAVEFACKKALKIDGPVLIVTDSFYVAESVNKELPYWQSNGFFNNKKKPLKHVSKWKSIADCIQLKPDIIIIHEKGHQPTASTFHTEGNNLADKLATQGSYVVNAGKRTADGSEFEKRTADGSEFESPKKKAKVE

SEQ ID NO: 622 - protein, 2176 aa, synthetic construct
MPAAKRVKLDGGDKKYSIGLDIGTNSVGWAVITDEYKVPSKKFKVLGNTDRHSIKKNLIGALLFDSGETAEATRLKRTARRRYTRRKNRICYLQEIFSNEMAKVDDSFFHRLEESFLVEEDKKHERHPIFGNIVDEVAYHEKYPTIYHLRKKLVDSTDKADLRLIYLALAHMIKFRGHFLIEGDLNPDNSDVDKLFIQLVQTYNQLFEENPINASGVDAKAILSARLSKSRRLENLIAQLPGEKKNGLFGNLIALSLGLTPNFKSNFDLAEDAKLQLSKDTYDDDLDNLLAQIGDQYADLFLAAKNLSDAILLSDILRVNTEITKAPLSASMIKRYDEHHQDLTLLKALVRQQLPEKYKEIFFDQSKNGYAGYIDGGASQEEFYKFIKPILEKMDGTEELLVKLNREDLLRKQRTFDNGSIPHQIHLGELHAILRRQEDFYPFLKDNREKIEKILTFRIPYYVGPLARGNSRFAWMTRKSEETITPWNFEEVVDKGASAQSFIERMTNFDKNLPNEKVLPKHSLLYEYFTVYNELTKVKYVTEGMRKPAFLSGEQKKAIVDLLFKTNRKVTVKQLKEDYFKKIECFDSVEISGVEDRFNASLGTYHDLLKIIKDKDFLDNEENEDILEDIVLTLTLFEDREMIEERLKTYAHLFDDKVMKQLKRRRYTGWGRLSRKLINGIRDKQSGKTILDFLKSDGFANRNFMQLIHDDSLTFKEDIQKAQVSGQGDSLHEHIANLAGSPAIKKGILQTVKVVDELVKVMGRHKPENIVIEMARENQTTQKGQKNSRERMKRIEEGIKELGSQILKEHPVENTQLQNEKLYLYYLQNGRDMYVDQELDINRLSDYDVDHIVPQSFLKDDSIDNKVLTRSDKARGKSDNVPSEEVVKKMKNYWRQLLNAKLITQRKFDNLTKAERGGLSELDKAGFIKRQLVETRQITKHVAQILDSRMNTKYDENDKLIREVKVITLKSKLVSDFRKDFQFYKVREINNYHHAHDAYLNAVVGTALIKKYPKLESEFVYGDYKVYDVRKMIAKSEQEIGKATAKYFFYSNIMNFFKTEITLANGEIRKRPLIETNGETGEIVWDKGRDFATVRKVLSMPQVNIVKKTEVQTGGFSKESILPKRNSDKLIARKKDWDPKKYGGFDSPTVAYSVLVVAKVEKGKSKKLKSVKELLGITIMERSSFEKNPIDFLEAKGYKEVKKDLIIKLPKYSLFELENGRKRMLASAGELQKGNELALPSKYVNFLYLASHYEKLKGSPEDNEQKQLFVEQHKHYLDEIIEQISEFSKRVILADANLDKVLSAYNKHRDKPIREQAENIIHLFTLTNLGAPAAFKYFDTTIDRKRYTSTKEVLDATLIHQSITGLYETRIDLSQLGGDGGPAPGGGEAAAKGGMDPLQLLQPLEAEIKGTKLKAHWNSGATITCVPQAFLEEEVPIKNIWIKTIHGEKEQPVYYLTFKIQGRKVEAEVISSPYDYILVSPSDIPWLMKKPLQLTTLVPLQEYEERLLKQTMLTGSYKEKLQSLFLKYDALWQHWENQVGHRRIKPHHIATGTVNPRPQKQYPINPKAKASIQTVINDLLKQGVLIQQNSIMNTPVYPVPKPDGKWRMVLDYREVNKTIPLIAAQNQHSAGILSSIFRGKYKTTLDLSNGFWAHSITPESYWLTAFTWLGQQYCWTRLPQGFLNSPALFNADVVDLLKEVPNVQVYVDDIYISHDDPREHLEQLEKVFSLLLNAGYVVSLKKSEIAQHEVEFLGFNITKEGRGLTETFKQKLLNITPPRDLKQLQSILGLLNFARNFIPNFSELVKPLYNIIATAPGKYITWTTDNSQQLQNIISMLNSAENLEERNPEVRLIMKVNTSPSAGYIRFYNEFAKRPIMYLNYVYTKAEVKFTNTEKLLTTIHKGLIKALDLGMGQEILVYSPIVSMTKIQKTPLPERKALPIRWITWMSYLEDPRIQFHYDKTLPELQQVPTVTDDIIAKIKHPSEFSMVFYTDGSAIKHPNVNKSHNAGMGIAQVQFKPEFTVINTWSIPLGDHTAQLAEVAAVEFACKKALKIDGPVLIVTDSFYVAESVNKELPYWQSNGFFNNKKKPLKHVSKWKSIADCIQLKPDIIIIHEKGHQPTASTFHTEGNNLADKLATQGSYVVNAGKRTADGSEFEKRTADGSEFESPKKKAKVE

SEQ ID NO: 623 - protein, 2168 aa, synthetic construct
MPAAKRVKLDGGDKKYSIGLDIGTNSVGWAVITDEYKVPSKKFKVLGNTDRHSIKKNLIGALLFDSGETAEATRLKRTARRRYTRRKNRICYLQEIFSNEMAKVDDSFFHRLEESFLVEEDKKHERHPIFGNIVDEVAYHEKYPTIYHLRKKLVDSTDKADLRLIYLALAHMIKFRGHFLIEGDLNPDNSDVDKLFIQLVQTYNQLFEENPINASGVDAKAILSARLSKSRRLENLIAQLPGEKKNGLFGNLIALSLGLTPNFKSNFDLAEDAKLQLSKDTYDDDLDNLLAQIGDQYADLFLAAKNLSDAILLSDILRVNTEITKAPLSASMIKRYDEHHQDLTLLKALVRQQLPEKYKEIFFDQSKNGYAGYIDGGASQEEFYKFIKPILEKMDGTEELLVKLNREDLLRKQRTFDNGSIPHQIHLGELHAILRRQEDFYPFLKDNREKIEKILTFRIPYYVGPLARGNSRFAWMTRKSEETITPWNFEEVVDKGASAQSFIERMTNFDKNLPNEKVLPKHSLLYEYFTVYNELTKVKYVTEGMRKPAFLSGEQKKAIVDLLFKTNRKVTVKQLKEDYFKKIECFDSVEISGVEDRFNASLGTYHDLLKIIKDKDFLDNEENEDILEDIVLTLTLFEDREMIEERLKTYAHLFDDKVMKQLKRRRYTGWGRLSRKLINGIRDKQSGKTILDFLKSDGFANRNFMQLIHDDSLTFKEDIQKAQVSGQGDSLHEHIANLAGSPAIKKGILQTVKVVDELVKVMGRHKPENIVIEMARENQTTQKGQKNSRERMKRIEEGIKELGSQILKEHPVENTQLQNEKLYLYYLQNGRDMYVDQELDINRLSDYDVDHIVPQSFLKDDSIDNKVLTRSDKARGKSDNVPSEEVVKKMKNYWRQLLNAKLITQRKFDNLTKAERGGLSELDKAGFIKRQLVETRQITKHVAQILDSRMNTKYDENDKLIREVKVITLKSKLVSDFRKDFQFYKVREINNYHHAHDAYLNAVVGTALIKKYPKLESEFVYGDYKVYDVRKMIAKSEQEIGKATAKYFFYSNIMNFFKTEITLANGEIRKRPLIETNGETGEIVWDKGRDFATVRKVLSMPQVNIVKKTEVQTGGFSKESILPKRNSDKLIARKKDWDPKKYGGFDSPTVAYSVLVVAKVEKGKSKKLKSVKELLGITIMERSSFEKNPIDFLEAKGYKEVKKDLIIKLPKYSLFELENGRKRMLASAGELQKGNELALPSKYVNFLYLASHYEKLKGSPEDNEQKQLFVEQHKHYLDEIIEQISEFSKRVILADANLDKVLSAYNKHRDKPIREQAENIIHLFTLTNLGAPAAFKYFDTTIDRKRYTSTKEVLDATLIHQSITGLYETRIDLSQLGGDGGGGGGGMDPLQLLQPLEAEIKGTKLKAHWNSGATITCVPQAFLEEEVPIKNIWIKTIHGEKEQPVYYLTFKIQGRKVEAEVISSPYDYILVSPSDIPWLMKKPLQLTTLVPLQEYEERLLKQTMLTGSYKEKLQSLFLKYDALWQHWENQVGHRRIKPHHIATGTVNPRPQKQYPINPKAKASIQTVINDLLKQGVLIQQNSIMNTPVYPVPKPDGKWRMVLDYREVNKTIPLIAAQNQHSAGILSSIFRGKYKTTLDLSNGFWAHSITPESYWLTAFTWLGQQYCWTRLPQGFLNSPALFNADVVDLLKEVPNVQVYVDDIYISHDDPREHLEQLEKVFSLLLNAGYVVSLKKSEIAQHEVEFLGFNITKEGRGLTETFKQKLLNITPPRDLKQLQSILGLLNFARNFIPNFSELVKPLYNIIATAPGKYITWTTDNSQQLQNIISMLNSAENLEERNPEVRLIMKVNTSPSAGYIRFYNEFAKRPIMYLNYVYTKAEVKFTNTEKLLTTIHKGLIKALDLGMGQEILVYSPIVSMTKIQKTPLPERKALPIRWITWMSYLEDPRIQFHYDKTLPELQQVPTVTDDIIAKIKHPSEFSMVFYTDGSAIKHPNVNKSHNAGMGIAQVQFKPEFTVINTWSIPLGDHTAQLAEVAAVEFACKKALKIDGPVLIVTDSFYVAESVNKELPYWQSNGFFNNKKKPLKHVSKWKSIADCIQLKPDIIIIHEKGHQPTASTFHTEGNNLADKLATQGSYVVNAGKRTADGSEFEKRTADGSEFESPKKKAKVE

SEQ ID NO: 624 - protein, 2180 aa, synthetic construct
MPAAKRVKLDGGDKKYSIGLDIGTNSVGWAVITDEYKVPSKKFKVLGNTDRHSIKKNLIGALLFDSGETAEATRLKRTARRRYTRRKNRICYLQEIFSNEMAKVDDSFFHRLEESFLVEEDKKHERHPIFGNIVDEVAYHEKYPTIYHLRKKLVDSTDKADLRLIYLALAHMIKFRGHFLIEGDLNPDNSDVDKLFIQLVQTYNQLFEENPINASGVDAKAILSARLSKSRRLENLIAQLPGEKKNGLFGNLIALSLGLTPNFKSNFDLAEDAKLQLSKDTYDDDLDNLLAQIGDQYADLFLAAKNLSDAILLSDILRVNTEITKAPLSASMIKRYDEHHQDLTLLKALVRQQLPEKYKEIFFDQSKNGYAGYIDGGASQEEFYKFIKPILEKMDGTEELLVKLNREDLLRKQRTFDNGSIPHQIHLGELHAILRRQEDFYPFLKDNREKIEKILTFRIPYYVGPLARGNSRFAWMTRKSEETITPWNFEEVVDKGASAQSFIERMTNFDKNLPNEKVLPKHSLLYEYFTVYNELTKVKYVTEGMRKPAFLSGEQKKAIVDLLFKTNRKVTVKQLKEDYFKKIECFDSVEISGVEDRFNASLGTYHDLLKIIKDKDFLDNEENEDILEDIVLTLTLFEDREMIEERLKTYAHLFDDKVMKQLKRRRYTGWGRLSRKLINGIRDKQSGKTILDFLKSDGFANRNFMQLIHDDSLTFKEDIQKAQVSGQGDSLHEHIANLAGSPAIKKGILQTVKVVDELVKVMGRHKPENIVIEMARENQTTQKGQKNSRERMKRIEEGIKELGSQILKEHPVENTQLQNEKLYLYYLQNGRDMYVDQELDINRLSDYDVDHIVPQSFLKDDSIDNKVLTRSDKARGKSDNVPSEEVVKKMKNYWRQLLNAKLITQRKFDNLTKAERGGLSELDKAGFIKRQLVETRQITKHVAQILDSRMNTKYDENDKLIREVKVITLKSKLVSDFRKDFQFYKVREINNYHHAHDAYLNAVVGTALIKKYPKLESEFVYGDYKVYDVRKMIAKSEQEIGKATAKYFFYSNIMNFFKTEITLANGEIRKRPLIETNGETGEIVWDKGRDFATVRKVLSMPQVNIVKKTEVQTGGFSKESILPKRNSDKLIARKKDWDPKKYGGFDSPTVAYSVLVVAKVEKGKSKKLKSVKELLGITIMERSSFEKNPIDFLEAKGYKEVKKDLIIKLPKYSLFELENGRKRMLASAGELQKGNELALPSKYVNFLYLASHYEKLKGSPEDNEQKQLFVEQHKHYLDEIIEQISEFSKRVILADANLDKVLSAYNKHRDKPIREQAENIIHLFTLTNLGAPAAFKYFDTTIDRKRYTSTKEVLDATLIHQSITGLYETRIDLSQLGGDGGEAAAKEAAAKEAAAKGGMDPLQLLQPLEAEIKGTKLKAHWNSGATITCVPQAFLEEEVPIKNIWIKTIHGEKEQPVYYLTFKIQGRKVEAEVISSPYDYILVSPSDIPWLMKKPLQLTTLVPLQEYEERLLKQTMLTGSYKEKLQSLFLKYDALWQHWENQVGHRRIKPHHIATGTVNPRPQKQYPINPKAKASIQTVINDLLKQGVLIQQNSIMNTPVYPVPKPDGKWRMVLDYREVNKTIPLIAAQNQHSAGILSSIFRGKYKTTLDLSNGFWAHSITPESYWLTAFTWLGQQYCWTRLPQGFLNSPALFNADVVDLLKEVPNVQVYVDDIYISHDDPREHLEQLEKVFSLLLNAGYVVSLKKSEIAQHEVEFLGFNITKEGRGLTETFKQKLLNITPPRDLKQLQSILGLLNFARNFIPNFSELVKPLYNIIATAPGKYITWTTDNSQQLQNIISMLNSAENLEERNPEVRLIMKVNTSPSAGYIRFYNEFAKRPIMYLNYVYTKAEVKFTNTEKLLTTIHKGLIKALDLGMGQEILVYSPIVSMTKIQKTPLPERKALPIRWITWMSYLEDPRIQFHYDKTLPELQQVPTVTDDIIAKIKHPSEFSMVFYTDGSAIKHPNVNKSHNAGMGIAQVQFKPEFTVINTWSIPLGDHTAQLAEVAAVEFACKKALKIDGPVLIVTDSFYVAESVNKELPYWQSNGFFNNKKKPLKHVSKWKSIADCIQLKPDIIIIHEKGHQPTASTFHTEGNNLADKLATQGSYVVNAGKRTADGSEFEKRTADGSEFESPKKKAKVE

SEQ ID NO: 625 - protein, 2173 aa, synthetic construct
MPAAKRVKLDGGDKKYSIGLDIGTNSVGWAVITDEYKVPSKKFKVLGNTDRHSIKKNLIGALLFDSGETAEATRLKRTARRRYTRRKNRICYLQEIFSNEMAKVDDSFFHRLEESFLVEEDKKHERHPIFGNIVDEVAYHEKYPTIYHLRKKLVDSTDKADLRLIYLALAHMIKFRGHFLIEGDLNPDNSDVDKLFIQLVQTYNQLFEENPINASGVDAKAILSARLSKSRRLENLIAQLPGEKKNGLFGNLIALSLGLTPNFKSNFDLAEDAKLQLSKDTYDDDLDNLLAQIGDQYADLFLAAKNLSDAILLSDILRVNTEITKAPLSASMIKRYDEHHQDLTLLKALVRQQLPEKYKEIFFDQSKNGYAGYIDGGASQEEFYKFIKPILEKMDGTEELLVKLNREDLLRKQRTFDNGSIPHQIHLGELHAILRRQEDFYPFLKDNREKIEKILTFRIPYYVGPLARGNSRFAWMTRKSEETITPWNFEEVVDKGASAQSFIERMTNFDKNLPNEKVLPKHSLLYEYFTVYNELTKVKYVTEGMRKPAFLSGEQKKAIVDLLFKTNRKVTVKQLKEDYFKKIECFDSVEISGVEDRFNASLGTYHDLLKIIKDKDFLDNEENEDILEDIVLTLTLFEDREMIEERLKTYAHLFDDKVMKQLKRRRYTGWGRLSRKLINGIRDKQSGKTILDFLKSDGFANRNFMQLIHDDSLTFKEDIQKAQVSGQGDSLHEHIANLAGSPAIKKGILQTVKVVDELVKVMGRHKPENIVIEMARENQTTQKGQKNSRERMKRIEEGIKELGSQILKEHPVENTQLQNEKLYLYYLQNGRDMYVDQELDINRLSDYDVDHIVPQSFLKDDSIDNKVLTRSDKARGKSDNVPSEEVVKKMKNYWRQLLNAKLITQRKFDNLTKAERGGLSELDKAGFIKRQLVETRQITKHVAQILDSRMNTKYDENDKLIREVKVITLKSKLVSDFRKDFQFYKVREINNYHHAHDAYLNAVVGTALIKKYPKLESEFVYGDYKVYDVRKMIAKSEQEIGKATAKYFFYSNIMNFFKTEITLANGEIRKRPLIETNGETGEIVWDKGRDFATVRKVLSMPQVNIVKKTEVQTGGFSKESILPKRNSDKLIARKKDWDPKKYGGFDSPTVAYSVLVVAKVEKGKSKKLKSVKELLGITIMERSSFEKNPIDFLEAKGYKEVKKDLIIKLPKYSLFELENGRKRMLASAGELQKGNELALPSKYVNFLYLASHYEKLKGSPEDNEQKQLFVEQHKHYLDEIIEQISEFSKRVILADANLDKVLSAYNKHRDKPIREQAENIIHLFTLTNLGAPAAFKYFDTTIDRKRYTSTKEVLDATLIHQSITGLYETRIDLSQLGGDGGEAAAKGGGGGMDPLQLLQPLEAEIKGTKLKAHWNSGATITCVPQAFLEEEVPIKNIWIKTIHGEKEQPVYYLTFKIQGRKVEAEVISSPYDYILVSPSDIPWLMKKPLQLTTLVPLQEYEERLLKQTMLTGSYKEKLQSLFLKYDALWQHWENQVGHRRIKPHHIATGTVNPRPQKQYPINPKAKASIQTVINDLLKQGVLIQQNSIMNTPVYPVPKPDGKWRMVLDYREVNKTIPLIAAQNQHSAGILSSIFRGKYKTTLDLSNGFWAHSITPESYWLTAFTWLGQQYCWTRLPQGFLNSPALFNADVVDLLKEVPNVQVYVDDIYISHDDPREHLEQLEKVFSLLLNAGYVVSLKKSEIAQHEVEFLGFNITKEGRGLTETFKQKLLNITPPRDLKQLQSILGLLNFARNFIPNFSELVKPLYNIIATAPGKYITWTTDNSQQLQNIISMLNSAENLEERNPEVRLIMKVNTSPSAGYIRFYNEFAKRPIMYLNYVYTKAEVKFTNTEKLLTTIHKGLIKALDLGMGQEILVYSPIVSMTKIQKTPLPERKALPIRWITWMSYLEDPRIQFHYDKTLPELQQVPTVTDDIIAKIKHPSEFSMVFYTDGSAIKHPNVNKSHNAGMGIAQVQFKPEFTVINTWSIPLGDHTAQLAEVAAVEFACKKALKIDGPVLIVTDSFYVAESVNKELPYWQSNGFFNNKKKPLKHVSKWKSIADCIQLKPDIIIIHEKGHQPTASTFHTEGNNLADKLATQGSYVVNAGKRTADGSEFEKRTADGSEFESPKKKAKVE

SEQ ID NO: 626 - protein, 2176 aa, synthetic construct
MPAAKRVKLDGGDKKYSIGLDIGTNSVGWAVITDEYKVPSKKFKVLGNTDRHSIKKNLIGALLFDSGETAEATRLKRTARRRYTRRKNRICYLQEIFSNEMAKVDDSFFHRLEESFLVEEDKKHERHPIFGNIVDEVAYHEKYPTIYHLRKKLVDSTDKADLRLIYLALAHMIKFRGHFLIEGDLNPDNSDVDKLFIQLVQTYNQLFEENPINASGVDAKAILSARLSKSRRLENLIAQLPGEKKNGLFGNLIALSLGLTPNFKSNFDLAEDAKLQLSKDTYDDDLDNLLAQIGDQYADLFLAAKNLSDAILLSDILRVNTEITKAPLSASMIKRYDEHHQDLTLLKALVRQQLPEKYKEIFFDQSKNGYAGYIDGGASQEEFYKFIKPILEKMDGTEELLVKLNREDLLRKQRTFDNGSIPHQIHLGELHAILRRQEDFYPFLKDNREKIEKILTFRIPYYVGPLARGNSRFAWMTRKSEETITPWNFEEVVDKGASAQSFIERMTNFDKNLPNEKVLPKHSLLYEYFTVYNELTKVKYVTEGMRKPAFLSGEQKKAIVDLLFKTNRKVTVKQLKEDYFKKIECFDSVEISGVEDRFNASLGTYHDLLKIIKDKDFLDNEENEDILEDIVLTLTLFEDREMIEERLKTYAHLFDDKVMKQLKRRRYTGWGRLSRKLINGIRDKQSGKTILDFLKSDGFANRNFMQLIHDDSLTFKEDIQKAQVSGQGDSLHEHIANLAGSPAIKKGILQTVKVVDELVKVMGRHKPENIVIEMARENQTTQKGQKNSRERMKRIEEGIKELGSQILKEHPVENTQLQNEKLYLYYLQNGRDMYVDQELDINRLSDYDVDHIVPQSFLKDDSIDNKVLTRSDKARGKSDNVPSEEVVKKMKNYWRQLLNAKLITQRKFDNLTKAERGGLSELDKAGFIKRQLVETRQITKHVAQILDSRMNTKYDENDKLIREVKVITLKSKLVSDFRKDFQFYKVREINNYHHAHDAYLNAVVGTALIKKYPKLESEFVYGDYKVYDVRKMIAKSEQEIGKATAKYFFYSNIMNFFKTEITLANGEIRKRPLIETNGETGEIVWDKGRDFATVRKVLSMPQVNIVKKTEVQTGGFSKESILPKRNSDKLIARKKDWDPKKYGGFDSPTVAYSVLVVAKVEKGKSKKLKSVKELLGITIMERSSFEKNPIDFLEAKGYKEVKKDLIIKLPKYSLFELENGRKRMLASAGELQKGNELALPSKYVNFLYLASHYEKLKGSPEDNEQKQLFVEQHKHYLDEIIEQISEFSKRVILADANLDKVLSAYNKHRDKPIREQAENIIHLFTLTNLGAPAAFKYFDTTIDRKRYTSTKEVLDATLIHQSITGLYETRIDLSQLGGDGGEAAAKGGGGGSGGMDPLQLLQPLEAEIKGTKLKAHWNSGATITCVPQAFLEEEVPIKNIWIKTIHGEKEQPVYYLTFKIQGRKVEAEVISSPYDYILVSPSDIPWLMKKPLQLTTLVPLQEYEERLLKQTMLTGSYKEKLQSLFLKYDALWQHWENQVGHRRIKPHHIATGTVNPRPQKQYPINPKAKASIQTVINDLLKQGVLIQQNSIMNTPVYPVPKPDGKWRMVLDYREVNKTIPLIAAQNQHSAGILSSIFRGKYKTTLDLSNGFWAHSITPESYWLTAFTWLGQQYCWTRLPQGFLNSPALFNADVVDLLKEVPNVQVYVDDIYISHDDPREHLEQLEKVFSLLLNAGYVVSLKKSEIAQHEVEFLGFNITKEGRGLTETFKQKLLNITPPRDLKQLQSILGLLNFARNFIPNFSELVKPLYNIIATAPGKYITWTTDNSQQLQNIISMLNSAENLEERNPEVRLIMKVNTSPSAGYIRFYNEFAKRPIMYLNYVYTKAEVKFTNTEKLLTTIHKGLIKALDLGMGQEILVYSPIVSMTKIQKTPLPERKALPIRWITWMSYLEDPRIQFHYDKTLPELQQVPTVTDDIIAKIKHPSEFSMVFYTDGSAIKHPNVNKSHNAGMGIAQVQFKPEFTVINTWSIPLGDHTAQLAEVAAVEFACKKALKIDGPVLIVTDSFYVAESVNKELPYWQSNGFFNNKKKPLKHVSKWKSIADCIQLKPDIIIIHEKGHQPTASTFHTEGNNLADKLATQGSYVVNAGKRTADGSEFEKRTADGSEFESPKKKAKVE

SEQ ID NO: 627 - protein, 2177 aa, synthetic construct
MPAAKRVKLDGGDKKYSIGLDIGTNSVGWAVITDEYKVPSKKFKVLGNTDRHSIKKNLIGALLFDSGETAEATRLKRTARRRYTRRKNRICYLQEIFSNEMAKVDDSFFHRLEESFLVEEDKKHERHPIFGNIVDEVAYHEKYPTIYHLRKKLVDSTDKADLRLIYLALAHMIKFRGHFLIEGDLNPDNSDVDKLFIQLVQTYNQLFEENPINASGVDAKAILSARLSKSRRLENLIAQLPGEKKNGLFGNLIALSLGLTPNFKSNFDLAEDAKLQLSKDTYDDDLDNLLAQIGDQYADLFLAAKNLSDAILLSDILRVNTEITKAPLSASMIKRYDEHHQDLTLLKALVRQQLPEKYKEIFFDQSKNGYAGYIDGGASQEEFYKFIKPILEKMDGTEELLVKLNREDLLRKQRTFDNGSIPHQIHLGELHAILRRQEDFYPFLKDNREKIEKILTFRIPYYVGPLARGNSRFAWMTRKSEETITPWNFEEVVDKGASAQSFIERMTNFDKNLPNEKVLPKHSLLYEYFTVYNELTKVKYVTEGMRKPAFLSGEQKKAIVDLLFKTNRKVTVKQLKEDYFKKIECFDSVEISGVEDRFNASLGTYHDLLKIIKDKDFLDNEENEDILEDIVLTLTLFEDREMIEERLKTYAHLFDDKVMKQLKRRRYTGWGRLSRKLINGIRDKQSGKTILDFLKSDGFANRNFMQLIHDDSLTFKEDIQKAQVSGQGDSLHEHIANLAGSPAIKKGILQTVKVVDELVKVMGRHKPENIVIEMARENQTTQKGQKNSRERMKRIEEGIKELGSQILKEHPVENTQLQNEKLYLYYLQNGRDMYVDQELDINRLSDYDVDHIVPQSFLKDDSIDNKVLTRSDKARGKSDNVPSEEVVKKMKNYWRQLLNAKLITQRKFDNLTKAERGGLSELDKAGFIKRQLVETRQITKHVAQILDSRMNTKYDENDKLIREVKVITLKSKLVSDFRKDFQFYKVREINNYHHAHDAYLNAVVGTALIKKYPKLESEFVYGDYKVYDVRKMIAKSEQEIGKATAKYFFYSNIMNFFKTEITLANGEIRKRPLIETNGETGEIVWDKGRDFATVRKVLSMPQVNIVKKTEVQTGGFSKESILPKRNSDKLIARKKDWDPKKYGGFDSPTVAYSVLVVAKVEKGKSKKLKSVKELLGITIMERSSFEKNPIDFLEAKGYKEVKKDLIIKLPKYSLFELENGRKRMLASAGELQKGNELALPSKYVNFLYLASHYEKLKGSPEDNEQKQLFVEQHKHYLDEIIEQISEFSKRVILADANLDKVLSAYNKHRDKPIREQAENIIHLFTLTNLGAPAAFKYFDTTIDRKRYTSTKEVLDATLIHQSITGLYETRIDLSQLGGDGGGSSGSSGSSGSSGGMDPLQLLQPLEAEIKGTKLKAHWNSGATITCVPQAFLEEEVPIKNIWIKTIHGEKEQPVYYLTFKIQGRKVEAEVISSPYDYILVSPSDIPWLMKKPLQLTTLVPLQEYEERLLKQTMLTGSYKEKLQSLFLKYDALWQHWENQVGHRRIKPHHIATGTVNPRPQKQYPINPKAKASIQTVINDLLKQGVLIQQNSIMNTPVYPVPKPDGKWRMVLDYREVNKTIPLIAAQNQHSAGILSSIFRGKYKTTLDLSNGFWAHSITPESYWLTAFTWLGQQYCWTRLPQGFLNSPALFNADVVDLLKEVPNVQVYVDDIYISHDDPREHLEQLEKVFSLLLNAGYVVSLKKSEIAQHEVEFLGFNITKEGRGLTETFKQKLLNITPPRDLKQLQSILGLLNFARNFIPNFSELVKPLYNIIATAPGKYITWTTDNSQQLQNIISMLNSAENLEERNPEVRLIMKVNTSPSAGYIRFYNEFAKRPIMYLNYVYTKAEVKFTNTEKLLTTIHKGLIKALDLGMGQEILVYSPIVSMTKIQKTPLPERKALPIRWITWMSYLEDPRIQFHYDKTLPELQQVPTVTDDIIAKIKHPSEFSMVFYTDGSAIKHPNVNKSHNAGMGIAQVQFKPEFTVINTWSIPLGDHTAQLAEVAAVEFACKKALKIDGPVLIVTDSFYVAESVNKELPYWQSNGFFNNKKKPLKHVSKWKSIADCIQLKPDIIIIHEKGHQPTASTFHTEGNNLADKLATQGSYVVNAGKRTADGSEFEKRTADGSEFESPKKKAKVE

SEQ ID NO: 628 - protein, 2176 aa, synthetic construct
MPAAKRVKLDGGDKKYSIGLDIGTNSVGWAVITDEYKVPSKKFKVLGNTDRHSIKKNLIGALLFDSGETAEATRLKRTARRRYTRRKNRICYLQEIFSNEMAKVDDSFFHRLEESFLVEEDKKHERHPIFGNIVDEVAYHEKYPTIYHLRKKLVDSTDKADLRLIYLALAHMIKFRGHFLIEGDLNPDNSDVDKLFIQLVQTYNQLFEENPINASGVDAKAILSARLSKSRRLENLIAQLPGEKKNGLFGNLIALSLGLTPNFKSNFDLAEDAKLQLSKDTYDDDLDNLLAQIGDQYADLFLAAKNLSDAILLSDILRVNTEITKAPLSASMIKRYDEHHQDLTLLKALVRQQLPEKYKEIFFDQSKNGYAGYIDGGASQEEFYKFIKPILEKMDGTEELLVKLNREDLLRKQRTFDNGSIPHQIHLGELHAILRRQEDFYPFLKDNREKIEKILTFRIPYYVGPLARGNSRFAWMTRKSEETITPWNFEEVVDKGASAQSFIERMTNFDKNLPNEKVLPKHSLLYEYFTVYNELTKVKYVTEGMRKPAFLSGEQKKAIVDLLFKTNRKVTVKQLKEDYFKKIECFDSVEISGVEDRFNASLGTYHDLLKIIKDKDFLDNEENEDILEDIVLTLTLFEDREMIEERLKTYAHLFDDKVMKQLKRRRYTGWGRLSRKLINGIRDKQSGKTILDFLKSDGFANRNFMQLIHDDSLTFKEDIQKAQVSGQGDSLHEHIANLAGSPAIKKGILQTVKVVDELVKVMGRHKPENIVIEMARENQTTQKGQKNSRERMKRIEEGIKELGSQILKEHPVENTQLQNEKLYLYYLQNGRDMYVDQELDINRLSDYDVDHIVPQSFLKDDSIDNKVLTRSDKARGKSDNVPSEEVVKKMKNYWRQLLNAKLITQRKFDNLTKAERGGLSELDKAGFIKRQLVETRQITKHVAQILDSRMNTKYDENDKLIREVKVITLKSKLVSDFRKDFQFYKVREINNYHHAHDAYLNAVVGTALIKKYPKLESEFVYGDYKVYDVRKMIAKSEQEIGKATAKYFFYSNIMNFFKTEITLANGEIRKRPLIETNGETGEIVWDKGRDFATVRKVLSMPQVNIVKKTEVQTGGFSKESILPKRNSDKLIARKKDWDPKKYGGFDSPTVAYSVLVVAKVEKGKSKKLKSVKELLGITIMERSSFEKNPIDFLEAKGYKEVKKDLIIKLPKYSLFELENGRKRMLASAGELQKGNELALPSKYVNFLYLASHYEKLKGSPEDNEQKQLFVEQHKHYLDEIIEQISEFSKRVILADANLDKVLSAYNKHRDKPIREQAENIIHLFTLTNLGAPAAFKYFDTTIDRKRYTSTKEVLDATLIHQSITGLYETRIDLSQLGGDGGGSSEAAAKGGSGGMDPLQLLQPLEAEIKGTKLKAHWNSGATITCVPQAFLEEEVPIKNIWIKTIHGEKEQPVYYLTFKIQGRKVEAEVISSPYDYILVSPSDIPWLMKKPLQLTTLVPLQEYEERLLKQTMLTGSYKEKLQSLFLKYDALWQHWENQVGHRRIKPHHIATGTVNPRPQKQYPINPKAKASIQTVINDLLKQGVLIQQNSIMNTPVYPVPKPDGKWRMVLDYREVNKTIPLIAAQNQHSAGILSSIFRGKYKTTLDLSNGFWAHSITPESYWLTAFTWLGQQYCWTRLPQGFLNSPALFNADVVDLLKEVPNVQVYVDDIYISHDDPREHLEQLEKVFSLLLNAGYVVSLKKSEIAQHEVEFLGFNITKEGRGLTETFKQKLLNITPPRDLKQLQSILGLLNFARNFIPNFSELVKPLYNIIATAPGKYITWTTDNSQQLQNIISMLNSAENLEERNPEVRLIMKVNTSPSAGYIRFYNEFAKRPIMYLNYVYTKAEVKFTNTEKLLTTIHKGLIKALDLGMGQEILVYSPIVSMTKIQKTPLPERKALPIRWITWMSYLEDPRIQFHYDKTLPELQQVPTVTDDIIAKIKHPSEFSMVFYTDGSAIKHPNVNKSHNAGMGIAQVQFKPEFTVINTWSIPLGDHTAQLAEVAAVEFACKKALKIDGPVLIVTDSFYVAESVNKELPYWQSNGFFNNKKKPLKHVSKWKSIADCIQLKPDIIIIHEKGHQPTASTFHTEGNNLADKLATQGSYVVNAGKRTADGSEFEKRTADGSEFESPKKKAKVE

SEQ ID NO: 629 - protein, 2176 aa, synthetic construct
MPAAKRVKLDGGDKKYSIGLDIGTNSVGWAVITDEYKVPSKKFKVLGNTDRHSIKKNLIGALLFDSGETAEATRLKRTARRRYTRRKNRICYLQEIFSNEMAKVDDSFFHRLEESFLVEEDKKHERHPIFGNIVDEVAYHEKYPTIYHLRKKLVDSTDKADLRLIYLALAHMIKFRGHFLIEGDLNPDNSDVDKLFIQLVQTYNQLFEENPINASGVDAKAILSARLSKSRRLENLIAQLPGEKKNGLFGNLIALSLGLTPNFKSNFDLAEDAKLQLSKDTYDDDLDNLLAQIGDQYADLFLAAKNLSDAILLSDILRVNTEITKAPLSASMIKRYDEHHQDLTLLKALVRQQLPEKYKEIFFDQSKNGYAGYIDGGASQEEFYKFIKPILEKMDGTEELLVKLNREDLLRKQRTFDNGSIPHQIHLGELHAILRRQEDFYPFLKDNREKIEKILTFRIPYYVGPLARGNSRFAWMTRKSEETITPWNFEEVVDKGASAQSFIERMTNFDKNLPNEKVLPKHSLLYEYFTVYNELTKVKYVTEGMRKPAFLSGEQKKAIVDLLFKTNRKVTVKQLKEDYFKKIECFDSVEISGVEDRFNASLGTYHDLLKIIKDKDFLDNEENEDILEDIVLTLTLFEDREMIEERLKTYAHLFDDKVMKQLKRRRYTGWGRLSRKLINGIRDKQSGKTILDFLKSDGFANRNFMQLIHDDSLTFKEDIQKAQVSGQGDSLHEHIANLAGSPAIKKGILQTVKVVDELVKVMGRHKPENIVIEMARENQTTQKGQKNSRERMKRIEEGIKELGSQILKEHPVENTQLQNEKLYLYYLQNGRDMYVDQELDINRLSDYDVDHIVPQSFLKDDSIDNKVLTRSDKARGKSDNVPSEEVVKKMKNYWRQLLNAKLITQRKFDNLTKAERGGLSELDKAGFIKRQLVETRQITKHVAQILDSRMNTKYDENDKLIREVKVITLKSKLVSDFRKDFQFYKVREINNYHHAHDAYLNAVVGTALIKKYPKLESEFVYGDYKVYDVRKMIAKSEQEIGKATAKYFFYSNIMNFFKTEITLANGEIRKRPLIETNGETGEIVWDKGRDFATVRKVLSMPQVNIVKKTEVQTGGFSKESILPKRNSDKLIARKKDWDPKKYGGFDSPTVAYSVLVVAKVEKGKSKKLKSVKELLGITIMERSSFEKNPIDFLEAKGYKEVKKDLIIKLPKYSLFELENGRKRMLASAGELQKGNELALPSKYVNFLYLASHYEKLKGSPEDNEQKQLFVEQHKHYLDEIIEQISEFSKRVILADANLDKVLSAYNKHRDKPIREQAENIIHLFTLTNLGAPAAFKYFDTTIDRKRYTSTKEVLDATLIHQSITGLYETRIDLSQLGGDGGEAAAKGGSPAPGGMDPLQLLQPLEAEIKGTKLKAHWNSGATITCVPQAFLEEEVPIKNIWIKTIHGEKEQPVYYLTFKIQGRKVEAEVISSPYDYILVSPSDIPWLMKKPLQLTTLVPLQEYEERLLKQTMLTGSYKEKLQSLFLKYDALWQHWENQVGHRRIKPHHIATGTVNPRPQKQYPINPKAKASIQTVINDLLKQGVLIQQNSIMNTPVYPVPKPDGKWRMVLDYREVNKTIPLIAAQNQHSAGILSSIFRGKYKTTLDLSNGFWAHSITPESYWLTAFTWLGQQYCWTRLPQGFLNSPALFNADVVDLLKEVPNVQVYVDDIYISHDDPREHLEQLEKVFSLLLNAGYVVSLKKSEIAQHEVEFLGFNITKEGRGLTETFKQKLLNITPPRDLKQLQSILGLLNFARNFIPNFSELVKPLYNIIATAPGKYITWTTDNSQQLQNIISMLNSAENLEERNPEVRLIMKVNTSPSAGYIRFYNEFAKRPIMYLNYVYTKAEVKFTNTEKLLTTIHKGLIKALDLGMGQEILVYSPIVSMTKIQKTPLPERKALPIRWITWMSYLEDPRIQFHYDKTLPELQQVPTVTDDIIAKIKHPSEFSMVFYTDGSAIKHPNVNKSHNAGMGIAQVQFKPEFTVINTWSIPLGDHTAQLAEVAAVEFACKKALKIDGPVLIVTDSFYVAESVNKELPYWQSNGFFNNKKKPLKHVSKWKSIADCIQLKPDIIIIHEKGHQPTASTFHTEGNNLADKLATQGSYVVNAGKRTADGSEFEKRTADGSEFESPKKKAKVE

SEQ ID NO: 630 - protein, 2176 aa, synthetic construct
MPAAKRVKLDGGDKKYSIGLDIGTNSVGWAVITDEYKVPSKKFKVLGNTDRHSIKKNLIGALLFDSGETAEATRLKRTARRRYTRRKNRICYLQEIFSNEMAKVDDSFFHRLEESFLVEEDKKHERHPIFGNIVDEVAYHEKYPTIYHLRKKLVDSTDKADLRLIYLALAHMIKFRGHFLIEGDLNPDNSDVDKLFIQLVQTYNQLFEENPINASGVDAKAILSARLSKSRRLENLIAQLPGEKKNGLFGNLIALSLGLTPNFKSNFDLAEDAKLQLSKDTYDDDLDNLLAQIGDQYADLFLAAKNLSDAILLSDILRVNTEITKAPLSASMIKRYDEHHQDLTLLKALVRQQLPEKYKEIFFDQSKNGYAGYIDGGASQEEFYKFIKPILEKMDGTEELLVKLNREDLLRKQRTFDNGSIPHQIHLGELHAILRRQEDFYPFLKDNREKIEKILTFRIPYYVGPLARGNSRFAWMTRKSEETITPWNFEEVVDKGASAQSFIERMTNFDKNLPNEKVLPKHSLLYEYFTVYNELTKVKYVTEGMRKPAFLSGEQKKAIVDLLFKTNRKVTVKQLKEDYFKKIECFDSVEISGVEDRFNASLGTYHDLLKIIKDKDFLDNEENEDILEDIVLTLTLFEDREMIEERLKTYAHLFDDKVMKQLKRRRYTGWGRLSRKLINGIRDKQSGKTILDFLKSDGFANRNFMQLIHDDSLTFKEDIQKAQVSGQGDSLHEHIANLAGSPAIKKGILQTVKVVDELVKVMGRHKPENIVIEMARENQTTQKGQKNSRERMKRIEEGIKELGSQILKEHPVENTQLQNEKLYLYYLQNGRDMYVDQELDINRLSDYDVDHIVPQSFLKDDSIDNKVLTRSDKARGKSDNVPSEEVVKKMKNYWRQLLNAKLITQRKFDNLTKAERGGLSELDKAGFIKRQLVETRQITKHVAQILDSRMNTKYDENDKLIREVKVITLKSKLVSDFRKDFQFYKVREINNYHHAHDAYLNAVVGTALIKKYPKLESEFVYGDYKVYDVRKMIAKSEQEIGKATAKYFFYSNIMNFFKTEITLANGEIRKRPLIETNGETGEIVWDKGRDFATVRKVLSMPQVNIVKKTEVQTGGFSKESILPKRNSDKLIARKKDWDPKKYGGFDSPTVAYSVLVVAKVEKGKSKKLKSVKELLGITIMERSSFEKNPIDFLEAKGYKEVKKDLIIKLPKYSLFELENGRKRMLASAGELQKGNELALPSKYVNFLYLASHYEKLKGSPEDNEQKQLFVEQHKHYLDEIIEQISEFSKRVILADANLDKVLSAYNKHRDKPIREQAENIIHLFTLTNLGAPAAFKYFDTTIDRKRYTSTKEVLDATLIHQSITGLYETRIDLSQLGGDGGGGGGGSEAAAKGGMDPLQLLQPLEAEIKGTKLKAHWNSGATITCVPQAFLEEEVPIKNIWIKTIHGEKEQPVYYLTFKIQGRKVEAEVISSPYDYILVSPSDIPWLMKKPLQLTTLVPLQEYEERLLKQTMLTGSYKEKLQSLFLKYDALWQHWENQVGHRRIKPHHIATGTVNPRPQKQYPINPKAKASIQTVINDLLKQGVLIQQNSIMNTPVYPVPKPDGKWRMVLDYREVNKTIPLIAAQNQHSAGILSSIFRGKYKTTLDLSNGFWAHSITPESYWLTAFTWLGQQYCWTRLPQGFLNSPALFNADVVDLLKEVPNVQVYVDDIYISHDDPREHLEQLEKVFSLLLNAGYVVSLKKSEIAQHEVEFLGFNITKEGRGLTETFKQKLLNITPPRDLKQLQSILGLLNFARNFIPNFSELVKPLYNIIATAPGKYITWTTDNSQQLQNIISMLNSAENLEERNPEVRLIMKVNTSPSAGYIRFYNEFAKRPIMYLNYVYTKAEVKFTNTEKLLTTIHKGLIKALDLGMGQEILVYSPIVSMTKIQKTPLPERKALPIRWITWMSYLEDPRIQFHYDKTLPELQQVPTVTDDIIAKIKHPSEFSMVFYTDGSAIKHPNVNKSHNAGMGIAQVQFKPEFTVINTWSIPLGDHTAQLAEVAAVEFACKKALKIDGPVLIVTDSFYVAESVNKELPYWQSNGFFNNKKKPLKHVSKWKSIADCIQLKPDIIIIHEKGHQPTASTFHTEGNNLADKLATQGSYVVNAGKRTADGSEFEKRTADGSEFESPKKKAKVE

SEQ ID NO: 631 - protein, 2174 aa, synthetic construct
MPAAKRVKLDGGDKKYSIGLDIGTNSVGWAVITDEYKVPSKKFKVLGNTDRHSIKKNLIGALLFDSGETAEATRLKRTARRRYTRRKNRICYLQEIFSNEMAKVDDSFFHRLEESFLVEEDKKHERHPIFGNIVDEVAYHEKYPTIYHLRKKLVDSTDKADLRLIYLALAHMIKFRGHFLIEGDLNPDNSDVDKLFIQLVQTYNQLFEENPINASGVDAKAILSARLSKSRRLENLIAQLPGEKKNGLFGNLIALSLGLTPNFKSNFDLAEDAKLQLSKDTYDDDLDNLLAQIGDQYADLFLAAKNLSDAILLSDILRVNTEITKAPLSASMIKRYDEHHQDLTLLKALVRQQLPEKYKEIFFDQSKNGYAGYIDGGASQEEFYKFIKPILEKMDGTEELLVKLNREDLLRKQRTFDNGSIPHQIHLGELHAILRRQEDFYPFLKDNREKIEKILTFRIPYYVGPLARGNSRFAWMTRKSEETITPWNFEEVVDKGASAQSFIERMTNFDKNLPNEKVLPKHSLLYEYFTVYNELTKVKYVTEGMRKPAFLSGEQKKAIVDLLFKTNRKVTVKQLKEDYFKKIECFDSVEISGVEDRFNASLGTYHDLLKIIKDKDFLDNEENEDILEDIVLTLTLFEDREMIEERLKTYAHLFDDKVMKQLKRRRYTGWGRLSRKLINGIRDKQSGKTILDFLKSDGFANRNFMQLIHDDSLTFKEDIQKAQVSGQGDSLHEHIANLAGSPAIKKGILQTVKVVDELVKVMGRHKPENIVIEMARENQTTQKGQKNSRERMKRIEEGIKELGSQILKEHPVENTQLQNEKLYLYYLQNGRDMYVDQELDINRLSDYDVDHIVPQSFLKDDSIDNKVLTRSDKARGKSDNVPSEEVVKKMKNYWRQLLNAKLITQRKFDNLTKAERGGLSELDKAGFIKRQLVETRQITKHVAQILDSRMNTKYDENDKLIREVKVITLKSKLVSDFRKDFQFYKVREINNYHHAHDAYLNAVVGTALIKKYPKLESEFVYGDYKVYDVRKMIAKSEQEIGKATAKYFFYSNIMNFFKTEITLANGEIRKRPLIETNGETGEIVWDKGRDFATVRKVLSMPQVNIVKKTEVQTGGFSKESILPKRNSDKLIARKKDWDPKKYGGFDSPTVAYSVLVVAKVEKGKSKKLKSVKELLGITIMERSSFEKNPIDFLEAKGYKEVKKDLIIKLPKYSLFELENGRKRMLASAGELQKGNELALPSKYVNFLYLASHYEKLKGSPEDNEQKQLFVEQHKHYLDEIIEQISEFSKRVILADANLDKVLSAYNKHRDKPIREQAENIIHLFTLTNLGAPAAFKYFDTTIDRKRYTSTKEVLDATLIHQSITGLYETRIDLSQLGGDGGGGGGSSPAPGGMDPLQLLQPLEAEIKGTKLKAHWNSGATITCVPQAFLEEEVPIKNIWIKTIHGEKEQPVYYLTFKIQGRKVEAEVISSPYDYILVSPSDIPWLMKKPLQLTTLVPLQEYEERLLKQTMLTGSYKEKLQSLFLKYDALWQHWENQVGHRRIKPHHIATGTVNPRPQKQYPINPKAKASIQTVINDLLKQGVLIQQNSIMNTPVYPVPKPDGKWRMVLDYREVNKTIPLIAAQNQHSAGILSSIFRGKYKTTLDLSNGFWAHSITPESYWLTAFTWLGQQYCWTRLPQGFLNSPALFNADVVDLLKEVPNVQVYVDDIYISHDDPREHLEQLEKVFSLLLNAGYVVSLKKSEIAQHEVEFLGFNITKEGRGLTETFKQKLLNITPPRDLKQLQSILGLLNFARNFIPNFSELVKPLYNIIATAPGKYITWTTDNSQQLQNIISMLNSAENLEERNPEVRLIMKVNTSPSAGYIRFYNEFAKRPIMYLNYVYTKAEVKFTNTEKLLTTIHKGLIKALDLGMGQEILVYSPIVSMTKIQKTPLPERKALPIRWITWMSYLEDPRIQFHYDKTLPELQQVPTVTDDIIAKIKHPSEFSMVFYTDGSAIKHPNVNKSHNAGMGIAQVQFKPEFTVINTWSIPLGDHTAQLAEVAAVEFACKKALKIDGPVLIVTDSFYVAESVNKELPYWQSNGFFNNKKKPLKHVSKWKSIADCIQLKPDIIIIHEKGHQPTASTFHTEGNNLADKLATQGSYVVNAGKRTADGSEFEKRTADGSEFESPKKKAKVE

SEQ ID NO: 632 - protein, 2176 aa, synthetic construct
MPAAKRVKLDGGDKKYSIGLDIGTNSVGWAVITDEYKVPSKKFKVLGNTDRHSIKKNLIGALLFDSGETAEATRLKRTARRRYTRRKNRICYLQEIFSNEMAKVDDSFFHRLEESFLVEEDKKHERHPIFGNIVDEVAYHEKYPTIYHLRKKLVDSTDKADLRLIYLALAHMIKFRGHFLIEGDLNPDNSDVDKLFIQLVQTYNQLFEENPINASGVDAKAILSARLSKSRRLENLIAQLPGEKKNGLFGNLIALSLGLTPNFKSNFDLAEDAKLQLSKDTYDDDLDNLLAQIGDQYADLFLAAKNLSDAILLSDILRVNTEITKAPLSASMIKRYDEHHQDLTLLKALVRQQLPEKYKEIFFDQSKNGYAGYIDGGASQEEFYKFIKPILEKMDGTEELLVKLNREDLLRKQRTFDNGSIPHQIHLGELHAILRRQEDFYPFLKDNREKIEKILTFRIPYYVGPLARGNSRFAWMTRKSEETITPWNFEEVVDKGASAQSFIERMTNFDKNLPNEKVLPKHSLLYEYFTVYNELTKVKYVTEGMRKPAFLSGEQKKAIVDLLFKTNRKVTVKQLKEDYFKKIECFDSVEISGVEDRFNASLGTYHDLLKIIKDKDFLDNEENEDILEDIVLTLTLFEDREMIEERLKTYAHLFDDKVMKQLKRRRYTGWGRLSRKLINGIRDKQSGKTILDFLKSDGFANRNFMQLIHDDSLTFKEDIQKAQVSGQGDSLHEHIANLAGSPAIKKGILQTVKVVDELVKVMGRHKPENIVIEMARENQTTQKGQKNSRERMKRIEEGIKELGSQILKEHPVENTQLQNEKLYLYYLQNGRDMYVDQELDINRLSDYDVDHIVPQSFLKDDSIDNKVLTRSDKARGKSDNVPSEEVVKKMKNYWRQLLNAKLITQRKFDNLTKAERGGLSELDKAGFIKRQLVETRQITKHVAQILDSRMNTKYDENDKLIREVKVITLKSKLVSDFRKDFQFYKVREINNYHHAHDAYLNAVVGTALIKKYPKLESEFVYGDYKVYDVRKMIAKSEQEIGKATAKYFFYSNIMNFFKTEITLANGEIRKRPLIETNGETGEIVWDKGRDFATVRKVLSMPQVNIVKKTEVQTGGFSKESILPKRNSDKLIARKKDWDPKKYGGFDSPTVAYSVLVVAKVEKGKSKKLKSVKELLGITIMERSSFEKNPIDFLEAKGYKEVKKDLIIKLPKYSLFELENGRKRMLASAGELQKGNELALPSKYVNFLYLASHYEKLKGSPEDNEQKQLFVEQHKHYLDEIIEQISEFSKRVILADANLDKVLSAYNKHRDKPIREQAENIIHLFTLTNLGAPAAFKYFDTTIDRKRYTSTKEVLDATLIHQSITGLYETRIDLSQLGGDGGEAAAKPAPGSSGGMDPLQLLQPLEAEIKGTKLKAHWNSGATITCVPQAFLEEEVPIKNIWIKTIHGEKEQPVYYLTFKIQGRKVEAEVISSPYDYILVSPSDIPWLMKKPLQLTTLVPLQEYEERLLKQTMLTGSYKEKLQSLFLKYDALWQHWENQVGHRRIKPHHIATGTVNPRPQKQYPINPKAKASIQTVINDLLKQGVLIQQNSIMNTPVYPVPKPDGKWRMVLDYREVNKTIPLIAAQNQHSAGILSSIFRGKYKTTLDLSNGFWAHSITPESYWLTAFTWLGQQYCWTRLPQGFLNSPALFNADVVDLLKEVPNVQVYVDDIYISHDDPREHLEQLEKVFSLLLNAGYVVSLKKSEIAQHEVEFLGFNITKEGRGLTETFKQKLLNITPPRDLKQLQSILGLLNFARNFIPNFSELVKPLYNIIATAPGKYITWTTDNSQQLQNIISMLNSAENLEERNPEVRLIMKVNTSPSAGYIRFYNEFAKRPIMYLNYVYTKAEVKFTNTEKLLTTIHKGLIKALDLGMGQEILVYSPIVSMTKIQKTPLPERKALPIRWITWMSYLEDPRIQFHYDKTLPELQQVPTVTDDIIAKIKHPSEFSMVFYTDGSAIKHPNVNKSHNAGMGIAQVQFKPEFTVINTWSIPLGDHTAQLAEVAAVEFACKKALKIDGPVLIVTDSFYVAESVNKELPYWQSNGFFNNKKKPLKHVSKWKSIADCIQLKPDIIIIHEKGHQPTASTFHTEGNNLADKLATQGSYVVNAGKRTADGSEFEKRTADGSEFESPKKKAKVE

SEQ ID NO: 633 - protein, 2176 aa, synthetic construct
MPAAKRVKLDGGDKKYSIGLDIGTNSVGWAVITDEYKVPSKKFKVLGNTDRHSIKKNLIGALLFDSGETAEATRLKRTARRRYTRRKNRICYLQEIFSNEMAKVDDSFFHRLEESFLVEEDKKHERHPIFGNIVDEVAYHEKYPTIYHLRKKLVDSTDKADLRLIYLALAHMIKFRGHFLIEGDLNPDNSDVDKLFIQLVQTYNQLFEENPINASGVDAKAILSARLSKSRRLENLIAQLPGEKKNGLFGNLIALSLGLTPNFKSNFDLAEDAKLQLSKDTYDDDLDNLLAQIGDQYADLFLAAKNLSDAILLSDILRVNTEITKAPLSASMIKRYDEHHQDLTLLKALVRQQLPEKYKEIFFDQSKNGYAGYIDGGASQEEFYKFIKPILEKMDGTEELLVKLNREDLLRKQRTFDNGSIPHQIHLGELHAILRRQEDFYPFLKDNREKIEKILTFRIPYYVGPLARGNSRFAWMTRKSEETITPWNFEEVVDKGASAQSFIERMTNFDKNLPNEKVLPKHSLLYEYFTVYNELTKVKYVTEGMRKPAFLSGEQKKAIVDLLFKTNRKVTVKQLKEDYFKKIECFDSVEISGVEDRFNASLGTYHDLLKIIKDKDFLDNEENEDILEDIVLTLTLFEDREMIEERLKTYAHLFDDKVMKQLKRRRYTGWGRLSRKLINGIRDKQSGKTILDFLKSDGFANRNFMQLIHDDSLTFKEDIQKAQVSGQGDSLHEHIANLAGSPAIKKGILQTVKVVDELVKVMGRHKPENIVIEMARENQTTQKGQKNSRERMKRIEEGIKELGSQILKEHPVENTQLQNEKLYLYYLQNGRDMYVDQELDINRLSDYDVDHIVPQSFLKDDSIDNKVLTRSDKARGKSDNVPSEEVVKKMKNYWRQLLNAKLITQRKFDNLTKAERGGLSELDKAGFIKRQLVETRQITKHVAQILDSRMNTKYDENDKLIREVKVITLKSKLVSDFRKDFQFYKVREINNYHHAHDAYLNAVVGTALIKKYPKLESEFVYGDYKVYDVRKMIAKSEQEIGKATAKYFFYSNIMNFFKTEITLANGEIRKRPLIETNGETGEIVWDKGRDFATVRKVLSMPQVNIVKKTEVQTGGFSKESILPKRNSDKLIARKKDWDPKKYGGFDSPTVAYSVLVVAKVEKGKSKKLKSVKELLGITIMERSSFEKNPIDFLEAKGYKEVKKDLIIKLPKYSLFELENGRKRMLASAGELQKGNELALPSKYVNFLYLASHYEKLKGSPEDNEQKQLFVEQHKHYLDEIIEQISEFSKRVILADANLDKVLSAYNKHRDKPIREQAENIIHLFTLTNLGAPAAFKYFDTTIDRKRYTSTKEVLDATLIHQSITGLYETRIDLSQLGGDGGGGSPAPEAAAKGGMDPLQLLQPLEAEIKGTKLKAHWNSGATITCVPQAFLEEEVPIKNIWIKTIHGEKEQPVYYLTFKIQGRKVEAEVISSPYDYILVSPSDIPWLMKKPLQLTTLVPLQEYEERLLKQTMLTGSYKEKLQSLFLKYDALWQHWENQVGHRRIKPHHIATGTVNPRPQKQYPINPKAKASIQTVINDLLKQGVLIQQNSIMNTPVYPVPKPDGKWRMVLDYREVNKTIPLIAAQNQHSAGILSSIFRGKYKTTLDLSNGFWAHSITPESYWLTAFTWLGQQYCWTRLPQGFLNSPALFNADVVDLLKEVPNVQVYVDDIYISHDDPREHLEQLEKVFSLLLNAGYVVSLKKSEIAQHEVEFLGFNITKEGRGLTETFKQKLLNITPPRDLKQLQSILGLLNFARNFIPNFSELVKPLYNIIATAPGKYITWTTDNSQQLQNIISMLNSAENLEERNPEVRLIMKVNTSPSAGYIRFYNEFAKRPIMYLNYVYTKAEVKFTNTEKLLTTIHKGLIKALDLGMGQEILVYSPIVSMTKIQKTPLPERKALPIRWITWMSYLEDPRIQFHYDKTLPELQQVPTVTDDIIAKIKHPSEFSMVFYTDGSAIKHPNVNKSHNAGMGIAQVQFKPEFTVINTWSIPLGDHTAQLAEVAAVEFACKKALKIDGPVLIVTDSFYVAESVNKELPYWQSNGFFNNKKKPLKHVSKWKSIADCIQLKPDIIIIHEKGHQPTASTFHTEGNNLADKLATQGSYVVNAGKRTADGSEFEKRTADGSEFESPKKKAKVE

SEQ ID NO: 634 - protein, 2174 aa, synthetic construct
MPAAKRVKLDGGDKKYSIGLDIGTNSVGWAVITDEYKVPSKKFKVLGNTDRHSIKKNLIGALLFDSGETAEATRLKRTARRRYTRRKNRICYLQEIFSNEMAKVDDSFFHRLEESFLVEEDKKHERHPIFGNIVDEVAYHEKYPTIYHLRKKLVDSTDKADLRLIYLALAHMIKFRGHFLIEGDLNPDNSDVDKLFIQLVQTYNQLFEENPINASGVDAKAILSARLSKSRRLENLIAQLPGEKKNGLFGNLIALSLGLTPNFKSNFDLAEDAKLQLSKDTYDDDLDNLLAQIGDQYADLFLAAKNLSDAILLSDILRVNTEITKAPLSASMIKRYDEHHQDLTLLKALVRQQLPEKYKEIFFDQSKNGYAGYIDGGASQEEFYKFIKPILEKMDGTEELLVKLNREDLLRKQRTFDNGSIPHQIHLGELHAILRRQEDFYPFLKDNREKIEKILTFRIPYYVGPLARGNSRFAWMTRKSEETITPWNFEEVVDKGASAQSFIERMTNFDKNLPNEKVLPKHSLLYEYFTVYNELTKVKYVTEGMRKPAFLSGEQKKAIVDLLFKTNRKVTVKQLKEDYFKKIECFDSVEISGVEDRFNASLGTYHDLLKIIKDKDFLDNEENEDILEDIVLTLTLFEDREMIEERLKTYAHLFDDKVMKQLKRRRYTGWGRLSRKLINGIRDKQSGKTILDFLKSDGFANRNFMQLIHDDSLTFKEDIQKAQVSGQGDSLHEHIANLAGSPAIKKGILQTVKVVDELVKVMGRHKPENIVIEMARENQTTQKGQKNSRERMKRIEEGIKELGSQILKEHPVENTQLQNEKLYLYYLQNGRDMYVDQELDINRLSDYDVDHIVPQSFLKDDSIDNKVLTRSDKARGKSDNVPSEEVVKKMKNYWRQLLNAKLITQRKFDNLTKAERGGLSELDKAGFIKRQLVETRQITKHVAQILDSRMNTKYDENDKLIREVKVITLKSKLVSDFRKDFQFYKVREINNYHHAHDAYLNAVVGTALIKKYPKLESEFVYGDYKVYDVRKMIAKSEQEIGKATAKYFFYSNIMNFFKTEITLANGEIRKRPLIETNGETGEIVWDKGRDFATVRKVLSMPQVNIVKKTEVQTGGFSKESILPKRNSDKLIARKKDWDPKKYGGFDSPTVAYSVLVVAKVEKGKSKKLKSVKELLGITIMERSSFEKNPIDFLEAKGYKEVKKDLIIKLPKYSLFELENGRKRMLASAGELQKGNELALPSKYVNFLYLASHYEKLKGSPEDNEQKQLFVEQHKHYLDEIIEQISEFSKRVILADANLDKVLSAYNKHRDKPIREQAENIIHLFTLTNLGAPAAFKYFDTTIDRKRYTSTKEVLDATLIHQSITGLYETRIDLSQLGGDGGGGGPAPGSSGGMDPLQLLQPLEAEIKGTKLKAHWNSGATITCVPQAFLEEEVPIKNIWIKTIHGEKEQPVYYLTFKIQGRKVEAEVISSPYDYILVSPSDIPWLMKKPLQLTTLVPLQEYEERLLKQTMLTGSYKEKLQSLFLKYDALWQHWENQVGHRRIKPHHIATGTVNPRPQKQYPINPKAKASIQTVINDLLKQGVLIQQNSIMNTPVYPVPKPDGKWRMVLDYREVNKTIPLIAAQNQHSAGILSSIFRGKYKTTLDLSNGFWAHSITPESYWLTAFTWLGQQYCWTRLPQGFLNSPALFNADVVDLLKEVPNVQVYVDDIYISHDDPREHLEQLEKVFSLLLNAGYVVSLKKSEIAQHEVEFLGFNITKEGRGLTETFKQKLLNITPPRDLKQLQSILGLLNFARNFIPNFSELVKPLYNIIATAPGKYITWTTDNSQQLQNIISMLNSAENLEERNPEVRLIMKVNTSPSAGYIRFYNEFAKRPIMYLNYVYTKAEVKFTNTEKLLTTIHKGLIKALDLGMGQEILVYSPIVSMTKIQKTPLPERKALPIRWITWMSYLEDPRIQFHYDKTLPELQQVPTVTDDIIAKIKHPSEFSMVFYTDGSAIKHPNVNKSHNAGMGIAQVQFKPEFTVINTWSIPLGDHTAQLAEVAAVEFACKKALKIDGPVLIVTDSFYVAESVNKELPYWQSNGFFNNKKKPLKHVSKWKSIADCIQLKPDIIIIHEKGHQPTASTFHTEGNNLADKLATQGSYVVNAGKRTADGSEFEKRTADGSEFESPKKKAKVE

SEQ ID NO: 635 - protein, 2174 aa, synthetic construct
MPAAKRVKLDGGDKKYSIGLDIGTNSVGWAVITDEYKVPSKKFKVLGNTDRHSIKKNLIGALLFDSGETAEATRLKRTARRRYTRRKNRICYLQEIFSNEMAKVDDSFFHRLEESFLVEEDKKHERHPIFGNIVDEVAYHEKYPTIYHLRKKLVDSTDKADLRLIYLALAHMIKFRGHFLIEGDLNPDNSDVDKLFIQLVQTYNQLFEENPINASGVDAKAILSARLSKSRRLENLIAQLPGEKKNGLFGNLIALSLGLTPNFKSNFDLAEDAKLQLSKDTYDDDLDNLLAQIGDQYADLFLAAKNLSDAILLSDILRVNTEITKAPLSASMIKRYDEHHQDLTLLKALVRQQLPEKYKEIFFDQSKNGYAGYIDGGASQEEFYKFIKPILEKMDGTEELLVKLNREDLLRKQRTFDNGSIPHQIHLGELHAILRRQEDFYPFLKDNREKIEKILTFRIPYYVGPLARGNSRFAWMTRKSEETITPWNFEEVVDKGASAQSFIERMTNFDKNLPNEKVLPKHSLLYEYFTVYNELTKVKYVTEGMRKPAFLSGEQKKAIVDLLFKTNRKVTVKQLKEDYFKKIECFDSVEISGVEDRFNASLGTYHDLLKIIKDKDFLDNEENEDILEDIVLTLTLFEDREMIEERLKTYAHLFDDKVMKQLKRRRYTGWGRLSRKLINGIRDKQSGKTILDFLKSDGFANRNFMQLIHDDSLTFKEDIQKAQVSGQGDSLHEHIANLAGSPAIKKGILQTVKVVDELVKVMGRHKPENIVIEMARENQTTQKGQKNSRERMKRIEEGIKELGSQILKEHPVENTQLQNEKLYLYYLQNGRDMYVDQELDINRLSDYDVDHIVPQSFLKDDSIDNKVLTRSDKARGKSDNVPSEEVVKKMKNYWRQLLNAKLITQRKFDNLTKAERGGLSELDKAGFIKRQLVETRQITKHVAQILDSRMNTKYDENDKLIREVKVITLKSKLVSDFRKDFQFYKVREINNYHHAHDAYLNAVVGTALIKKYPKLESEFVYGDYKVYDVRKMIAKSEQEIGKATAKYFFYSNIMNFFKTEITLANGEIRKRPLIETNGETGEIVWDKGRDFATVRKVLSMPQVNIVKKTEVQTGGFSKESILPKRNSDKLIARKKDWDPKKYGGFDSPTVAYSVLVVAKVEKGKSKKLKSVKELLGITIMERSSFEKNPIDFLEAKGYKEVKKDLIIKLPKYSLFELENGRKRMLASAGELQKGNELALPSKYVNFLYLASHYEKLKGSPEDNEQKQLFVEQHKHYLDEIIEQISEFSKRVILADANLDKVLSAYNKHRDKPIREQAENIIHLFTLTNLGAPAAFKYFDTTIDRKRYTSTKEVLDATLIHQSITGLYETRIDLSQLGGDGGGGSGSSPAPGGMDPLQLLQPLEAEIKGTKLKAHWNSGATITCVPQAFLEEEVPIKNIWIKTIHGEKEQPVYYLTFKIQGRKVEAEVISSPYDYILVSPSDIPWLMKKPLQLTTLVPLQEYEERLLKQTMLTGSYKEKLQSLFLKYDALWQHWENQVGHRRIKPHHIATGTVNPRPQKQYPINPKAKASIQTVINDLLKQGVLIQQNSIMNTPVYPVPKPDGKWRMVLDYREVNKTIPLIAAQNQHSAGILSSIFRGKYKTTLDLSNGFWAHSITPESYWLTAFTWLGQQYCWTRLPQGFLNSPALFNADVVDLLKEVPNVQVYVDDIYISHDDPREHLEQLEKVFSLLLNAGYVVSLKKSEIAQHEVEFLGFNITKEGRGLTETFKQKLLNITPPRDLKQLQSILGLLNFARNFIPNFSELVKPLYNIIATAPGKYITWTTDNSQQLQNIISMLNSAENLEERNPEVRLIMKVNTSPSAGYIRFYNEFAKRPIMYLNYVYTKAEVKFTNTEKLLTTIHKGLIKALDLGMGQEILVYSPIVSMTKIQKTPLPERKALPIRWITWMSYLEDPRIQFHYDKTLPELQQVPTVTDDIIAKIKHPSEFSMVFYTDGSAIKHPNVNKSHNAGMGIAQVQFKPEFTVINTWSIPLGDHTAQLAEVAAVEFACKKALKIDGPVLIVTDSFYVAESVNKELPYWQSNGFFNNKKKPLKHVSKWKSIADCIQLKPDIIIIHEKGHQPTASTFHTEGNNLADKLATQGSYVVNAGKRTADGSEFEKRTADGSEFESPKKKAKVE

SEQ ID NO: 636 - protein, 2176 aa, synthetic construct
MPAAKRVKLDGGDKKYSIGLDIGTNSVGWAVITDEYKVPSKKFKVLGNTDRHSIKKNLIGALLFDSGETAEATRLKRTARRRYTRRKNRICYLQEIFSNEMAKVDDSFFHRLEESFLVEEDKKHERHPIFGNIVDEVAYHEKYPTIYHLRKKLVDSTDKADLRLIYLALAHMIKFRGHFLIEGDLNPDNSDVDKLFIQLVQTYNQLFEENPINASGVDAKAILSARLSKSRRLENLIAQLPGEKKNGLFGNLIALSLGLTPNFKSNFDLAEDAKLQLSKDTYDDDLDNLLAQIGDQYADLFLAAKNLSDAILLSDILRVNTEITKAPLSASMIKRYDEHHQDLTLLKALVRQQLPEKYKEIFFDQSKNGYAGYIDGGASQEEFYKFIKPILEKMDGTEELLVKLNREDLLRKQRTFDNGSIPHQIHLGELHAILRRQEDFYPFLKDNREKIEKILTFRIPYYVGPLARGNSRFAWMTRKSEETITPWNFEEVVDKGASAQSFIERMTNFDKNLPNEKVLPKHSLLYEYFTVYNELTKVKYVTEGMRKPAFLSGEQKKAIVDLLFKTNRKVTVKQLKEDYFKKIECFDSVEISGVEDRFNASLGTYHDLLKIIKDKDFLDNEENEDILEDIVLTLTLFEDREMIEERLKTYAHLFDDKVMKQLKRRRYTGWGRLSRKLINGIRDKQSGKTILDFLKSDGFANRNFMQLIHDDSLTFKEDIQKAQVSGQGDSLHEHIANLAGSPAIKKGILQTVKVVDELVKVMGRHKPENIVIEMARENQTTQKGQKNSRERMKRIEEGIKELGSQILKEHPVENTQLQNEKLYLYYLQNGRDMYVDQELDINRLSDYDVDHIVPQSFLKDDSIDNKVLTRSDKARGKSDNVPSEEVVKKMKNYWRQLLNAKLITQRKFDNLTKAERGGLSELDKAGFIKRQLVETRQITKHVAQILDSRMNTKYDENDKLIREVKVITLKSKLVSDFRKDFQFYKVREINNYHHAHDAYLNAVVGTALIKKYPKLESEFVYGDYKVYDVRKMIAKSEQEIGKATAKYFFYSNIMNFFKTEITLANGEIRKRPLIETNGETGEIVWDKGRDFATVRKVLSMPQVNIVKKTEVQTGGFSKESILPKRNSDKLIARKKDWDPKKYGGFDSPTVAYSVLVVAKVEKGKSKKLKSVKELLGITIMERSSFEKNPIDFLEAKGYKEVKKDLIIKLPKYSLFELENGRKRMLASAGELQKGNELALPSKYVNFLYLASHYEKLKGSPEDNEQKQLFVEQHKHYLDEIIEQISEFSKRVILADANLDKVLSAYNKHRDKPIREQAENIIHLFTLTNLGAPAAFKYFDTTIDRKRYTSTKEVLDATLIHQSITGLYETRIDLSQLGGDGGEAAAKGGGPAPGGMDPLQLLQPLEAEIKGTKLKAHWNSGATITCVPQAFLEEEVPIKNIWIKTIHGEKEQPVYYLTFKIQGRKVEAEVISSPYDYILVSPSDIPWLMKKPLQLTTLVPLQEYEERLLKQTMLTGSYKEKLQSLFLKYDALWQHWENQVGHRRIKPHHIATGTVNPRPQKQYPINPKAKASIQTVINDLLKQGVLIQQNSIMNTPVYPVPKPDGKWRMVLDYREVNKTIPLIAAQNQHSAGILSSIFRGKYKTTLDLSNGFWAHSITPESYWLTAFTWLGQQYCWTRLPQGFLNSPALFNADVVDLLKEVPNVQVYVDDIYISHDDPREHLEQLEKVFSLLLNAGYVVSLKKSEIAQHEVEFLGFNITKEGRGLTETFKQKLLNITPPRDLKQLQSILGLLNFARNFIPNFSELVKPLYNIIATAPGKYITWTTDNSQQLQNIISMLNSAENLEERNPEVRLIMKVNTSPSAGYIRFYNEFAKRPIMYLNYVYTKAEVKFTNTEKLLTTIHKGLIKALDLGMGQEILVYSPIVSMTKIQKTPLPERKALPIRWITWMSYLEDPRIQFHYDKTLPELQQVPTVTDDIIAKIKHPSEFSMVFYTDGSAIKHPNVNKSHNAGMGIAQVQFKPEFTVINTWSIPLGDHTAQLAEVAAVEFACKKALKIDGPVLIVTDSFYVAESVNKELPYWQSNGFFNNKKKPLKHVSKWKSIADCIQLKPDIIIIHEKGHQPTASTFHTEGNNLADKLATQGSYVVNAGKRTADGSEFEKRTADGSEFESPKKKAKVE

SEQ ID NO: 637 - protein, 2180 aa, synthetic construct
MPAAKRVKLDGGDKKYSIGLDIGTNSVGWAVITDEYKVPSKKFKVLGNTDRHSIKKNLIGALLFDSGETAEATRLKRTARRRYTRRKNRICYLQEIFSNEMAKVDDSFFHRLEESFLVEEDKKHERHPIFGNIVDEVAYHEKYPTIYHLRKKLVDSTDKADLRLIYLALAHMIKFRGHFLIEGDLNPDNSDVDKLFIQLVQTYNQLFEENPINASGVDAKAILSARLSKSRRLENLIAQLPGEKKNGLFGNLIALSLGLTPNFKSNFDLAEDAKLQLSKDTYDDDLDNLLAQIGDQYADLFLAAKNLSDAILLSDILRVNTEITKAPLSASMIKRYDEHHQDLTLLKALVRQQLPEKYKEIFFDQSKNGYAGYIDGGASQEEFYKFIKPILEKMDGTEELLVKLNREDLLRKQRTFDNGSIPHQIHLGELHAILRRQEDFYPFLKDNREKIEKILTFRIPYYVGPLARGNSRFAWMTRKSEETITPWNFEEVVDKGASAQSFIERMTNFDKNLPNEKVLPKHSLLYEYFTVYNELTKVKYVTEGMRKPAFLSGEQKKAIVDLLFKTNRKVTVKQLKEDYFKKIECFDSVEISGVEDRFNASLGTYHDLLKIIKDKDFLDNEENEDILEDIVLTLTLFEDREMIEERLKTYAHLFDDKVMKQLKRRRYTGWGRLSRKLINGIRDKQSGKTILDFLKSDGFANRNFMQLIHDDSLTFKEDIQKAQVSGQGDSLHEHIANLAGSPAIKKGILQTVKVVDELVKVMGRHKPENIVIEMARENQTTQKGQKNSRERMKRIEEGIKELGSQILKEHPVENTQLQNEKLYLYYLQNGRDMYVDQELDINRLSDYDVDHIVPQSFLKDDSIDNKVLTRSDKARGKSDNVPSEEVVKKMKNYWRQLLNAKLITQRKFDNLTKAERGGLSELDKAGFIKRQLVETRQITKHVAQILDSRMNTKYDENDKLIREVKVITLKSKLVSDFRKDFQFYKVREINNYHHAHDAYLNAVVGTALIKKYPKLESEFVYGDYKVYDVRKMIAKSEQEIGKATAKYFFYSNIMNFFKTEITLANGEIRKRPLIETNGETGEIVWDKGRDFATVRKVLSMPQVNIVKKTEVQTGGFSKESILPKRNSDKLIARKKDWDPKKYGGFDSPTVAYSVLVVAKVEKGKSKKLKSVKELLGITIMERSSFEKNPIDFLEAKGYKEVKKDLIIKLPKYSLFELENGRKRMLASAGELQKGNELALPSKYVNFLYLASHYEKLKGSPEDNEQKQLFVEQHKHYLDEIIEQISEFSKRVILADANLDKVLSAYNKHRDKPIREQAENIIHLFTLTNLGAPAAFKYFDTTIDRKRYTSTKEVLDATLIHQSITGLYETRIDLSQLGGDGGGSSGSSGSSGSSGSSGGMDPLQLLQPLEAEIKGTKLKAHWNSGATITCVPQAFLEEEVPIKNIWIKTIHGEKEQPVYYLTFKIQGRKVEAEVISSPYDYILVSPSDIPWLMKKPLQLTTLVPLQEYEERLLKQTMLTGSYKEKLQSLFLKYDALWQHWENQVGHRRIKPHHIATGTVNPRPQKQYPINPKAKASIQTVINDLLKQGVLIQQNSIMNTPVYPVPKPDGKWRMVLDYREVNKTIPLIAAQNQHSAGILSSIFRGKYKTTLDLSNGFWAHSITPESYWLTAFTWLGQQYCWTRLPQGFLNSPALFNADVVDLLKEVPNVQVYVDDIYISHDDPREHLEQLEKVFSLLLNAGYVVSLKKSEIAQHEVEFLGFNITKEGRGLTETFKQKLLNITPPRDLKQLQSILGLLNFARNFIPNFSELVKPLYNIIATAPGKYITWTTDNSQQLQNIISMLNSAENLEERNPEVRLIMKVNTSPSAGYIRFYNEFAKRPIMYLNYVYTKAEVKFTNTEKLLTTIHKGLIKALDLGMGQEILVYSPIVSMTKIQKTPLPERKALPIRWITWMSYLEDPRIQFHYDKTLPELQQVPTVTDDIIAKIKHPSEFSMVFYTDGSAIKHPNVNKSHNAGMGIAQVQFKPEFTVINTWSIPLGDHTAQLAEVAAVEFACKKALKIDGPVLIVTDSFYVAESVNKELPYWQSNGFFNNKKKPLKHVSKWKSIADCIQLKPDIIIIHEKGHQPTASTFHTEGNNLADKLATQGSYVVNAGKRTADGSEFEKRTADGSEFESPKKKAKVE

SEQ ID NO: 638 - protein, 2173 aa, synthetic construct
MPAAKRVKLDGGDKKYSIGLDIGTNSVGWAVITDEYKVPSKKFKVLGNTDRHSIKKNLIGALLFDSGETAEATRLKRTARRRYTRRKNRICYLQEIFSNEMAKVDDSFFHRLEESFLVEEDKKHERHPIFGNIVDEVAYHEKYPTIYHLRKKLVDSTDKADLRLIYLALAHMIKFRGHFLIEGDLNPDNSDVDKLFIQLVQTYNQLFEENPINASGVDAKAILSARLSKSRRLENLIAQLPGEKKNGLFGNLIALSLGLTPNFKSNFDLAEDAKLQLSKDTYDDDLDNLLAQIGDQYADLFLAAKNLSDAILLSDILRVNTEITKAPLSASMIKRYDEHHQDLTLLKALVRQQLPEKYKEIFFDQSKNGYAGYIDGGASQEEFYKFIKPILEKMDGTEELLVKLNREDLLRKQRTFDNGSIPHQIHLGELHAILRRQEDFYPFLKDNREKIEKILTFRIPYYVGPLARGNSRFAWMTRKSEETITPWNFEEVVDKGASAQSFIERMTNFDKNLPNEKVLPKHSLLYEYFTVYNELTKVKYVTEGMRKPAFLSGEQKKAIVDLLFKTNRKVTVKQLKEDYFKKIECFDSVEISGVEDRFNASLGTYHDLLKIIKDKDFLDNEENEDILEDIVLTLTLFEDREMIEERLKTYAHLFDDKVMKQLKRRRYTGWGRLSRKLINGIRDKQSGKTILDFLKSDGFANRNFMQLIHDDSLTFKEDIQKAQVSGQGDSLHEHIANLAGSPAIKKGILQTVKVVDELVKVMGRHKPENIVIEMARENQTTQKGQKNSRERMKRIEEGIKELGSQILKEHPVENTQLQNEKLYLYYLQNGRDMYVDQELDINRLSDYDVDHIVPQSFLKDDSIDNKVLTRSDKARGKSDNVPSEEVVKKMKNYWRQLLNAKLITQRKFDNLTKAERGGLSELDKAGFIKRQLVETRQITKHVAQILDSRMNTKYDENDKLIREVKVITLKSKLVSDFRKDFQFYKVREINNYHHAHDAYLNAVVGTALIKKYPKLESEFVYGDYKVYDVRKMIAKSEQEIGKATAKYFFYSNIMNFFKTEITLANGEIRKRPLIETNGETGEIVWDKGRDFATVRKVLSMPQVNIVKKTEVQTGGFSKESILPKRNSDKLIARKKDWDPKKYGGFDSPTVAYSVLVVAKVEKGKSKKLKSVKELLGITIMERSSFEKNPIDFLEAKGYKEVKKDLIIKLPKYSLFELENGRKRMLASAGELQKGNELALPSKYVNFLYLASHYEKLKGSPEDNEQKQLFVEQHKHYLDEIIEQISEFSKRVILADANLDKVLSAYNKHRDKPIREQAENIIHLFTLTNLGAPAAFKYFDTTIDRKRYTSTKEVLDATLIHQSITGLYETRIDLSQLGGDGGEAAAKGSSGGMDPLQLLQPLEAEIKGTKLKAHWNSGATITCVPQAFLEEEVPIKNIWIKTIHGEKEQPVYYLTFKIQGRKVEAEVISSPYDYILVSPSDIPWLMKKPLQLTTLVPLQEYEERLLKQTMLTGSYKEKLQSLFLKYDALWQHWENQVGHRRIKPHHIATGTVNPRPQKQYPINPKAKASIQTVINDLLKQGVLIQQNSIMNTPVYPVPKPDGKWRMVLDYREVNKTIPLIAAQNQHSAGILSSIFRGKYKTTLDLSNGFWAHSITPESYWLTAFTWLGQQYCWTRLPQGFLNSPALFNADVVDLLKEVPNVQVYVDDIYISHDDPREHLEQLEKVFSLLLNAGYVVSLKKSEIAQHEVEFLGFNITKEGRGLTETFKQKLLNITPPRDLKQLQSILGLLNFARNFIPNFSELVKPLYNIIATAPGKYITWTTDNSQQLQNIISMLNSAENLEERNPEVRLIMKVNTSPSAGYIRFYNEFAKRPIMYLNYVYTKAEVKFTNTEKLLTTIHKGLIKALDLGMGQEILVYSPIVSMTKIQKTPLPERKALPIRWITWMSYLEDPRIQFHYDKTLPELQQVPTVTDDIIAKIKHPSEFSMVFYTDGSAIKHPNVNKSHNAGMGIAQVQFKPEFTVINTWSIPLGDHTAQLAEVAAVEFACKKALKIDGPVLIVTDSFYVAESVNKELPYWQSNGFFNNKKKPLKHVSKWKSIADCIQLKPDIIIIHEKGHQPTASTFHTEGNNLADKLATQGSYVVNAGKRTADGSEFEKRTADGSEFESPKKKAKVE

SEQ ID NO: 639 - protein, 2172 aa, synthetic construct
MPAAKRVKLDGGDKKYSIGLDIGTNSVGWAVITDEYKVPSKKFKVLGNTDRHSIKKNLIGALLFDSGETAEATRLKRTARRRYTRRKNRICYLQEIFSNEMAKVDDSFFHRLEESFLVEEDKKHERHPIFGNIVDEVAYHEKYPTIYHLRKKLVDSTDKADLRLIYLALAHMIKFRGHFLIEGDLNPDNSDVDKLFIQLVQTYNQLFEENPINASGVDAKAILSARLSKSRRLENLIAQLPGEKKNGLFGNLIALSLGLTPNFKSNFDLAEDAKLQLSKDTYDDDLDNLLAQIGDQYADLFLAAKNLSDAILLSDILRVNTEITKAPLSASMIKRYDEHHQDLTLLKALVRQQLPEKYKEIFFDQSKNGYAGYIDGGASQEEFYKFIKPILEKMDGTEELLVKLNREDLLRKQRTFDNGSIPHQIHLGELHAILRRQEDFYPFLKDNREKIEKILTFRIPYYVGPLARGNSRFAWMTRKSEETITPWNFEEVVDKGASAQSFIERMTNFDKNLPNEKVLPKHSLLYEYFTVYNELTKVKYVTEGMRKPAFLSGEQKKAIVDLLFKTNRKVTVKQLKEDYFKKIECFDSVEISGVEDRFNASLGTYHDLLKIIKDKDFLDNEENEDILEDIVLTLTLFEDREMIEERLKTYAHLFDDKVMKQLKRRRYTGWGRLSRKLINGIRDKQSGKTILDFLKSDGFANRNFMQLIHDDSLTFKEDIQKAQVSGQGDSLHEHIANLAGSPAIKKGILQTVKVVDELVKVMGRHKPENIVIEMARENQTTQKGQKNSRERMKRIEEGIKELGSQILKEHPVENTQLQNEKLYLYYLQNGRDMYVDQELDINRLSDYDVDHIVPQSFLKDDSIDNKVLTRSDKARGKSDNVPSEEVVKKMKNYWRQLLNAKLITQRKFDNLTKAERGGLSELDKAGFIKRQLVETRQITKHVAQILDSRMNTKYDENDKLIREVKVITLKSKLVSDFRKDFQFYKVREINNYHHAHDAYLNAVVGTALIKKYPKLESEFVYGDYKVYDVRKMIAKSEQEIGKATAKYFFYSNIMNFFKTEITLANGEIRKRPLIETNGETGEIVWDKGRDFATVRKVLSMPQVNIVKKTEVQTGGFSKESILPKRNSDKLIARKKDWDPKKYGGFDSPTVAYSVLVVAKVEKGKSKKLKSVKELLGITIMERSSFEKNPIDFLEAKGYKEVKKDLIIKLPKYSLFELENGRKRMLASAGELQKGNELALPSKYVNFLYLASHYEKLKGSPEDNEQKQLFVEQHKHYLDEIIEQISEFSKRVILADANLDKVLSAYNKHRDKPIREQAENIIHLFTLTNLGAPAAFKYFDTTIDRKRYTSTKEVLDATLIHQSITGLYETRIDLSQLGGDGGGGGGGGGGGMDPLQLLQPLEAEIKGTKLKAHWNSGATITCVPQAFLEEEVPIKNIWIKTIHGEKEQPVYYLTFKIQGRKVEAEVISSPYDYILVSPSDIPWLMKKPLQLTTLVPLQEYEERLLKQTMLTGSYKEKLQSLFLKYDALWQHWENQVGHRRIKPHHIATGTVNPRPQKQYPINPKAKASIQTVINDLLKQGVLIQQNSIMNTPVYPVPKPDGKWRMVLDYREVNKTIPLIAAQNQHSAGILSSIFRGKYKTTLDLSNGFWAHSITPESYWLTAFTWLGQQYCWTRLPQGFLNSPALFNADVVDLLKEVPNVQVYVDDIYISHDDPREHLEQLEKVFSLLLNAGYVVSLKKSEIAQHEVEFLGFNITKEGRGLTETFKQKLLNITPPRDLKQLQSILGLLNFARNFIPNFSELVKPLYNIIATAPGKYITWTTDNSQQLQNIISMLNSAENLEERNPEVRLIMKVNTSPSAGYIRFYNEFAKRPIMYLNYVYTKAEVKFTNTEKLLTTIHKGLIKALDLGMGQEILVYSPIVSMTKIQKTPLPERKALPIRWITWMSYLEDPRIQFHYDKTLPELQQVPTVTDDIIAKIKHPSEFSMVFYTDGSAIKHPNVNKSHNAGMGIAQVQFKPEFTVINTWSIPLGDHTAQLAEVAAVEFACKKALKIDGPVLIVTDSFYVAESVNKELPYWQSNGFFNNKKKPLKHVSKWKSIADCIQLKPDIIIIHEKGHQPTASTFHTEGNNLADKLATQGSYVVNAGKRTADGSEFEKRTADGSEFESPKKKAKVE

SEQ ID NO: 640 - protein, 2176 aa, synthetic construct
MPAAKRVKLDGGDKKYSIGLDIGTNSVGWAVITDEYKVPSKKFKVLGNTDRHSIKKNLIGALLFDSGETAEATRLKRTARRRYTRRKNRICYLQEIFSNEMAKVDDSFFHRLEESFLVEEDKKHERHPIFGNIVDEVAYHEKYPTIYHLRKKLVDSTDKADLRLIYLALAHMIKFRGHFLIEGDLNPDNSDVDKLFIQLVQTYNQLFEENPINASGVDAKAILSARLSKSRRLENLIAQLPGEKKNGLFGNLIALSLGLTPNFKSNFDLAEDAKLQLSKDTYDDDLDNLLAQIGDQYADLFLAAKNLSDAILLSDILRVNTEITKAPLSASMIKRYDEHHQDLTLLKALVRQQLPEKYKEIFFDQSKNGYAGYIDGGASQEEFYKFIKPILEKMDGTEELLVKLNREDLLRKQRTFDNGSIPHQIHLGELHAILRRQEDFYPFLKDNREKIEKILTFRIPYYVGPLARGNSRFAWMTRKSEETITPWNFEEVVDKGASAQSFIERMTNFDKNLPNEKVLPKHSLLYEYFTVYNELTKVKYVTEGMRKPAFLSGEQKKAIVDLLFKTNRKVTVKQLKEDYFKKIECFDSVEISGVEDRFNASLGTYHDLLKIIKDKDFLDNEENEDILEDIVLTLTLFEDREMIEERLKTYAHLFDDKVMKQLKRRRYTGWGRLSRKLINGIRDKQSGKTILDFLKSDGFANRNFMQLIHDDSLTFKEDIQKAQVSGQGDSLHEHIANLAGSPAIKKGILQTVKVVDELVKVMGRHKPENIVIEMARENQTTQKGQKNSRERMKRIEEGIKELGSQILKEHPVENTQLQNEKLYLYYLQNGRDMYVDQELDINRLSDYDVDHIVPQSFLKDDSIDNKVLTRSDKARGKSDNVPSEEVVKKMKNYWRQLLNAKLITQRKFDNLTKAERGGLSELDKAGFIKRQLVETRQITKHVAQILDSRMNTKYDENDKLIREVKVITLKSKLVSDFRKDFQFYKVREINNYHHAHDAYLNAVVGTALIKKYPKLESEFVYGDYKVYDVRKMIAKSEQEIGKATAKYFFYSNIMNFFKTEITLANGEIRKRPLIETNGETGEIVWDKGRDFATVRKVLSMPQVNIVKKTEVQTGGFSKESILPKRNSDKLIARKKDWDPKKYGGFDSPTVAYSVLVVAKVEKGKSKKLKSVKELLGITIMERSSFEKNPIDFLEAKGYKEVKKDLIIKLPKYSLFELENGRKRMLASAGELQKGNELALPSKYVNFLYLASHYEKLKGSPEDNEQKQLFVEQHKHYLDEIIEQISEFSKRVILADANLDKVLSAYNKHRDKPIREQAENIIHLFTLTNLGAPAAFKYFDTTIDRKRYTSTKEVLDATLIHQSITGLYETRIDLSQLGGDGGGGSEAAAKGSSGGMDPLQLLQPLEAEIKGTKLKAHWNSGATITCVPQAFLEEEVPIKNIWIKTIHGEKEQPVYYLTFKIQGRKVEAEVISSPYDYILVSPSDIPWLMKKPLQLTTLVPLQEYEERLLKQTMLTGSYKEKLQSLFLKYDALWQHWENQVGHRRIKPHHIATGTVNPRPQKQYPINPKAKASIQTVINDLLKQGVLIQQNSIMNTPVYPVPKPDGKWRMVLDYREVNKTIPLIAAQNQHSAGILSSIFRGKYKTTLDLSNGFWAHSITPESYWLTAFTWLGQQYCWTRLPQGFLNSPALFNADVVDLLKEVPNVQVYVDDIYISHDDPREHLEQLEKVFSLLLNAGYVVSLKKSEIAQHEVEFLGFNITKEGRGLTETFKQKLLNITPPRDLKQLQSILGLLNFARNFIPNFSELVKPLYNIIATAPGKYITWTTDNSQQLQNIISMLNSAENLEERNPEVRLIMKVNTSPSAGYIRFYNEFAKRPIMYLNYVYTKAEVKFTNTEKLLTTIHKGLIKALDLGMGQEILVYSPIVSMTKIQKTPLPERKALPIRWITWMSYLEDPRIQFHYDKTLPELQQVPTVTDDIIAKIKHPSEFSMVFYTDGSAIKHPNVNKSHNAGMGIAQVQFKPEFTVINTWSIPLGDHTAQLAEVAAVEFACKKALKIDGPVLIVTDSFYVAESVNKELPYWQSNGFFNNKKKPLKHVSKWKSIADCIQLKPDIIIIHEKGHQPTASTFHTEGNNLADKLATQGSYVVNAGKRTADGSEFEKRTADGSEFESPKKKAKVE

SEQ ID NO: 641 - protein, 2176 aa, synthetic construct
MPAAKRVKLDGGDKKYSIGLDIGTNSVGWAVITDEYKVPSKKFKVLGNTDRHSIKKNLIGALLFDSGETAEATRLKRTARRRYTRRKNRICYLQEIFSNEMAKVDDSFFHRLEESFLVEEDKKHERHPIFGNIVDEVAYHEKYPTIYHLRKKLVDSTDKADLRLIYLALAHMIKFRGHFLIEGDLNPDNSDVDKLFIQLVQTYNQLFEENPINASGVDAKAILSARLSKSRRLENLIAQLPGEKKNGLFGNLIALSLGLTPNFKSNFDLAEDAKLQLSKDTYDDDLDNLLAQIGDQYADLFLAAKNLSDAILLSDILRVNTEITKAPLSASMIKRYDEHHQDLTLLKALVRQQLPEKYKEIFFDQSKNGYAGYIDGGASQEEFYKFIKPILEKMDGTEELLVKLNREDLLRKQRTFDNGSIPHQIHLGELHAILRRQEDFYPFLKDNREKIEKILTFRIPYYVGPLARGNSRFAWMTRKSEETITPWNFEEVVDKGASAQSFIERMTNFDKNLPNEKVLPKHSLLYEYFTVYNELTKVKYVTEGMRKPAFLSGEQKKAIVDLLFKTNRKVTVKQLKEDYFKKIECFDSVEISGVEDRFNASLGTYHDLLKIIKDKDFLDNEENEDILEDIVLTLTLFEDREMIEERLKTYAHLFDDKVMKQLKRRRYTGWGRLSRKLINGIRDKQSGKTILDFLKSDGFANRNFMQLIHDDSLTFKEDIQKAQVSGQGDSLHEHIANLAGSPAIKKGILQTVKVVDELVKVMGRHKPENIVIEMARENQTTQKGQKNSRERMKRIEEGIKELGSQILKEHPVENTQLQNEKLYLYYLQNGRDMYVDQELDINRLSDYDVDHIVPQSFLKDDSIDNKVLTRSDKARGKSDNVPSEEVVKKMKNYWRQLLNAKLITQRKFDNLTKAERGGLSELDKAGFIKRQLVETRQITKHVAQILDSRMNTKYDENDKLIREVKVITLKSKLVSDFRKDFQFYKVREINNYHHAHDAYLNAVVGTALIKKYPKLESEFVYGDYKVYDVRKMIAKSEQEIGKATAKYFFYSNIMNFFKTEITLANGEIRKRPLIETNGETGEIVWDKGRDFATVRKVLSMPQVNIVKKTEVQTGGFSKESILPKRNSDKLIARKKDWDPKKYGGFDSPTVAYSVLVVAKVEKGKSKKLKSVKELLGITIMERSSFEKNPIDFLEAKGYKEVKKDLIIKLPKYSLFELENGRKRMLASAGELQKGNELALPSKYVNFLYLASHYEKLKGSPEDNEQKQLFVEQHKHYLDEIIEQISEFSKRVILADANLDKVLSAYNKHRDKPIREQAENIIHLFTLTNLGAPAAFKYFDTTIDRKRYTSTKEVLDATLIHQSITGLYETRIDLSQLGGDGGPAPEAAAKGGSGGMDPLQLLQPLEAEIKGTKLKAHWNSGATITCVPQAFLEEEVPIKNIWIKTIHGEKEQPVYYLTFKIQGRKVEAEVISSPYDYILVSPSDIPWLMKKPLQLTTLVPLQEYEERLLKQTMLTGSYKEKLQSLFLKYDALWQHWENQVGHRRIKPHHIATGTVNPRPQKQYPINPKAKASIQTVINDLLKQGVLIQQNSIMNTPVYPVPKPDGKWRMVLDYREVNKTIPLIAAQNQHSAGILSSIFRGKYKTTLDLSNGFWAHSITPESYWLTAFTWLGQQYCWTRLPQGFLNSPALFNADVVDLLKEVPNVQVYVDDIYISHDDPREHLEQLEKVFSLLLNAGYVVSLKKSEIAQHEVEFLGFNITKEGRGLTETFKQKLLNITPPRDLKQLQSILGLLNFARNFIPNFSELVKPLYNIIATAPGKYITWTTDNSQQLQNIISMLNSAENLEERNPEVRLIMKVNTSPSAGYIRFYNEFAKRPIMYLNYVYTKAEVKFTNTEKLLTTIHKGLIKALDLGMGQEILVYSPIVSMTKIQKTPLPERKALPIRWITWMSYLEDPRIQFHYDKTLPELQQVPTVTDDIIAKIKHPSEFSMVFYTDGSAIKHPNVNKSHNAGMGIAQVQFKPEFTVINTWSIPLGDHTAQLAEVAAVEFACKKALKIDGPVLIVTDSFYVAESVNKELPYWQSNGFFNNKKKPLKHVSKWKSIADCIQLKPDIIIIHEKGHQPTASTFHTEGNNLADKLATQGSYVVNAGKRTADGSEFEKRTADGSEFESPKKKAKVE

SEQ ID NO: 642 - protein, 2173 aa, synthetic construct
MPAAKRVKLDGGDKKYSIGLDIGTNSVGWAVITDEYKVPSKKFKVLGNTDRHSIKKNLIGALLFDSGETAEATRLKRTARRRYTRRKNRICYLQEIFSNEMAKVDDSFFHRLEESFLVEEDKKHERHPIFGNIVDEVAYHEKYPTIYHLRKKLVDSTDKADLRLIYLALAHMIKFRGHFLIEGDLNPDNSDVDKLFIQLVQTYNQLFEENPINASGVDAKAILSARLSKSRRLENLIAQLPGEKKNGLFGNLIALSLGLTPNFKSNFDLAEDAKLQLSKDTYDDDLDNLLAQIGDQYADLFLAAKNLSDAILLSDILRVNTEITKAPLSASMIKRYDEHHQDLTLLKALVRQQLPEKYKEIFFDQSKNGYAGYIDGGASQEEFYKFIKPILEKMDGTEELLVKLNREDLLRKQRTFDNGSIPHQIHLGELHAILRRQEDFYPFLKDNREKIEKILTFRIPYYVGPLARGNSRFAWMTRKSEETITPWNFEEVVDKGASAQSFIERMTNFDKNLPNEKVLPKHSLLYEYFTVYNELTKVKYVTEGMRKPAFLSGEQKKAIVDLLFKTNRKVTVKQLKEDYFKKIECFDSVEISGVEDRFNASLGTYHDLLKIIKDKDFLDNEENEDILEDIVLTLTLFEDREMIEERLKTYAHLFDDKVMKQLKRRRYTGWGRLSRKLINGIRDKQSGKTILDFLKSDGFANRNFMQLIHDDSLTFKEDIQKAQVSGQGDSLHEHIANLAGSPAIKKGILQTVKVVDELVKVMGRHKPENIVIEMARENQTTQKGQKNSRERMKRIEEGIKELGSQILKEHPVENTQLQNEKLYLYYLQNGRDMYVDQELDINRLSDYDVDHIVPQSFLKDDSIDNKVLTRSDKARGKSDNVPSEEVVKKMKNYWRQLLNAKLITQRKFDNLTKAERGGLSELDKAGFIKRQLVETRQITKHVAQILDSRMNTKYDENDKLIREVKVITLKSKLVSDFRKDFQFYKVREINNYHHAHDAYLNAVVGTALIKKYPKLESEFVYGDYKVYDVRKMIAKSEQEIGKATAKYFFYSNIMNFFKTEITLANGEIRKRPLIETNGETGEIVWDKGRDFATVRKVLSMPQVNIVKKTEVQTGGFSKESILPKRNSDKLIARKKDWDPKKYGGFDSPTVAYSVLVVAKVEKGKSKKLKSVKELLGITIMERSSFEKNPIDFLEAKGYKEVKKDLIIKLPKYSLFELENGRKRMLASAGELQKGNELALPSKYVNFLYLASHYEKLKGSPEDNEQKQLFVEQHKHYLDEIIEQISEFSKRVILADANLDKVLSAYNKHRDKPIREQAENIIHLFTLTNLGAPAAFKYFDTTIDRKRYTSTKEVLDATLIHQSITGLYETRIDLSQLGGDGGGGGGGGGGGGMDPLQLLQPLEAEIKGTKLKAHWNSGATITCVPQAFLEEEVPIKNIWIKTIHGEKEQPVYYLTFKIQGRKVEAEVISSPYDYILVSPSDIPWLMKKPLQLTTLVPLQEYEERLLKQTMLTGSYKEKLQSLFLKYDALWQHWENQVGHRRIKPHHIATGTVNPRPQKQYPINPKAKASIQTVINDLLKQGVLIQQNSIMNTPVYPVPKPDGKWRMVLDYREVNKTIPLIAAQNQHSAGILSSIFRGKYKTTLDLSNGFWAHSITPESYWLTAFTWLGQQYCWTRLPQGFLNSPALFNADVVDLLKEVPNVQVYVDDIYISHDDPREHLEQLEKVFSLLLNAGYVVSLKKSEIAQHEVEFLGFNITKEGRGLTETFKQKLLNITPPRDLKQLQSILGLLNFARNFIPNFSELVKPLYNIIATAPGKYITWTTDNSQQLQNIISMLNSAENLEERNPEVRLIMKVNTSPSAGYIRFYNEFAKRPIMYLNYVYTKAEVKFTNTEKLLTTIHKGLIKALDLGMGQEILVYSPIVSMTKIQKTPLPERKALPIRWITWMSYLEDPRIQFHYDKTLPELQQVPTVTDDIIAKIKHPSEFSMVFYTDGSAIKHPNVNKSHNAGMGIAQVQFKPEFTVINTWSIPLGDHTAQLAEVAAVEFACKKALKIDGPVLIVTDSFYVAESVNKELPYWQSNGFFNNKKKPLKHVSKWKSIADCIQLKPDIIIIHEKGHQPTASTFHTEGNNLADKLATQGSYVVNAGKRTADGSEFEKRTADGSEFESPKKKAKVE

SEQ ID NO: 643 - protein, 2171 aa, synthetic construct
MPAAKRVKLDGGDKKYSIGLDIGTNSVGWAVITDEYKVPSKKFKVLGNTDRHSIKKNLIGALLFDSGETAEATRLKRTARRRYTRRKNRICYLQEIFSNEMAKVDDSFFHRLEESFLVEEDKKHERHPIFGNIVDEVAYHEKYPTIYHLRKKLVDSTDKADLRLIYLALAHMIKFRGHFLIEGDLNPDNSDVDKLFIQLVQTYNQLFEENPINASGVDAKAILSARLSKSRRLENLIAQLPGEKKNGLFGNLIALSLGLTPNFKSNFDLAEDAKLQLSKDTYDDDLDNLLAQIGDQYADLFLAAKNLSDAILLSDILRVNTEITKAPLSASMIKRYDEHHQDLTLLKALVRQQLPEKYKEIFFDQSKNGYAGYIDGGASQEEFYKFIKPILEKMDGTEELLVKLNREDLLRKQRTFDNGSIPHQIHLGELHAILRRQEDFYPFLKDNREKIEKILTFRIPYYVGPLARGNSRFAWMTRKSEETITPWNFEEVVDKGASAQSFIERMTNFDKNLPNEKVLPKHSLLYEYFTVYNELTKVKYVTEGMRKPAFLSGEQKKAIVDLLFKTNRKVTVKQLKEDYFKKIECFDSVEISGVEDRFNASLGTYHDLLKIIKDKDFLDNEENEDILEDIVLTLTLFEDREMIEERLKTYAHLFDDKVMKQLKRRRYTGWGRLSRKLINGIRDKQSGKTILDFLKSDGFANRNFMQLIHDDSLTFKEDIQKAQVSGQGDSLHEHIANLAGSPAIKKGILQTVKVVDELVKVMGRHKPENIVIEMARENQTTQKGQKNSRERMKRIEEGIKELGSQILKEHPVENTQLQNEKLYLYYLQNGRDMYVDQELDINRLSDYDVDHIVPQSFLKDDSIDNKVLTRSDKARGKSDNVPSEEVVKKMKNYWRQLLNAKLITQRKFDNLTKAERGGLSELDKAGFIKRQLVETRQITKHVAQILDSRMNTKYDENDKLIREVKVITLKSKLVSDFRKDFQFYKVREINNYHHAHDAYLNAVVGTALIKKYPKLESEFVYGDYKVYDVRKMIAKSEQEIGKATAKYFFYSNIMNFFKTEITLANGEIRKRPLIETNGETGEIVWDKGRDFATVRKVLSMPQVNIVKKTEVQTGGFSKESILPKRNSDKLIARKKDWDPKKYGGFDSPTVAYSVLVVAKVEKGKSKKLKSVKELLGITIMERSSFEKNPIDFLEAKGYKEVKKDLIIKLPKYSLFELENGRKRMLASAGELQKGNELALPSKYVNFLYLASHYEKLKGSPEDNEQKQLFVEQHKHYLDEIIEQISEFSKRVILADANLDKVLSAYNKHRDKPIREQAENIIHLFTLTNLGAPAAFKYFDTTIDRKRYTSTKEVLDATLIHQSITGLYETRIDLSQLGGDGGGGSGSSGGMDPLQLLQPLEAEIKGTKLKAHWNSGATITCVPQAFLEEEVPIKNIWIKTIHGEKEQPVYYLTFKIQGRKVEAEVISSPYDYILVSPSDIPWLMKKPLQLTTLVPLQEYEERLLKQTMLTGSYKEKLQSLFLKYDALWQHWENQVGHRRIKPHHIATGTVNPRPQKQYPINPKAKASIQTVINDLLKQGVLIQQNSIMNTPVYPVPKPDGKWRMVLDYREVNKTIPLIAAQNQHSAGILSSIFRGKYKTTLDLSNGFWAHSITPESYWLTAFTWLGQQYCWTRLPQGFLNSPALFNADVVDLLKEVPNVQVYVDDIYISHDDPREHLEQLEKVFSLLLNAGYVVSLKKSEIAQHEVEFLGFNITKEGRGLTETFKQKLLNITPPRDLKQLQSILGLLNFARNFIPNFSELVKPLYNIIATAPGKYITWTTDNSQQLQNIISMLNSAENLEERNPEVRLIMKVNTSPSAGYIRFYNEFAKRPIMYLNYVYTKAEVKFTNTEKLLTTIHKGLIKALDLGMGQEILVYSPIVSMTKIQKTPLPERKALPIRWITWMSYLEDPRIQFHYDKTLPELQQVPTVTDDIIAKIKHPSEFSMVFYTDGSAIKHPNVNKSHNAGMGIAQVQFKPEFTVINTWSIPLGDHTAQLAEVAAVEFACKKALKIDGPVLIVTDSFYVAESVNKELPYWQSNGFFNNKKKPLKHVSKWKSIADCIQLKPDIIIIHEKGHQPTASTFHTEGNNLADKLATQGSYVVNAGKRTADGSEFEKRTADGSEFESPKKKAKVE

SEQ ID NO: 644 - protein, 2171 aa, synthetic construct
MPAAKRVKLDGGDKKYSIGLDIGTNSVGWAVITDEYKVPSKKFKVLGNTDRHSIKKNLIGALLFDSGETAEATRLKRTARRRYTRRKNRICYLQEIFSNEMAKVDDSFFHRLEESFLVEEDKKHERHPIFGNIVDEVAYHEKYPTIYHLRKKLVDSTDKADLRLIYLALAHMIKFRGHFLIEGDLNPDNSDVDKLFIQLVQTYNQLFEENPINASGVDAKAILSARLSKSRRLENLIAQLPGEKKNGLFGNLIALSLGLTPNFKSNFDLAEDAKLQLSKDTYDDDLDNLLAQIGDQYADLFLAAKNLSDAILLSDILRVNTEITKAPLSASMIKRYDEHHQDLTLLKALVRQQLPEKYKEIFFDQSKNGYAGYIDGGASQEEFYKFIKPILEKMDGTEELLVKLNREDLLRKQRTFDNGSIPHQIHLGELHAILRRQEDFYPFLKDNREKIEKILTFRIPYYVGPLARGNSRFAWMTRKSEETITPWNFEEVVDKGASAQSFIERMTNFDKNLPNEKVLPKHSLLYEYFTVYNELTKVKYVTEGMRKPAFLSGEQKKAIVDLLFKTNRKVTVKQLKEDYFKKIECFDSVEISGVEDRFNASLGTYHDLLKIIKDKDFLDNEENEDILEDIVLTLTLFEDREMIEERLKTYAHLFDDKVMKQLKRRRYTGWGRLSRKLINGIRDKQSGKTILDFLKSDGFANRNFMQLIHDDSLTFKEDIQKAQVSGQGDSLHEHIANLAGSPAIKKGILQTVKVVDELVKVMGRHKPENIVIEMARENQTTQKGQKNSRERMKRIEEGIKELGSQILKEHPVENTQLQNEKLYLYYLQNGRDMYVDQELDINRLSDYDVDHIVPQSFLKDDSIDNKVLTRSDKARGKSDNVPSEEVVKKMKNYWRQLLNAKLITQRKFDNLTKAERGGLSELDKAGFIKRQLVETRQITKHVAQILDSRMNTKYDENDKLIREVKVITLKSKLVSDFRKDFQFYKVREINNYHHAHDAYLNAVVGTALIKKYPKLESEFVYGDYKVYDVRKMIAKSEQEIGKATAKYFFYSNIMNFFKTEITLANGEIRKRPLIETNGETGEIVWDKGRDFATVRKVLSMPQVNIVKKTEVQTGGFSKESILPKRNSDKLIARKKDWDPKKYGGFDSPTVAYSVLVVAKVEKGKSKKLKSVKELLGITIMERSSFEKNPIDFLEAKGYKEVKKDLIIKLPKYSLFELENGRKRMLASAGELQKGNELALPSKYVNFLYLASHYEKLKGSPEDNEQKQLFVEQHKHYLDEIIEQISEFSKRVILADANLDKVLSAYNKHRDKPIREQAENIIHLFTLTNLGAPAAFKYFDTTIDRKRYTSTKEVLDATLIHQSITGLYETRIDLSQLGGDGGGGGGGGGGMDPLQLLQPLEAEIKGTKLKAHWNSGATITCVPQAFLEEEVPIKNIWIKTIHGEKEQPVYYLTFKIQGRKVEAEVISSPYDYILVSPSDIPWLMKKPLQLTTLVPLQEYEERLLKQTMLTGSYKEKLQSLFLKYDALWQHWENQVGHRRIKPHHIATGTVNPRPQKQYPINPKAKASIQTVINDLLKQGVLIQQNSIMNTPVYPVPKPDGKWRMVLDYREVNKTIPLIAAQNQHSAGILSSIFRGKYKTTLDLSNGFWAHSITPESYWLTAFTWLGQQYCWTRLPQGFLNSPALFNADVVDLLKEVPNVQVYVDDIYISHDDPREHLEQLEKVFSLLLNAGYVVSLKKSEIAQHEVEFLGFNITKEGRGLTETFKQKLLNITPPRDLKQLQSILGLLNFARNFIPNFSELVKPLYNIIATAPGKYITWTTDNSQQLQNIISMLNSAENLEERNPEVRLIMKVNTSPSAGYIRFYNEFAKRPIMYLNYVYTKAEVKFTNTEKLLTTIHKGLIKALDLGMGQEILVYSPIVSMTKIQKTPLPERKALPIRWITWMSYLEDPRIQFHYDKTLPELQQVPTVTDDIIAKIKHPSEFSMVFYTDGSAIKHPNVNKSHNAGMGIAQVQFKPEFTVINTWSIPLGDHTAQLAEVAAVEFACKKALKIDGPVLIVTDSFYVAESVNKELPYWQSNGFFNNKKKPLKHVSKWKSIADCIQLKPDIIIIHEKGHQPTASTFHTEGNNLADKLATQGSYVVNAGKRTADGSEFEKRTADGSEFESPKKKAKVE

SEQ ID NO: 645 - protein, 2174 aa, synthetic construct
MPAAKRVKLDGGDKKYSIGLDIGTNSVGWAVITDEYKVPSKKFKVLGNTDRHSIKKNLIGALLFDSGETAEATRLKRTARRRYTRRKNRICYLQEIFSNEMAKVDDSFFHRLEESFLVEEDKKHERHPIFGNIVDEVAYHEKYPTIYHLRKKLVDSTDKADLRLIYLALAHMIKFRGHFLIEGDLNPDNSDVDKLFIQLVQTYNQLFEENPINASGVDAKAILSARLSKSRRLENLIAQLPGEKKNGLFGNLIALSLGLTPNFKSNFDLAEDAKLQLSKDTYDDDLDNLLAQIGDQYADLFLAAKNLSDAILLSDILRVNTEITKAPLSASMIKRYDEHHQDLTLLKALVRQQLPEKYKEIFFDQSKNGYAGYIDGGASQEEFYKFIKPILEKMDGTEELLVKLNREDLLRKQRTFDNGSIPHQIHLGELHAILRRQEDFYPFLKDNREKIEKILTFRIPYYVGPLARGNSRFAWMTRKSEETITPWNFEEVVDKGASAQSFIERMTNFDKNLPNEKVLPKHSLLYEYFTVYNELTKVKYVTEGMRKPAFLSGEQKKAIVDLLFKTNRKVTVKQLKEDYFKKIECFDSVEISGVEDRFNASLGTYHDLLKIIKDKDFLDNEENEDILEDIVLTLTLFEDREMIEERLKTYAHLFDDKVMKQLKRRRYTGWGRLSRKLINGIRDKQSGKTILDFLKSDGFANRNFMQLIHDDSLTFKEDIQKAQVSGQGDSLHEHIANLAGSPAIKKGILQTVKVVDELVKVMGRHKPENIVIEMARENQTTQKGQKNSRERMKRIEEGIKELGSQILKEHPVENTQLQNEKLYLYYLQNGRDMYVDQELDINRLSDYDVDHIVPQSFLKDDSIDNKVLTRSDKARGKSDNVPSEEVVKKMKNYWRQLLNAKLITQRKFDNLTKAERGGLSELDKAGFIKRQLVETRQITKHVAQILDSRMNTKYDENDKLIREVKVITLKSKLVSDFRKDFQFYKVREINNYHHAHDAYLNAVVGTALIKKYPKLESEFVYGDYKVYDVRKMIAKSEQEIGKATAKYFFYSNIMNFFKTEITLANGEIRKRPLIETNGETGEIVWDKGRDFATVRKVLSMPQVNIVKKTEVQTGGFSKESILPKRNSDKLIARKKDWDPKKYGGFDSPTVAYSVLVVAKVEKGKSKKLKSVKELLGITIMERSSFEKNPIDFLEAKGYKEVKKDLIIKLPKYSLFELENGRKRMLASAGELQKGNELALPSKYVNFLYLASHYEKLKGSPEDNEQKQLFVEQHKHYLDEIIEQISEFSKRVILADANLDKVLSAYNKHRDKPIREQAENIIHLFTLTNLGAPAAFKYFDTTIDRKRYTSTKEVLDATLIHQSITGLYETRIDLSQLGGDGGGGSGGGPAPGGMDPLQLLQPLEAEIKGTKLKAHWNSGATITCVPQAFLEEEVPIKNIWIKTIHGEKEQPVYYLTFKIQGRKVEAEVISSPYDYILVSPSDIPWLMKKPLQLTTLVPLQEYEERLLKQTMLTGSYKEKLQSLFLKYDALWQHWENQVGHRRIKPHHIATGTVNPRPQKQYPINPKAKASIQTVINDLLKQGVLIQQNSIMNTPVYPVPKPDGKWRMVLDYREVNKTIPLIAAQNQHSAGILSSIFRGKYKTTLDLSNGFWAHSITPESYWLTAFTWLGQQYCWTRLPQGFLNSPALFNADVVDLLKEVPNVQVYVDDIYISHDDPREHLEQLEKVFSLLLNAGYVVSLKKSEIAQHEVEFLGFNITKEGRGLTETFKQKLLNITPPRDLKQLQSILGLLNFARNFIPNFSELVKPLYNIIATAPGKYITWTTDNSQQLQNIISMLNSAENLEERNPEVRLIMKVNTSPSAGYIRFYNEFAKRPIMYLNYVYTKAEVKFTNTEKLLTTIHKGLIKALDLGMGQEILVYSPIVSMTKIQKTPLPERKALPIRWITWMSYLEDPRIQFHYDKTLPELQQVPTVTDDIIAKIKHPSEFSMVFYTDGSAIKHPNVNKSHNAGMGIAQVQFKPEFTVINTWSIPLGDHTAQLAEVAAVEFACKKALKIDGPVLIVTDSFYVAESVNKELPYWQSNGFFNNKKKPLKHVSKWKSIADCIQLKPDIIIIHEKGHQPTASTFHTEGNNLADKLATQGSYVVNAGKRTADGSEFEKRTADGSEFESPKKKAKVE

SEQ ID NO: 646 - protein, 2176 aa, synthetic construct
MPAAKRVKLDGGDKKYSIGLDIGTNSVGWAVITDEYKVPSKKFKVLGNTDRHSIKKNLIGALLFDSGETAEATRLKRTARRRYTRRKNRICYLQEIFSNEMAKVDDSFFHRLEESFLVEEDKKHERHPIFGNIVDEVAYHEKYPTIYHLRKKLVDSTDKADLRLIYLALAHMIKFRGHFLIEGDLNPDNSDVDKLFIQLVQTYNQLFEENPINASGVDAKAILSARLSKSRRLENLIAQLPGEKKNGLFGNLIALSLGLTPNFKSNFDLAEDAKLQLSKDTYDDDLDNLLAQIGDQYADLFLAAKNLSDAILLSDILRVNTEITKAPLSASMIKRYDEHHQDLTLLKALVRQQLPEKYKEIFFDQSKNGYAGYIDGGASQEEFYKFIKPILEKMDGTEELLVKLNREDLLRKQRTFDNGSIPHQIHLGELHAILRRQEDFYPFLKDNREKIEKILTFRIPYYVGPLARGNSRFAWMTRKSEETITPWNFEEVVDKGASAQSFIERMTNFDKNLPNEKVLPKHSLLYEYFTVYNELTKVKYVTEGMRKPAFLSGEQKKAIVDLLFKTNRKVTVKQLKEDYFKKIECFDSVEISGVEDRFNASLGTYHDLLKIIKDKDFLDNEENEDILEDIVLTLTLFEDREMIEERLKTYAHLFDDKVMKQLKRRRYTGWGRLSRKLINGIRDKQSGKTILDFLKSDGFANRNFMQLIHDDSLTFKEDIQKAQVSGQGDSLHEHIANLAGSPAIKKGILQTVKVVDELVKVMGRHKPENIVIEMARENQTTQKGQKNSRERMKRIEEGIKELGSQILKEHPVENTQLQNEKLYLYYLQNGRDMYVDQELDINRLSDYDVDHIVPQSFLKDDSIDNKVLTRSDKARGKSDNVPSEEVVKKMKNYWRQLLNAKLITQRKFDNLTKAERGGLSELDKAGFIKRQLVETRQITKHVAQILDSRMNTKYDENDKLIREVKVITLKSKLVSDFRKDFQFYKVREINNYHHAHDAYLNAVVGTALIKKYPKLESEFVYGDYKVYDVRKMIAKSEQEIGKATAKYFFYSNIMNFFKTEITLANGEIRKRPLIETNGETGEIVWDKGRDFATVRKVLSMPQVNIVKKTEVQTGGFSKESILPKRNSDKLIARKKDWDPKKYGGFDSPTVAYSVLVVAKVEKGKSKKLKSVKELLGITIMERSSFEKNPIDFLEAKGYKEVKKDLIIKLPKYSLFELENGRKRMLASAGELQKGNELALPSKYVNFLYLASHYEKLKGSPEDNEQKQLFVEQHKHYLDEIIEQISEFSKRVILADANLDKVLSAYNKHRDKPIREQAENIIHLFTLTNLGAPAAFKYFDTTIDRKRYTSTKEVLDATLIHQSITGLYETRIDLSQLGGDGGEAAAKGGSGGGGGMDPLQLLQPLEAEIKGTKLKAHWNSGATITCVPQAFLEEEVPIKNIWIKTIHGEKEQPVYYLTFKIQGRKVEAEVISSPYDYILVSPSDIPWLMKKPLQLTTLVPLQEYEERLLKQTMLTGSYKEKLQSLFLKYDALWQHWENQVGHRRIKPHHIATGTVNPRPQKQYPINPKAKASIQTVINDLLKQGVLIQQNSIMNTPVYPVPKPDGKWRMVLDYREVNKTIPLIAAQNQHSAGILSSIFRGKYKTTLDLSNGFWAHSITPESYWLTAFTWLGQQYCWTRLPQGFLNSPALFNADVVDLLKEVPNVQVYVDDIYISHDDPREHLEQLEKVFSLLLNAGYVVSLKKSEIAQHEVEFLGFNITKEGRGLTETFKQKLLNITPPRDLKQLQSILGLLNFARNFIPNFSELVKPLYNIIATAPGKYITWTTDNSQQLQNIISMLNSAENLEERNPEVRLIMKVNTSPSAGYIRFYNEFAKRPIMYLNYVYTKAEVKFTNTEKLLTTIHKGLIKALDLGMGQEILVYSPIVSMTKIQKTPLPERKALPIRWITWMSYLEDPRIQFHYDKTLPELQQVPTVTDDIIAKIKHPSEFSMVFYTDGSAIKHPNVNKSHNAGMGIAQVQFKPEFTVINTWSIPLGDHTAQLAEVAAVEFACKKALKIDGPVLIVTDSFYVAESVNKELPYWQSNGFFNNKKKPLKHVSKWKSIADCIQLKPDIIIIHEKGHQPTASTFHTEGNNLADKLATQGSYVVNAGKRTADGSEFEKRTADGSEFESPKKKAKVE

SEQ ID NO: 647 - protein, 2211 aa, synthetic construct
MPAAKRVKLDGGDKKYSIGLDIGTNSVGWAVITDEYKVPSKKFKVLGNTDRHSIKKNLIGALLFDSGETAEATRLKRTARRRYTRRKNRICYLQEIFSNEMAKVDDSFFHRLEESFLVEEDKKHERHPIFGNIVDEVAYHEKYPTIYHLRKKLVDSTDKADLRLIYLALAHMIKFRGHFLIEGDLNPDNSDVDKLFIQLVQTYNQLFEENPINASGVDAKAILSARLSKSRRLENLIAQLPGEKKNGLFGNLIALSLGLTPNFKSNFDLAEDAKLQLSKDTYDDDLDNLLAQIGDQYADLFLAAKNLSDAILLSDILRVNTEITKAPLSASMIKRYDEHHQDLTLLKALVRQQLPEKYKEIFFDQSKNGYAGYIDGGASQEEFYKFIKPILEKMDGTEELLVKLNREDLLRKQRTFDNGSIPHQIHLGELHAILRRQEDFYPFLKDNREKIEKILTFRIPYYVGPLARGNSRFAWMTRKSEETITPWNFEEVVDKGASAQSFIERMTNFDKNLPNEKVLPKHSLLYEYFTVYNELTKVKYVTEGMRKPAFLSGEQKKAIVDLLFKTNRKVTVKQLKEDYFKKIECFDSVEISGVEDRFNASLGTYHDLLKIIKDKDFLDNEENEDILEDIVLTLTLFEDREMIEERLKTYAHLFDDKVMKQLKRRRYTGWGRLSRKLINGIRDKQSGKTILDFLKSDGFANRNFMQLIHDDSLTFKEDIQKAQVSGQGDSLHEHIANLAGSPAIKKGILQTVKVVDELVKVMGRHKPENIVIEMARENQTTQKGQKNSRERMKRIEEGIKELGSQILKEHPVENTQLQNEKLYLYYLQNGRDMYVDQELDINRLSDYDVDHIVPQSFLKDDSIDNKVLTRSDKARGKSDNVPSEEVVKKMKNYWRQLLNAKLITQRKFDNLTKAERGGLSELDKAGFIKRQLVETRQITKHVAQILDSRMNTKYDENDKLIREVKVITLKSKLVSDFRKDFQFYKVREINNYHHAHDAYLNAVVGTALIKKYPKLESEFVYGDYKVYDVRKMIAKSEQEIGKATAKYFFYSNIMNFFKTEITLANGEIRKRPLIETNGETGEIVWDKGRDFATVRKVLSMPQVNIVKKTEVQTGGFSKESILPKRNSDKLIARKKDWDPKKYGGFDSPTVAYSVLVVAKVEKGKSKKLKSVKELLGITIMERSSFEKNPIDFLEAKGYKEVKKDLIIKLPKYSLFELENGRKRMLASAGELQKGNELALPSKYVNFLYLASHYEKLKGSPEDNEQKQLFVEQHKHYLDEIIEQISEFSKRVILADANLDKVLSAYNKHRDKPIREQAENIIHLFTLTNLGAPAAFKYFDTTIDRKRYTSTKEVLDATLIHQSITGLYETRIDLSQLGGDGGAEAAAKEAAAKEAAAKEAAAKALEAEAAAKEAAAKEAAAKEAAAKAGGMDPLQLLQPLEAEIKGTKLKAHWNSGATITCVPQAFLEEEVPIKNIWIKTIHGEKEQPVYYLTFKIQGRKVEAEVISSPYDYILVSPSDIPWLMKKPLQLTTLVPLQEYEERLLKQTMLTGSYKEKLQSLFLKYDALWQHWENQVGHRRIKPHHIATGTVNPRPQKQYPINPKAKASIQTVINDLLKQGVLIQQNSIMNTPVYPVPKPDGKWRMVLDYREVNKTIPLIAAQNQHSAGILSSIFRGKYKTTLDLSNGFWAHSITPESYWLTAFTWLGQQYCWTRLPQGFLNSPALFNADVVDLLKEVPNVQVYVDDIYISHDDPREHLEQLEKVFSLLLNAGYVVSLKKSEIAQHEVEFLGFNITKEGRGLTETFKQKLLNITPPRDLKQLQSILGKLNFARNFIPNFSELVKPLYNIIATAPGKYITWTTDNSQQLQNIISMLNSAENLEERNPEVRLIMKVNTSPSAGYIRFYNEFAKRPIMYLNYVYTKAEVKFTNTEKLLTTIHKGLIKALDLGMGQEILVYSPIVSMTKIQKTPLPERKALPIRWITWMSYLEDPRIQFHYDKTLPELQQVPTVTDDIIAKIKHPSEFSMVFYTDGSAIKHPNVNKSHNAGMGIAQVQFKPEFTVINTWSIPLGDHTAQLAEVAAVEFACKKALKIDGPVLIVTDSFYVAESVNKELPYWQSNGFFNNKKKPLKHVSKWKSIADCIQLKPDIIIIHEKGHQPTASTFHTEGNNLADKLATQGSYVVNAGKRTADGSEFEKRTADGSEFESPKKKAKVE

SEQ ID NO: 648 - protein, 2195 aa, synthetic construct
MPAAKRVKLDGGDKKYSIGLDIGTNSVGWAVITDEYKVPSKKFKVLGNTDRHSIKKNLIGALLFDSGETAEATRLKRTARRRYTRRKNRICYLQEIFSNEMAKVDDSFFHRLEESFLVEEDKKHERHPIFGNIVDEVAYHEKYPTIYHLRKKLVDSTDKADLRLIYLALAHMIKFRGHFLIEGDLNPDNSDVDKLFIQLVQTYNQLFEENPINASGVDAKAILSARLSKSRRLENLIAQLPGEKKNGLFGNLIALSLGLTPNFKSNFDLAEDAKLQLSKDTYDDDLDNLLAQIGDQYADLFLAAKNLSDAILLSDILRVNTEITKAPLSASMIKRYDEHHQDLTLLKALVRQQLPEKYKEIFFDQSKNGYAGYIDGGASQEEFYKFIKPILEKMDGTEELLVKLNREDLLRKQRTFDNGSIPHQIHLGELHAILRRQEDFYPFLKDNREKIEKILTFRIPYYVGPLARGNSRFAWMTRKSEETITPWNFEEVVDKGASAQSFIERMTNFDKNLPNEKVLPKHSLLYEYFTVYNELTKVKYVTEGMRKPAFLSGEQKKAIVDLLFKTNRKVTVKQLKEDYFKKIECFDSVEISGVEDRFNASLGTYHDLLKIIKDKDFLDNEENEDILEDIVLTLTLFEDREMIEERLKTYAHLFDDKVMKQLKRRRYTGWGRLSRKLINGIRDKQSGKTILDFLKSDGFANRNFMQLIHDDSLTFKEDIQKAQVSGQGDSLHEHIANLAGSPAIKKGILQTVKVVDELVKVMGRHKPENIVIEMARENQTTQKGQKNSRERMKRIEEGIKELGSQILKEHPVENTQLQNEKLYLYYLQNGRDMYVDQELDINRLSDYDVDHIVPQSFLKDDSIDNKVLTRSDKARGKSDNVPSEEVVKKMKNYWRQLLNAKLITQRKFDNLTKAERGGLSELDKAGFIKRQLVETRQITKHVAQILDSRMNTKYDENDKLIREVKVITLKSKLVSDFRKDFQFYKVREINNYHHAHDAYLNAVVGTALIKKYPKLESEFVYGDYKVYDVRKMIAKSEQEIGKATAKYFFYSNIMNFFKTEITLANGEIRKRPLIETNGETGEIVWDKGRDFATVRKVLSMPQVNIVKKTEVQTGGFSKESILPKRNSDKLIARKKDWDPKKYGGFDSPTVAYSVLVVAKVEKGKSKKLKSVKELLGITIMERSSFEKNPIDFLEAKGYKEVKKDLIIKLPKYSLFELENGRKRMLASAGELQKGNELALPSKYVNFLYLASHYEKLKGSPEDNEQKQLFVEQHKHYLDEIIEQISEFSKRVILADANLDKVLSAYNKHRDKPIREQAENIIHLFTLTNLGAPAAFKYFDTTIDRKRYTSTKEVLDATLIHQSITGLYETRIDLSQLGGDGGGGGGSGGGGSGGGGSGGGGSGGGGSGGGGSGGMDPLQLLQPLEAEIKGTKLKAHWNSGATITCVPQAFLEEEVPIKNIWIKTIHGEKEQPVYYLTFKIQGRKVEAEVISSPYDYILVSPSDIPWLMKKPLQLTTLVPLQEYEERLLKQTMLTGSYKEKLQSLFLKYDALWQHWENQVGHRRIKPHHIATGTVNPRPQKQYPINPKAKASIQTVINDLLKQGVLIQQNSIMNTPVYPVPKPDGKWRMVLDYREVNKTIPLIAAQNQHSAGILSSIFRGKYKTTLDLSNGFWAHSITPESYWLTAFTWLGQQYCWTRLPQGFLNSPALFNADVVDLLKEVPNVQVYVDDIYISHDDPREHLEQLEKVFSLLLNAGYVVSLKKSEIAQHEVEFLGFNITKEGRGLTETFKQKLLNITPPRDLKQLQSILGKLNFARNFIPNFSELVKPLYNIIATAPGKYITWTTDNSQQLQNIISMLNSAENLEERNPEVRLIMKVNTSPSAGYIRFYNEFAKRPIMYLNYVYTKAEVKFTNTEKLLTTIHKGLIKALDLGMGQEILVYSPIVSMTKIQKTPLPERKALPIRWITWMSYLEDPRIQFHYDKTLPELQQVPTVTDDIIAKIKHPSEFSMVFYTDGSAIKHPNVNKSHNAGMGIAQVQFKPEFTVINTWSIPLGDHTAQLAEVAAVEFACKKALKIDGPVLIVTDSFYVAESVNKELPYWQSNGFFNNKKKPLKHVSKWKSIADCIQLKPDIIIIHEKGHQPTASTFHTEGNNLADKLATQGSYVVNAGKRTADGSEFEKRTADGSEFESPKKKAKVE

SEQ ID NO: 649 - protein, 2190 aa, synthetic construct
MPAAKRVKLDGGDKKYSIGLDIGTNSVGWAVITDEYKVPSKKFKVLGNTDRHSIKKNLIGALLFDSGETAEATRLKRTARRRYTRRKNRICYLQEIFSNEMAKVDDSFFHRLEESFLVEEDKKHERHPIFGNIVDEVAYHEKYPTIYHLRKKLVDSTDKADLRLIYLALAHMIKFRGHFLIEGDLNPDNSDVDKLFIQLVQTYNQLFEENPINASGVDAKAILSARLSKSRRLENLIAQLPGEKKNGLFGNLIALSLGLTPNFKSNFDLAEDAKLQLSKDTYDDDLDNLLAQIGDQYADLFLAAKNLSDAILLSDILRVNTEITKAPLSASMIKRYDEHHQDLTLLKALVRQQLPEKYKEIFFDQSKNGYAGYIDGGASQEEFYKFIKPILEKMDGTEELLVKLNREDLLRKQRTFDNGSIPHQIHLGELHAILRRQEDFYPFLKDNREKIEKILTFRIPYYVGPLARGNSRFAWMTRKSEETITPWNFEEVVDKGASAQSFIERMTNFDKNLPNEKVLPKHSLLYEYFTVYNELTKVKYVTEGMRKPAFLSGEQKKAIVDLLFKTNRKVTVKQLKEDYFKKIECFDSVEISGVEDRFNASLGTYHDLLKIIKDKDFLDNEENEDILEDIVLTLTLFEDREMIEERLKTYAHLFDDKVMKQLKRRRYTGWGRLSRKLINGIRDKQSGKTILDFLKSDGFANRNFMQLIHDDSLTFKEDIQKAQVSGQGDSLHEHIANLAGSPAIKKGILQTVKVVDELVKVMGRHKPENIVIEMARENQTTQKGQKNSRERMKRIEEGIKELGSQILKEHPVENTQLQNEKLYLYYLQNGRDMYVDQELDINRLSDYDVDHIVPQSFLKDDSIDNKVLTRSDKARGKSDNVPSEEVVKKMKNYWRQLLNAKLITQRKFDNLTKAERGGLSELDKAGFIKRQLVETRQITKHVAQILDSRMNTKYDENDKLIREVKVITLKSKLVSDFRKDFQFYKVREINNYHHAHDAYLNAVVGTALIKKYPKLESEFVYGDYKVYDVRKMIAKSEQEIGKATAKYFFYSNIMNFFKTEITLANGEIRKRPLIETNGETGEIVWDKGRDFATVRKVLSMPQVNIVKKTEVQTGGFSKESILPKRNSDKLIARKKDWDPKKYGGFDSPTVAYSVLVVAKVEKGKSKKLKSVKELLGITIMERSSFEKNPIDFLEAKGYKEVKKDLIIKLPKYSLFELENGRKRMLASAGELQKGNELALPSKYVNFLYLASHYEKLKGSPEDNEQKQLFVEQHKHYLDEIIEQISEFSKRVILADANLDKVLSAYNKHRDKPIREQAENIIHLFTLTNLGAPAAFKYFDTTIDRKRYTSTKEVLDATLIHQSITGLYETRIDLSQLGGDGGEAAAKEAAAKEAAAKEAAAKEAAAKGGMDPLQLLQPLEAEIKGTKLKAHWNSGATITCVPQAFLEEEVPIKNIWIKTIHGEKEQPVYYLTFKIQGRKVEAEVISSPYDYILVSPSDIPWLMKKPLQLTTLVPLQEYEERLLKQTMLTGSYKEKLQSLFLKYDALWQHWENQVGHRRIKPHHIATGTVNPRPQKQYPINPKAKASIQTVINDLLKQGVLIQQNSIMNTPVYPVPKPDGKWRMVLDYREVNKTIPLIAAQNQHSAGILSSIFRGKYKTTLDLSNGFWAHSITPESYWLTAFTWLGQQYCWTRLPQGFLNSPALFNADVVDLLKEVPNVQVYVDDIYISHDDPREHLEQLEKVFSLLLNAGYVVSLKKSEIAQHEVEFLGFNITKEGRGLTETFKQKLLNITPPRDLKQLQSILGKLNFARNFIPNFSELVKPLYNIIATAPGKYITWTTDNSQQLQNIISMLNSAENLEERNPEVRLIMKVNTSPSAGYIRFYNEFAKRPIMYLNYVYTKAEVKFTNTEKLLTTIHKGLIKALDLGMGQEILVYSPIVSMTKIQKTPLPERKALPIRWITWMSYLEDPRIQFHYDKTLPELQQVPTVTDDIIAKIKHPSEFSMVFYTDGSAIKHPNVNKSHNAGMGIAQVQFKPEFTVINTWSIPLGDHTAQLAEVAAVEFACKKALKIDGPVLIVTDSFYVAESVNKELPYWQSNGFFNNKKKPLKHVSKWKSIADCIQLKPDIIIIHEKGHQPTASTFHTEGNNLADKLATQGSYVVNAGKRTADGSEFEKRTADGSEFESPKKKAKVE

SEQ ID NO: 650 - protein, 2176 aa, synthetic construct
MPAAKRVKLDGGDKKYSIGLDIGTNSVGWAVITDEYKVPSKKFKVLGNTDRHSIKKNLIGALLFDSGETAEATRLKRTARRRYTRRKNRICYLQEIFSNEMAKVDDSFFHRLEESFLVEEDKKHERHPIFGNIVDEVAYHEKYPTIYHLRKKLVDSTDKADLRLIYLALAHMIKFRGHFLIEGDLNPDNSDVDKLFIQLVQTYNQLFEENPINASGVDAKAILSARLSKSRRLENLIAQLPGEKKNGLFGNLIALSLGLTPNFKSNFDLAEDAKLQLSKDTYDDDLDNLLAQIGDQYADLFLAAKNLSDAILLSDILRVNTEITKAPLSASMIKRYDEHHQDLTLLKALVRQQLPEKYKEIFFDQSKNGYAGYIDGGASQEEFYKFIKPILEKMDGTEELLVKLNREDLLRKQRTFDNGSIPHQIHLGELHAILRRQEDFYPFLKDNREKIEKILTFRIPYYVGPLARGNSRFAWMTRKSEETITPWNFEEVVDKGASAQSFIERMTNFDKNLPNEKVLPKHSLLYEYFTVYNELTKVKYVTEGMRKPAFLSGEQKKAIVDLLFKTNRKVTVKQLKEDYFKKIECFDSVEISGVEDRFNASLGTYHDLLKIIKDKDFLDNEENEDILEDIVLTLTLFEDREMIEERLKTYAHLFDDKVMKQLKRRRYTGWGRLSRKLINGIRDKQSGKTILDFLKSDGFANRNFMQLIHDDSLTFKEDIQKAQVSGQGDSLHEHIANLAGSPAIKKGILQTVKVVDELVKVMGRHKPENIVIEMARENQTTQKGQKNSRERMKRIEEGIKELGSQILKEHPVENTQLQNEKLYLYYLQNGRDMYVDQELDINRLSDYDVDHIVPQSFLKDDSIDNKVLTRSDKARGKSDNVPSEEVVKKMKNYWRQLLNAKLITQRKFDNLTKAERGGLSELDKAGFIKRQLVETRQITKHVAQILDSRMNTKYDENDKLIREVKVITLKSKLVSDFRKDFQFYKVREINNYHHAHDAYLNAVVGTALIKKYPKLESEFVYGDYKVYDVRKMIAKSEQEIGKATAKYFFYSNIMNFFKTEITLANGEIRKRPLIETNGETGEIVWDKGRDFATVRKVLSMPQVNIVKKTEVQTGGFSKESILPKRNSDKLIARKKDWDPKKYGGFDSPTVAYSVLVVAKVEKGKSKKLKSVKELLGITIMERSSFEKNPIDFLEAKGYKEVKKDLIIKLPKYSLFELENGRKRMLASAGELQKGNELALPSKYVNFLYLASHYEKLKGSPEDNEQKQLFVEQHKHYLDEIIEQISEFSKRVILADANLDKVLSAYNKHRDKPIREQAENIIHLFTLTNLGAPAAFKYFDTTIDRKRYTSTKEVLDATLIHQSITGLYETRIDLSQLGGDGGPAPGSSEAAAKGGMDPLQLLQPLEAEIKGTKLKAHWNSGATITCVPQAFLEEEVPIKNIWIKTIHGEKEQPVYYLTFKIQGRKVEAEVISSPYDYILVSPSDIPWLMKKPLQLTTLVPLQEYEERLLKQTMLTGSYKEKLQSLFLKYDALWQHWENQVGHRRIKPHHIATGTVNPRPQKQYPINPKAKASIQTVINDLLKQGVLIQQNSIMNTPVYPVPKPDGKWRMVLDYREVNKTIPLIAAQNQHSAGILSSIFRGKYKTTLDLSNGFWAHSITPESYWLTAFTWLGQQYCWTRLPQGFLNSPALFNADVVDLLKEVPNVQVYVDDIYISHDDPREHLEQLEKVFSLLLNAGYVVSLKKSEIAQHEVEFLGFNITKEGRGLTETFKQKLLNITPPRDLKQLQSILGKLNFARNFIPNFSELVKPLYNIIATAPGKYITWTTDNSQQLQNIISMLNSAENLEERNPEVRLIMKVNTSPSAGYIRFYNEFAKRPIMYLNYVYTKAEVKFTNTEKLLTTIHKGLIKALDLGMGQEILVYSPIVSMTKIQKTPLPERKALPIRWITWMSYLEDPRIQFHYDKTLPELQQVPTVTDDIIAKIKHPSEFSMVFYTDGSAIKHPNVNKSHNAGMGIAQVQFKPEFTVINTWSIPLGDHTAQLAEVAAVEFACKKALKIDGPVLIVTDSFYVAESVNKELPYWQSNGFFNNKKKPLKHVSKWKSIADCIQLKPDIIIIHEKGHQPTASTFHTEGNNLADKLATQGSYVVNAGKRTADGSEFEKRTADGSEFESPKKKAKVE

SEQ ID NO: 651 - protein, 2195 aa, synthetic construct
MPAAKRVKLDGGDKKYSIGLDIGTNSVGWAVITDEYKVPSKKFKVLGNTDRHSIKKNLIGALLFDSGETAEATRLKRTARRRYTRRKNRICYLQEIFSNEMAKVDDSFFHRLEESFLVEEDKKHERHPIFGNIVDEVAYHEKYPTIYHLRKKLVDSTDKADLRLIYLALAHMIKFRGHFLIEGDLNPDNSDVDKLFIQLVQTYNQLFEENPINASGVDAKAILSARLSKSRRLENLIAQLPGEKKNGLFGNLIALSLGLTPNFKSNFDLAEDAKLQLSKDTYDDDLDNLLAQIGDQYADLFLAAKNLSDAILLSDILRVNTEITKAPLSASMIKRYDEHHQDLTLLKALVRQQLPEKYKEIFFDQSKNGYAGYIDGGASQEEFYKFIKPILEKMDGTEELLVKLNREDLLRKQRTFDNGSIPHQIHLGELHAILRRQEDFYPFLKDNREKIEKILTFRIPYYVGPLARGNSRFAWMTRKSEETITPWNFEEVVDKGASAQSFIERMTNFDKNLPNEKVLPKHSLLYEYFTVYNELTKVKYVTEGMRKPAFLSGEQKKAIVDLLFKTNRKVTVKQLKEDYFKKIECFDSVEISGVEDRFNASLGTYHDLLKIIKDKDFLDNEENEDILEDIVLTLTLFEDREMIEERLKTYAHLFDDKVMKQLKRRRYTGWGRLSRKLINGIRDKQSGKTILDFLKSDGFANRNFMQLIHDDSLTFKEDIQKAQVSGQGDSLHEHIANLAGSPAIKKGILQTVKVVDELVKVMGRHKPENIVIEMARENQTTQKGQKNSRERMKRIEEGIKELGSQILKEHPVENTQLQNEKLYLYYLQNGRDMYVDQELDINRLSDYDVDHIVPQSFLKDDSIDNKVLTRSDKARGKSDNVPSEEVVKKMKNYWRQLLNAKLITQRKFDNLTKAERGGLSELDKAGFIKRQLVETRQITKHVAQILDSRMNTKYDENDKLIREVKVITLKSKLVSDFRKDFQFYKVREINNYHHAHDAYLNAVVGTALIKKYPKLESEFVYGDYKVYDVRKMIAKSEQEIGKATAKYFFYSNIMNFFKTEITLANGEIRKRPLIETNGETGEIVWDKGRDFATVRKVLSMPQVNIVKKTEVQTGGFSKESILPKRNSDKLIARKKDWDPKKYGGFDSPTVAYSVLVVAKVEKGKSKKLKSVKELLGITIMERSSFEKNPIDFLEAKGYKEVKKDLIIKLPKYSLFELENGRKRMLASAGELQKGNELALPSKYVNFLYLASHYEKLKGSPEDNEQKQLFVEQHKHYLDEIIEQISEFSKRVILADANLDKVLSAYNKHRDKPIREQAENIIHLFTLTNLGAPAAFKYFDTTIDRKRYTSTKEVLDATLIHQSITGLYETRIDLSQLGGDGGEAAAKEAAAKEAAAKEAAAKEAAAKEAAAKGGMDPLQLLQPLEAEIKGTKLKAHWNSGATITCVPQAFLEEEVPIKNIWIKTIHGEKEQPVYYLTFKIQGRKVEAEVISSPYDYILVSPSDIPWLMKKPLQLTTLVPLQEYEERLLKQTMLTGSYKEKLQSLFLKYDALWQHWENQVGHRRIKPHHIATGTVNPRPQKQYPINPKAKASIQTVINDLLKQGVLIQQNSIMNTPVYPVPKPDGKWRMVLDYREVNKTIPLIAAQNQHSAGILSSIFRGKYKTTLDLSNGFWAHSITPESYWLTAFTWLGQQYCWTRLPQGFLNSPALFNADVVDLLKEVPNVQVYVDDIYISHDDPREHLEQLEKVFSLLLNAGYVVSLKKSEIAQHEVEFLGFNITKEGRGLTETFKQKLLNITPPRDLKQLQSILGKLNFARNFIPNFSELVKPLYNIIATAPGKYITWTTDNSQQLQNIISMLNSAENLEERNPEVRLIMKVNTSPSAGYIRFYNEFAKRPIMYLNYVYTKAEVKFTNTEKLLTTIHKGLIKALDLGMGQEILVYSPIVSMTKIQKTPLPERKALPIRWITWMSYLEDPRIQFHYDKTLPELQQVPTVTDDIIAKIKHPSEFSMVFYTDGSAIKHPNVNKSHNAGMGIAQVQFKPEFTVINTWSIPLGDHTAQLAEVAAVEFACKKALKIDGPVLIVTDSFYVAESVNKELPYWQSNGFFNNKKKPLKHVSKWKSIADCIQLKPDIIIIHEKGHQPTASTFHTEGNNLADKLATQGSYVVNAGKRTADGSEFEKRTADGSEFESPKKKAKVE

SEQ ID NO: 652 - protein, 2198 aa, synthetic construct
MPAAKRVKLDGGDKKYSIGLDIGTNSVGWAVITDEYKVPSKKFKVLGNTDRHSIKKNLIGALLFDSGETAEATRLKRTARRRYTRRKNRICYLQEIFSNEMAKVDDSFFHRLEESFLVEEDKKHERHPIFGNIVDEVAYHEKYPTIYHLRKKLVDSTDKADLRLIYLALAHMIKFRGHFLIEGDLNPDNSDVDKLFIQLVQTYNQLFEENPINASGVDAKAILSARLSKSRRLENLIAQLPGEKKNGLFGNLIALSLGLTPNFKSNFDLAEDAKLQLSKDTYDDDLDNLLAQIGDQYADLFLAAKNLSDAILLSDILRVNTEITKAPLSASMIKRYDEHHQDLTLLKALVRQQLPEKYKEIFFDQSKNGYAGYIDGGASQEEFYKFIKPILEKMDGTEELLVKLNREDLLRKQRTFDNGSIPHQIHLGELHAILRRQEDFYPFLKDNREKIEKILTFRIPYYVGPLARGNSRFAWMTRKSEETITPWNFEEVVDKGASAQSFIERMTNFDKNLPNEKVLPKHSLLYEYFTVYNELTKVKYVTEGMRKPAFLSGEQKKAIVDLLFKTNRKVTVKQLKEDYFKKIECFDSVEISGVEDRFNASLGTYHDLLKIIKDKDFLDNEENEDILEDIVLTLTLFEDREMIEERLKTYAHLFDDKVMKQLKRRRYTGWGRLSRKLINGIRDKQSGKTILDFLKSDGFANRNFMQLIHDDSLTFKEDIQKAQVSGQGDSLHEHIANLAGSPAIKKGILQTVKVVDELVKVMGRHKPENIVIEMARENQTTQKGQKNSRERMKRIEEGIKELGSQILKEHPVENTQLQNEKLYLYYLQNGRDMYVDQELDINRLSDYDVDHIVPQSFLKDDSIDNKVLTRSDKARGKSDNVPSEEVVKKMKNYWRQLLNAKLITQRKFDNLTKAERGGLSELDKAGFIKRQLVETRQITKHVAQILDSRMNTKYDENDKLIREVKVITLKSKLVSDFRKDFQFYKVREINNYHHAHDAYLNAVVGTALIKKYPKLESEFVYGDYKVYDVRKMIAKSEQEIGKATAKYFFYSNIMNFFKTEITLANGEIRKRPLIETNGETGEIVWDKGRDFATVRKVLSMPQVNIVKKTEVQTGGFSKESILPKRNSDKLIARKKDWDPKKYGGFDSPTVAYSVLVVAKVEKGKSKKLKSVKELLGITIMERSSFEKNPIDFLEAKGYKEVKKDLIIKLPKYSLFELENGRKRMLASAGELQKGNELALPSKYVNFLYLASHYEKLKGSPEDNEQKQLFVEQHKHYLDEIIEQISEFSKRVILADANLDKVLSAYNKHRDKPIREQAENIIHLFTLTNLGAPAAFKYFDTTIDRKRYTSTKEVLDATLIHQSITGLYETRIDLSQLGGDGGSGGSSGGSSGSETPGTSESATPESSGGSSGGSSGGMDPLQLLQPLEAEIKGTKLKAHWNSGATITCVPQAFLEEEVPIKNIWIKTIHGEKEQPVYYLTFKIQGRKVEAEVISSPYDYILVSPSDIPWLMKKPLQLTTLVPLQEYEERLLKQTMLTGSYKEKLQSLFLKYDALWQHWENQVGHRRIKPHHIATGTVNPRPQKQYPINPKAKASIQTVINDLLKQGVLIQQNSIMNTPVYPVPKPDGKWRMVLDYREVNKTIPLIAAQNQHSAGILSSIFRGKYKTTLDLSNGFWAHSITPESYWLTAFTWLGQQYCWTRLPQGFLNSPALFNADVVDLLKEVPNVQVYVDDIYISHDDPREHLEQLEKVFSLLLNAGYVVSLKKSEIAQHEVEFLGFNITKEGRGLTETFKQKLLNITPPRDLKQLQSILGKLNFARNFIPNFSELVKPLYNIIATAPGKYITWTTDNSQQLQNIISMLNSAENLEERNPEVRLIMKVNTSPSAGYIRFYNEFAKRPIMYLNYVYTKAEVKFTNTEKLLTTIHKGLIKALDLGMGQEILVYSPIVSMTKIQKTPLPERKALPIRWITWMSYLEDPRIQFHYDKTLPELQQVPTVTDDIIAKIKHPSEFSMVFYTDGSAIKHPNVNKSHNAGMGIAQVQFKPEFTVINTWSIPLGDHTAQLAEVAAVEFACKKALKIDGPVLIVTDSFYVAESVNKELPYWQSNGFFNNKKKPLKHVSKWKSIADCIQLKPDIIIIHEKGHQPTASTFHTEGNNLADKLATQGSYVVNAGKRTADGSEFEKRTADGSEFESPKKKAKVE

SEQ ID NO: 653 - protein, 2176 aa, synthetic construct
MPAAKRVKLDGGDKKYSIGLDIGTNSVGWAVITDEYKVPSKKFKVLGNTDRHSIKKNLIGALLFDSGETAEATRLKRTARRRYTRRKNRICYLQEIFSNEMAKVDDSFFHRLEESFLVEEDKKHERHPIFGNIVDEVAYHEKYPTIYHLRKKLVDSTDKADLRLIYLALAHMIKFRGHFLIEGDLNPDNSDVDKLFIQLVQTYNQLFEENPINASGVDAKAILSARLSKSRRLENLIAQLPGEKKNGLFGNLIALSLGLTPNFKSNFDLAEDAKLQLSKDTYDDDLDNLLAQIGDQYADLFLAAKNLSDAILLSDILRVNTEITKAPLSASMIKRYDEHHQDLTLLKALVRQQLPEKYKEIFFDQSKNGYAGYIDGGASQEEFYKFIKPILEKMDGTEELLVKLNREDLLRKQRTFDNGSIPHQIHLGELHAILRRQEDFYPFLKDNREKIEKILTFRIPYYVGPLARGNSRFAWMTRKSEETITPWNFEEVVDKGASAQSFIERMTNFDKNLPNEKVLPKHSLLYEYFTVYNELTKVKYVTEGMRKPAFLSGEQKKAIVDLLFKTNRKVTVKQLKEDYFKKIECFDSVEISGVEDRFNASLGTYHDLLKIIKDKDFLDNEENEDILEDIVLTLTLFEDREMIEERLKTYAHLFDDKVMKQLKRRRYTGWGRLSRKLINGIRDKQSGKTILDFLKSDGFANRNFMQLIHDDSLTFKEDIQKAQVSGQGDSLHEHIANLAGSPAIKKGILQTVKVVDELVKVMGRHKPENIVIEMARENQTTQKGQKNSRERMKRIEEGIKELGSQILKEHPVENTQLQNEKLYLYYLQNGRDMYVDQELDINRLSDYDVDHIVPQSFLKDDSIDNKVLTRSDKARGKSDNVPSEEVVKKMKNYWRQLLNAKLITQRKFDNLTKAERGGLSELDKAGFIKRQLVETRQITKHVAQILDSRMNTKYDENDKLIREVKVITLKSKLVSDFRKDFQFYKVREINNYHHAHDAYLNAVVGTALIKKYPKLESEFVYGDYKVYDVRKMIAKSEQEIGKATAKYFFYSNIMNFFKTEITLANGEIRKRPLIETNGETGEIVWDKGRDFATVRKVLSMPQVNIVKKTEVQTGGFSKESILPKRNSDKLIARKKDWDPKKYGGFDSPTVAYSVLVVAKVEKGKSKKLKSVKELLGITIMERSSFEKNPIDFLEAKGYKEVKKDLIIKLPKYSLFELENGRKRMLASAGELQKGNELALPSKYVNFLYLASHYEKLKGSPEDNEQKQLFVEQHKHYLDEIIEQISEFSKRVILADANLDKVLSAYNKHRDKPIREQAENIIHLFTLTNLGAPAAFKYFDTTIDRKRYTSTKEVLDATLIHQSITGLYETRIDLSQLGGDGGGGGGGSEAAAKGGMDPLQLLQPLEAEIKGTKLKAHWNSGATITCVPQAFLEEEVPIKNIWIKTIHGEKEQPVYYLTFKIQGRKVEAEVISSPYDYILVSPSDIPWLMKKPLQLTTLVPLQEYEERLLKQTMLTGSYKEKLQSLFLKYDALWQHWENQVGHRRIKPHHIATGTVNPRPQKQYPINPKAKASIQTVINDLLKQGVLIQQNSIMNTPVYPVPKPDGKWRMVLDYREVNKTIPLIAAQNQHSAGILSSIFRGKYKTTLDLSNGFWAHSITPESYWLTAFTWLGQQYCWTRLPQGFLNSPALFNADVVDLLKEVPNVQVYVDDIYISHDDPREHLEQLEKVFSLLLNAGYVVSLKKSEIAQHEVEFLGFNITKEGRGLTETFKQKLLNITPPRDLKQLQSILGKLNFARNFIPNFSELVKPLYNIIATAPGKYITWTTDNSQQLQNIISMLNSAENLEERNPEVRLIMKVNTSPSAGYIRFYNEFAKRPIMYLNYVYTKAEVKFTNTEKLLTTIHKGLIKALDLGMGQEILVYSPIVSMTKIQKTPLPERKALPIRWITWMSYLEDPRIQFHYDKTLPELQQVPTVTDDIIAKIKHPSEFSMVFYTDGSAIKHPNVNKSHNAGMGIAQVQFKPEFTVINTWSIPLGDHTAQLAEVAAVEFACKKALKIDGPVLIVTDSFYVAESVNKELPYWQSNGFFNNKKKPLKHVSKWKSIADCIQLKPDIIIIHEKGHQPTASTFHTEGNNLADKLATQGSYVVNAGKRTADGSEFEKRTADGSEFESPKKKAKVE

SEQ ID NO: 654 - protein, 2178 aa, synthetic construct
MPAAKRVKLDGGDKKYSIGLDIGTNSVGWAVITDEYKVPSKKFKVLGNTDRHSIKKNLIGALLFDSGETAEATRLKRTARRRYTRRKNRICYLQEIFSNEMAKVDDSFFHRLEESFLVEEDKKHERHPIFGNIVDEVAYHEKYPTIYHLRKKLVDSTDKADLRLIYLALAHMIKFRGHFLIEGDLNPDNSDVDKLFIQLVQTYNQLFEENPINASGVDAKAILSARLSKSRRLENLIAQLPGEKKNGLFGNLIALSLGLTPNFKSNFDLAEDAKLQLSKDTYDDDLDNLLAQIGDQYADLFLAAKNLSDAILLSDILRVNTEITKAPLSASMIKRYDEHHQDLTLLKALVRQQLPEKYKEIFFDQSKNGYAGYIDGGASQEEFYKFIKPILEKMDGTEELLVKLNREDLLRKQRTFDNGSIPHQIHLGELHAILRRQEDFYPFLKDNREKIEKILTFRIPYYVGPLARGNSRFAWMTRKSEETITPWNFEEVVDKGASAQSFIERMTNFDKNLPNEKVLPKHSLLYEYFTVYNELTKVKYVTEGMRKPAFLSGEQKKAIVDLLFKTNRKVTVKQLKEDYFKKIECFDSVEISGVEDRFNASLGTYHDLLKIIKDKDFLDNEENEDILEDIVLTLTLFEDREMIEERLKTYAHLFDDKVMKQLKRRRYTGWGRLSRKLINGIRDKQSGKTILDFLKSDGFANRNFMQLIHDDSLTFKEDIQKAQVSGQGDSLHEHIANLAGSPAIKKGILQTVKVVDELVKVMGRHKPENIVIEMARENQTTQKGQKNSRERMKRIEEGIKELGSQILKEHPVENTQLQNEKLYLYYLQNGRDMYVDQELDINRLSDYDVDHIVPQSFLKDDSIDNKVLTRSDKARGKSDNVPSEEVVKKMKNYWRQLLNAKLITQRKFDNLTKAERGGLSELDKAGFIKRQLVETRQITKHVAQILDSRMNTKYDENDKLIREVKVITLKSKLVSDFRKDFQFYKVREINNYHHAHDAYLNAVVGTALIKKYPKLESEFVYGDYKVYDVRKMIAKSEQEIGKATAKYFFYSNIMNFFKTEITLANGEIRKRPLIETNGETGEIVWDKGRDFATVRKVLSMPQVNIVKKTEVQTGGFSKESILPKRNSDKLIARKKDWDPKKYGGFDSPTVAYSVLVVAKVEKGKSKKLKSVKELLGITIMERSSFEKNPIDFLEAKGYKEVKKDLIIKLPKYSLFELENGRKRMLASAGELQKGNELALPSKYVNFLYLASHYEKLKGSPEDNEQKQLFVEQHKHYLDEIIEQISEFSKRVILADANLDKVLSAYNKHRDKPIREQAENIIHLFTLTNLGAPAAFKYFDTTIDRKRYTSTKEVLDATLIHQSITGLYETRIDLSQLGGDGGPAPAPAPAPAPAPGGMDPLQLLQPLEAEIKGTKLKAHWNSGATITCVPQAFLEEEVPIKNIWIKTIHGEKEQPVYYLTFKIQGRKVEAEVISSPYDYILVSPSDIPWLMKKPLQLTTLVPLQEYEERLLKQTMLTGSYKEKLQSLFLKYDALWQHWENQVGHRRIKPHHIATGTVNPRPQKQYPINPKAKASIQTVINDLLKQGVLIQQNSIMNTPVYPVPKPDGKWRMVLDYREVNKTIPLIAAQNQHSAGILSSIFRGKYKTTLDLSNGFWAHSITPESYWLTAFTWLGQQYCWTRLPQGFLNSPALFNADVVDLLKEVPNVQVYVDDIYISHDDPREHLEQLEKVFSLLLNAGYVVSLKKSEIAQHEVEFLGFNITKEGRGLTETFKQKLLNITPPRDLKQLQSILGKLNFARNFIPNFSELVKPLYNIIATAPGKYITWTTDNSQQLQNIISMLNSAENLEERNPEVRLIMKVNTSPSAGYIRFYNEFAKRPIMYLNYVYTKAEVKFTNTEKLLTTIHKGLIKALDLGMGQEILVYSPIVSMTKIQKTPLPERKALPIRWITWMSYLEDPRIQFHYDKTLPELQQVPTVTDDIIAKIKHPSEFSMVFYTDGSAIKHPNVNKSHNAGMGIAQVQFKPEFTVINTWSIPLGDHTAQLAEVAAVEFACKKALKIDGPVLIVTDSFYVAESVNKELPYWQSNGFFNNKKKPLKHVSKWKSIADCIQLKPDIIIIHEKGHQPTASTFHTEGNNLADKLATQGSYVVNAGKRTADGSEFEKRTADGSEFESPKKKAKVE

SEQ ID NO: 655 - protein, 2176 aa, synthetic construct
MPAAKRVKLDGGDKKYSIGLDIGTNSVGWAVITDEYKVPSKKFKVLGNTDRHSIKKNLIGALLFDSGETAEATRLKRTARRRYTRRKNRICYLQEIFSNEMAKVDDSFFHRLEESFLVEEDKKHERHPIFGNIVDEVAYHEKYPTIYHLRKKLVDSTDKADLRLIYLALAHMIKFRGHFLIEGDLNPDNSDVDKLFIQLVQTYNQLFEENPINASGVDAKAILSARLSKSRRLENLIAQLPGEKKNGLFGNLIALSLGLTPNFKSNFDLAEDAKLQLSKDTYDDDLDNLLAQIGDQYADLFLAAKNLSDAILLSDILRVNTEITKAPLSASMIKRYDEHHQDLTLLKALVRQQLPEKYKEIFFDQSKNGYAGYIDGGASQEEFYKFIKPILEKMDGTEELLVKLNREDLLRKQRTFDNGSIPHQIHLGELHAILRRQEDFYPFLKDNREKIEKILTFRIPYYVGPLARGNSRFAWMTRKSEETITPWNFEEVVDKGASAQSFIERMTNFDKNLPNEKVLPKHSLLYEYFTVYNELTKVKYVTEGMRKPAFLSGEQKKAIVDLLFKTNRKVTVKQLKEDYFKKIECFDSVEISGVEDRFNASLGTYHDLLKIIKDKDFLDNEENEDILEDIVLTLTLFEDREMIEERLKTYAHLFDDKVMKQLKRRRYTGWGRLSRKLINGIRDKQSGKTILDFLKSDGFANRNFMQLIHDDSLTFKEDIQKAQVSGQGDSLHEHIANLAGSPAIKKGILQTVKVVDELVKVMGRHKPENIVIEMARENQTTQKGQKNSRERMKRIEEGIKELGSQILKEHPVENTQLQNEKLYLYYLQNGRDMYVDQELDINRLSDYDVDHIVPQSFLKDDSIDNKVLTRSDKARGKSDNVPSEEVVKKMKNYWRQLLNAKLITQRKFDNLTKAERGGLSELDKAGFIKRQLVETRQITKHVAQILDSRMNTKYDENDKLIREVKVITLKSKLVSDFRKDFQFYKVREINNYHHAHDAYLNAVVGTALIKKYPKLESEFVYGDYKVYDVRKMIAKSEQEIGKATAKYFFYSNIMNFFKTEITLANGEIRKRPLIETNGETGEIVWDKGRDFATVRKVLSMPQVNIVKKTEVQTGGFSKESILPKRNSDKLIARKKDWDPKKYGGFDSPTVAYSVLVVAKVEKGKSKKLKSVKELLGITIMERSSFEKNPIDFLEAKGYKEVKKDLIIKLPKYSLFELENGRKRMLASAGELQKGNELALPSKYVNFLYLASHYEKLKGSPEDNEQKQLFVEQHKHYLDEIIEQISEFSKRVILADANLDKVLSAYNKHRDKPIREQAENIIHLFTLTNLGAPAAFKYFDTTIDRKRYTSTKEVLDATLIHQSITGLYETRIDLSQLGGDGGGGGGSSEAAAKGGMDPLQLLQPLEAEIKGTKLKAHWNSGATITCVPQAFLEEEVPIKNIWIKTIHGEKEQPVYYLTFKIQGRKVEAEVISSPYDYILVSPSDIPWLMKKPLQLTTLVPLQEYEERLLKQTMLTGSYKEKLQSLFLKYDALWQHWENQVGHRRIKPHHIATGTVNPRPQKQYPINPKAKASIQTVINDLLKQGVLIQQNSIMNTPVYPVPKPDGKWRMVLDYREVNKTIPLIAAQNQHSAGILSSIFRGKYKTTLDLSNGFWAHSITPESYWLTAFTWLGQQYCWTRLPQGFLNSPALFNADVVDLLKEVPNVQVYVDDIYISHDDPREHLEQLEKVFSLLLNAGYVVSLKKSEIAQHEVEFLGFNITKEGRGLTETFKQKLLNITPPRDLKQLQSILGKLNFARNFIPNFSELVKPLYNIIATAPGKYITWTTDNSQQLQNIISMLNSAENLEERNPEVRLIMKVNTSPSAGYIRFYNEFAKRPIMYLNYVYTKAEVKFTNTEKLLTTIHKGLIKALDLGMGQEILVYSPIVSMTKIQKTPLPERKALPIRWITWMSYLEDPRIQFHYDKTLPELQQVPTVTDDIIAKIKHPSEFSMVFYTDGSAIKHPNVNKSHNAGMGIAQVQFKPEFTVINTWSIPLGDHTAQLAEVAAVEFACKKALKIDGPVLIVTDSFYVAESVNKELPYWQSNGFFNNKKKPLKHVSKWKSIADCIQLKPDIIIIHEKGHQPTASTFHTEGNNLADKLATQGSYVVNAGKRTADGSEFEKRTADGSEFESPKKKAKVE

SEQ ID NO: 656 - protein, 2181 aa, synthetic construct
MPAAKRVKLDGGDKKYSIGLDIGTNSVGWAVITDEYKVPSKKFKVLGNTDRHSIKKNLIGALLFDSGETAEATRLKRTARRRYTRRKNRICYLQEIFSNEMAKVDDSFFHRLEESFLVEEDKKHERHPIFGNIVDEVAYHEKYPTIYHLRKKLVDSTDKADLRLIYLALAHMIKFRGHFLIEGDLNPDNSDVDKLFIQLVQTYNQLFEENPINASGVDAKAILSARLSKSRRLENLIAQLPGEKKNGLFGNLIALSLGLTPNFKSNFDLAEDAKLQLSKDTYDDDLDNLLAQIGDQYADLFLAAKNLSDAILLSDILRVNTEITKAPLSASMIKRYDEHHQDLTLLKALVRQQLPEKYKEIFFDQSKNGYAGYIDGGASQEEFYKFIKPILEKMDGTEELLVKLNREDLLRKQRTFDNGSIPHQIHLGELHAILRRQEDFYPFLKDNREKIEKILTFRIPYYVGPLARGNSRFAWMTRKSEETITPWNFEEVVDKGASAQSFIERMTNFDKNLPNEKVLPKHSLLYEYFTVYNELTKVKYVTEGMRKPAFLSGEQKKAIVDLLFKTNRKVTVKQLKEDYFKKIECFDSVEISGVEDRFNASLGTYHDLLKIIKDKDFLDNEENEDILEDIVLTLTLFEDREMIEERLKTYAHLFDDKVMKQLKRRRYTGWGRLSRKLINGIRDKQSGKTILDFLKSDGFANRNFMQLIHDDSLTFKEDIQKAQVSGQGDSLHEHIANLAGSPAIKKGILQTVKVVDELVKVMGRHKPENIVIEMARENQTTQKGQKNSRERMKRIEEGIKELGSQILKEHPVENTQLQNEKLYLYYLQNGRDMYVDQELDINRLSDYDVDHIVPQSFLKDDSIDNKVLTRSDKARGKSDNVPSEEVVKKMKNYWRQLLNAKLITQRKFDNLTKAERGGLSELDKAGFIKRQLVETRQITKHVAQILDSRMNTKYDENDKLIREVKVITLKSKLVSDFRKDFQFYKVREINNYHHAHDAYLNAVVGTALIKKYPKLESEFVYGDYKVYDVRKMIAKSEQEIGKATAKYFFYSNIMNFFKTEITLANGEIRKRPLIETNGETGEIVWDKGRDFATVRKVLSMPQVNIVKKTEVQTGGFSKESILPKRNSDKLIARKKDWDPKKYGGFDSPTVAYSVLVVAKVEKGKSKKLKSVKELLGITIMERSSFEKNPIDFLEAKGYKEVKKDLIIKLPKYSLFELENGRKRMLASAGELQKGNELALPSKYVNFLYLASHYEKLKGSPEDNEQKQLFVEQHKHYLDEIIEQISEFSKRVILADANLDKVLSAYNKHRDKPIREQAENIIHLFTLTNLGAPAAFKYFDTTIDRKRYTSTKEVLDATLIHQSITGLYETRIDLSQLGGDGGSGSETPGTSESATPESGGMDPLQLLQPLEAEIKGTKLKAHWNSGATITCVPQAFLEEEVPIKNIWIKTIHGEKEQPVYYLTFKIQGRKVEAEVISSPYDYILVSPSDIPWLMKKPLQLTTLVPLQEYEERLLKQTMLTGSYKEKLQSLFLKYDALWQHWENQVGHRRIKPHHIATGTVNPRPQKQYPINPKAKASIQTVINDLLKQGVLIQQNSIMNTPVYPVPKPDGKWRMVLDYREVNKTIPLIAAQNQHSAGILSSIFRGKYKTTLDLSNGFWAHSITPESYWLTAFTWLGQQYCWTRLPQGFLNSPALFNADVVDLLKEVPNVQVYVDDIYISHDDPREHLEQLEKVFSLLLNAGYVVSLKKSEIAQHEVEFLGFNITKEGRGLTETFKQKLLNITPPRDLKQLQSILGKLNFARNFIPNFSELVKPLYNIIATAPGKYITWTTDNSQQLQNIISMLNSAENLEERNPEVRLIMKVNTSPSAGYIRFYNEFAKRPIMYLNYVYTKAEVKFTNTEKLLTTIHKGLIKALDLGMGQEILVYSPIVSMTKIQKTPLPERKALPIRWITWMSYLEDPRIQFHYDKTLPELQQVPTVTDDIIAKIKHPSEFSMVFYTDGSAIKHPNVNKSHNAGMGIAQVQFKPEFTVINTWSIPLGDHTAQLAEVAAVEFACKKALKIDGPVLIVTDSFYVAESVNKELPYWQSNGFFNNKKKPLKHVSKWKSIADCIQLKPDIIIIHEKGHQPTASTFHTEGNNLADKLATQGSYVVNAGKRTADGSEFEKRTADGSEFESPKKKAKVE

SEQ ID NO: 657 - protein, 2177 aa, synthetic construct
MPAAKRVKLDGGDKKYSIGLDIGTNSVGWAVITDEYKVPSKKFKVLGNTDRHSIKKNLIGALLFDSGETAEATRLKRTARRRYTRRKNRICYLQEIFSNEMAKVDDSFFHRLEESFLVEEDKKHERHPIFGNIVDEVAYHEKYPTIYHLRKKLVDSTDKADLRLIYLALAHMIKFRGHFLIEGDLNPDNSDVDKLFIQLVQTYNQLFEENPINASGVDAKAILSARLSKSRRLENLIAQLPGEKKNGLFGNLIALSLGLTPNFKSNFDLAEDAKLQLSKDTYDDDLDNLLAQIGDQYADLFLAAKNLSDAILLSDILRVNTEITKAPLSASMIKRYDEHHQDLTLLKALVRQQLPEKYKEIFFDQSKNGYAGYIDGGASQEEFYKFIKPILEKMDGTEELLVKLNREDLLRKQRTFDNGSIPHQIHLGELHAILRRQEDFYPFLKDNREKIEKILTFRIPYYVGPLARGNSRFAWMTRKSEETITPWNFEEVVDKGASAQSFIERMTNFDKNLPNEKVLPKHSLLYEYFTVYNELTKVKYVTEGMRKPAFLSGEQKKAIVDLLFKTNRKVTVKQLKEDYFKKIECFDSVEISGVEDRFNASLGTYHDLLKIIKDKDFLDNEENEDILEDIVLTLTLFEDREMIEERLKTYAHLFDDKVMKQLKRRRYTGWGRLSRKLINGIRDKQSGKTILDFLKSDGFANRNFMQLIHDDSLTFKEDIQKAQVSGQGDSLHEHIANLAGSPAIKKGILQTVKVVDELVKVMGRHKPENIVIEMARENQTTQKGQKNSRERMKRIEEGIKELGSQILKEHPVENTQLQNEKLYLYYLQNGRDMYVDQELDINRLSDYDVDHIVPQSFLKDDSIDNKVLTRSDKARGKSDNVPSEEVVKKMKNYWRQLLNAKLITQRKFDNLTKAERGGLSELDKAGFIKRQLVETRQITKHVAQILDSRMNTKYDENDKLIREVKVITLKSKLVSDFRKDFQFYKVREINNYHHAHDAYLNAVVGTALIKKYPKLESEFVYGDYKVYDVRKMIAKSEQEIGKATAKYFFYSNIMNFFKTEITLANGEIRKRPLIETNGETGEIVWDKGRDFATVRKVLSMPQVNIVKKTEVQTGGFSKESILPKRNSDKLIARKKDWDPKKYGGFDSPTVAYSVLVVAKVEKGKSKKLKSVKELLGITIMERSSFEKNPIDFLEAKGYKEVKKDLIIKLPKYSLFELENGRKRMLASAGELQKGNELALPSKYVNFLYLASHYEKLKGSPEDNEQKQLFVEQHKHYLDEIIEQISEFSKRVILADANLDKVLSAYNKHRDKPIREQAENIIHLFTLTNLGAPAAFKYFDTTIDRKRYTSTKEVLDATLIHQSITGLYETRIDLSQLGGDGGGSAGSAAGSGEFGGMDPLQLLQPLEAEIKGTKLKAHWNSGATITCVPQAFLEEEVPIKNIWIKTIHGEKEQPVYYLTFKIQGRKVEAEVISSPYDYILVSPSDIPWLMKKPLQLTTLVPLQEYEERLLKQTMLTGSYKEKLQSLFLKYDALWQHWENQVGHRRIKPHHIATGTVNPRPQKQYPINPKAKASIQTVINDLLKQGVLIQQNSIMNTPVYPVPKPDGKWRMVLDYREVNKTIPLIAAQNQHSAGILSSIFRGKYKTTLDLSNGFWAHSITPESYWLTAFTWLGQQYCWTRLPQGFLNSPALFNADVVDLLKEVPNVQVYVDDIYISHDDPREHLEQLEKVFSLLLNAGYVVSLKKSEIAQHEVEFLGFNITKEGRGLTETFKQKLLNITPPRDLKQLQSILGKLNFARNFIPNFSELVKPLYNIIATAPGKYITWTTDNSQQLQNIISMLNSAENLEERNPEVRLIMKVNTSPSAGYIRFYNEFAKRPIMYLNYVYTKAEVKFTNTEKLLTTIHKGLIKALDLGMGQEILVYSPIVSMTKIQKTPLPERKALPIRWITWMSYLEDPRIQFHYDKTLPELQQVPTVTDDIIAKIKHPSEFSMVFYTDGSAIKHPNVNKSHNAGMGIAQVQFKPEFTVINTWSIPLGDHTAQLAEVAAVEFACKKALKIDGPVLIVTDSFYVAESVNKELPYWQSNGFFNNKKKPLKHVSKWKSIADCIQLKPDIIIIHEKGHQPTASTFHTEGNNLADKLATQGSYVVNAGKRTADGSEFEKRTADGSEFESPKKKAKVE

SEQ ID NO: 658 - protein, 2168 aa, synthetic construct
MPAAKRVKLDGGDKKYSIGLDIGTNSVGWAVITDEYKVPSKKFKVLGNTDRHSIKKNLIGALLFDSGETAEATRLKRTARRRYTRRKNRICYLQEIFSNEMAKVDDSFFHRLEESFLVEEDKKHERHPIFGNIVDEVAYHEKYPTIYHLRKKLVDSTDKADLRLIYLALAHMIKFRGHFLIEGDLNPDNSDVDKLFIQLVQTYNQLFEENPINASGVDAKAILSARLSKSRRLENLIAQLPGEKKNGLFGNLIALSLGLTPNFKSNFDLAEDAKLQLSKDTYDDDLDNLLAQIGDQYADLFLAAKNLSDAILLSDILRVNTEITKAPLSASMIKRYDEHHQDLTLLKALVRQQLPEKYKEIFFDQSKNGYAGYIDGGASQEEFYKFIKPILEKMDGTEELLVKLNREDLLRKQRTFDNGSIPHQIHLGELHAILRRQEDFYPFLKDNREKIEKILTFRIPYYVGPLARGNSRFAWMTRKSEETITPWNFEEVVDKGASAQSFIERMTNFDKNLPNEKVLPKHSLLYEYFTVYNELTKVKYVTEGMRKPAFLSGEQKKAIVDLLFKTNRKVTVKQLKEDYFKKIECFDSVEISGVEDRFNASLGTYHDLLKIIKDKDFLDNEENEDILEDIVLTLTLFEDREMIEERLKTYAHLFDDKVMKQLKRRRYTGWGRLSRKLINGIRDKQSGKTILDFLKSDGFANRNFMQLIHDDSLTFKEDIQKAQVSGQGDSLHEHIANLAGSPAIKKGILQTVKVVDELVKVMGRHKPENIVIEMARENQTTQKGQKNSRERMKRIEEGIKELGSQILKEHPVENTQLQNEKLYLYYLQNGRDMYVDQELDINRLSDYDVDHIVPQSFLKDDSIDNKVLTRSDKARGKSDNVPSEEVVKKMKNYWRQLLNAKLITQRKFDNLTKAERGGLSELDKAGFIKRQLVETRQITKHVAQILDSRMNTKYDENDKLIREVKVITLKSKLVSDFRKDFQFYKVREINNYHHAHDAYLNAVVGTALIKKYPKLESEFVYGDYKVYDVRKMIAKSEQEIGKATAKYFFYSNIMNFFKTEITLANGEIRKRPLIETNGETGEIVWDKGRDFATVRKVLSMPQVNIVKKTEVQTGGFSKESILPKRNSDKLIARKKDWDPKKYGGFDSPTVAYSVLVVAKVEKGKSKKLKSVKELLGITIMERSSFEKNPIDFLEAKGYKEVKKDLIIKLPKYSLFELENGRKRMLASAGELQKGNELALPSKYVNFLYLASHYEKLKGSPEDNEQKQLFVEQHKHYLDEIIEQISEFSKRVILADANLDKVLSAYNKHRDKPIREQAENIIHLFTLTNLGAPAAFKYFDTTIDRKRYTSTKEVLDATLIHQSITGLYETRIDLSQLGGDGGGGGGGMDPLQLLQPLEAEIKGTKLKAHWNSGATITCVPQAFLEEEVPIKNIWIKTIHGEKEQPVYYLTFKIQGRKVEAEVISSPYDYILVSPSDIPWLMKKPLQLTTLVPLQEYEERLLKQTMLTGSYKEKLQSLFLKYDALWQHWENQVGHRRIKPHHIATGTVNPRPQKQYPINPKAKASIQTVINDLLKQGVLIQQNSIMNTPVYPVPKPDGKWRMVLDYREVNKTIPLIAAQNQHSAGILSSIFRGKYKTTLDLSNGFWAHSITPESYWLTAFTWLGQQYCWTRLPQGFLNSPALFNADVVDLLKEVPNVQVYVDDIYISHDDPREHLEQLEKVFSLLLNAGYVVSLKKSEIAQHEVEFLGFNITKEGRGLTETFKQKLLNITPPRDLKQLQSILGKLNFARNFIPNFSELVKPLYNIIATAPGKYITWTTDNSQQLQNIISMLNSAENLEERNPEVRLIMKVNTSPSAGYIRFYNEFAKRPIMYLNYVYTKAEVKFTNTEKLLTTIHKGLIKALDLGMGQEILVYSPIVSMTKIQKTPLPERKALPIRWITWMSYLEDPRIQFHYDKTLPELQQVPTVTDDIIAKIKHPSEFSMVFYTDGSAIKHPNVNKSHNAGMGIAQVQFKPEFTVINTWSIPLGDHTAQLAEVAAVEFACKKALKIDGPVLIVTDSFYVAESVNKELPYWQSNGFFNNKKKPLKHVSKWKSIADCIQLKPDIIIIHEKGHQPTASTFHTEGNNLADKLATQGSYVVNAGKRTADGSEFEKRTADGSEFESPKKKAKVE

SEQ ID NO: 659 - protein, 2176 aa, synthetic construct
MPAAKRVKLDGGDKKYSIGLDIGTNSVGWAVITDEYKVPSKKFKVLGNTDRHSIKKNLIGALLFDSGETAEATRLKRTARRRYTRRKNRICYLQEIFSNEMAKVDDSFFHRLEESFLVEEDKKHERHPIFGNIVDEVAYHEKYPTIYHLRKKLVDSTDKADLRLIYLALAHMIKFRGHFLIEGDLNPDNSDVDKLFIQLVQTYNQLFEENPINASGVDAKAILSARLSKSRRLENLIAQLPGEKKNGLFGNLIALSLGLTPNFKSNFDLAEDAKLQLSKDTYDDDLDNLLAQIGDQYADLFLAAKNLSDAILLSDILRVNTEITKAPLSASMIKRYDEHHQDLTLLKALVRQQLPEKYKEIFFDQSKNGYAGYIDGGASQEEFYKFIKPILEKMDGTEELLVKLNREDLLRKQRTFDNGSIPHQIHLGELHAILRRQEDFYPFLKDNREKIEKILTFRIPYYVGPLARGNSRFAWMTRKSEETITPWNFEEVVDKGASAQSFIERMTNFDKNLPNEKVLPKHSLLYEYFTVYNELTKVKYVTEGMRKPAFLSGEQKKAIVDLLFKTNRKVTVKQLKEDYFKKIECFDSVEISGVEDRFNASLGTYHDLLKIIKDKDFLDNEENEDILEDIVLTLTLFEDREMIEERLKTYAHLFDDKVMKQLKRRRYTGWGRLSRKLINGIRDKQSGKTILDFLKSDGFANRNFMQLIHDDSLTFKEDIQKAQVSGQGDSLHEHIANLAGSPAIKKGILQTVKVVDELVKVMGRHKPENIVIEMARENQTTQKGQKNSRERMKRIEEGIKELGSQILKEHPVENTQLQNEKLYLYYLQNGRDMYVDQELDINRLSDYDVDHIVPQSFLKDDSIDNKVLTRSDKARGKSDNVPSEEVVKKMKNYWRQLLNAKLITQRKFDNLTKAERGGLSELDKAGFIKRQLVETRQITKHVAQILDSRMNTKYDENDKLIREVKVITLKSKLVSDFRKDFQFYKVREINNYHHAHDAYLNAVVGTALIKKYPKLESEFVYGDYKVYDVRKMIAKSEQEIGKATAKYFFYSNIMNFFKTEITLANGEIRKRPLIETNGETGEIVWDKGRDFATVRKVLSMPQVNIVKKTEVQTGGFSKESILPKRNSDKLIARKKDWDPKKYGGFDSPTVAYSVLVVAKVEKGKSKKLKSVKELLGITIMERSSFEKNPIDFLEAKGYKEVKKDLIIKLPKYSLFELENGRKRMLASAGELQKGNELALPSKYVNFLYLASHYEKLKGSPEDNEQKQLFVEQHKHYLDEIIEQISEFSKRVILADANLDKVLSAYNKHRDKPIREQAENIIHLFTLTNLGAPAAFKYFDTTIDRKRYTSTKEVLDATLIHQSITGLYETRIDLSQLGGDGGGGSGGGEAAAKGGMDPLQLLQPLEAEIKGTKLKAHWNSGATITCVPQAFLEEEVPIKNIWIKTIHGEKEQPVYYLTFKIQGRKVEAEVISSPYDYILVSPSDIPWLMKKPLQLTTLVPLQEYEERLLKQTMLTGSYKEKLQSLFLKYDALWQHWENQVGHRRIKPHHIATGTVNPRPQKQYPINPKAKASIQTVINDLLKQGVLIQQNSIMNTPVYPVPKPDGKWRMVLDYREVNKTIPLIAAQNQHSAGILSSIFRGKYKTTLDLSNGFWAHSITPESYWLTAFTWLGQQYCWTRLPQGFLNSPALFNADVVDLLKEVPNVQVYVDDIYISHDDPREHLEQLEKVFSLLLNAGYVVSLKKSEIAQHEVEFLGFNITKEGRGLTETFKQKLLNITPPRDLKQLQSILGKLNFARNFIPNFSELVKPLYNIIATAPGKYITWTTDNSQQLQNIISMLNSAENLEERNPEVRLIMKVNTSPSAGYIRFYNEFAKRPIMYLNYVYTKAEVKFTNTEKLLTTIHKGLIKALDLGMGQEILVYSPIVSMTKIQKTPLPERKALPIRWITWMSYLEDPRIQFHYDKTLPELQQVPTVTDDIIAKIKHPSEFSMVFYTDGSAIKHPNVNKSHNAGMGIAQVQFKPEFTVINTWSIPLGDHTAQLAEVAAVEFACKKALKIDGPVLIVTDSFYVAESVNKELPYWQSNGFFNNKKKPLKHVSKWKSIADCIQLKPDIIIIHEKGHQPTASTFHTEGNNLADKLATQGSYVVNAGKRTADGSEFEKRTADGSEFESPKKKAKVE

SEQ ID NO: 660 - protein, 2180 aa, synthetic construct
MPAAKRVKLDGGDKKYSIGLDIGTNSVGWAVITDEYKVPSKKFKVLGNTDRHSIKKNLIGALLFDSGETAEATRLKRTARRRYTRRKNRICYLQEIFSNEMAKVDDSFFHRLEESFLVEEDKKHERHPIFGNIVDEVAYHEKYPTIYHLRKKLVDSTDKADLRLIYLALAHMIKFRGHFLIEGDLNPDNSDVDKLFIQLVQTYNQLFEENPINASGVDAKAILSARLSKSRRLENLIAQLPGEKKNGLFGNLIALSLGLTPNFKSNFDLAEDAKLQLSKDTYDDDLDNLLAQIGDQYADLFLAAKNLSDAILLSDILRVNTEITKAPLSASMIKRYDEHHQDLTLLKALVRQQLPEKYKEIFFDQSKNGYAGYIDGGASQEEFYKFIKPILEKMDGTEELLVKLNREDLLRKQRTFDNGSIPHQIHLGELHAILRRQEDFYPFLKDNREKIEKILTFRIPYYVGPLARGNSRFAWMTRKSEETITPWNFEEVVDKGASAQSFIERMTNFDKNLPNEKVLPKHSLLYEYFTVYNELTKVKYVTEGMRKPAFLSGEQKKAIVDLLFKTNRKVTVKQLKEDYFKKIECFDSVEISGVEDRFNASLGTYHDLLKIIKDKDFLDNEENEDILEDIVLTLTLFEDREMIEERLKTYAHLFDDKVMKQLKRRRYTGWGRLSRKLINGIRDKQSGKTILDFLKSDGFANRNFMQLIHDDSLTFKEDIQKAQVSGQGDSLHEHIANLAGSPAIKKGILQTVKVVDELVKVMGRHKPENIVIEMARENQTTQKGQKNSRERMKRIEEGIKELGSQILKEHPVENTQLQNEKLYLYYLQNGRDMYVDQELDINRLSDYDVDHIVPQSFLKDDSIDNKVLTRSDKARGKSDNVPSEEVVKKMKNYWRQLLNAKLITQRKFDNLTKAERGGLSELDKAGFIKRQLVETRQITKHVAQILDSRMNTKYDENDKLIREVKVITLKSKLVSDFRKDFQFYKVREINNYHHAHDAYLNAVVGTALIKKYPKLESEFVYGDYKVYDVRKMIAKSEQEIGKATAKYFFYSNIMNFFKTEITLANGEIRKRPLIETNGETGEIVWDKGRDFATVRKVLSMPQVNIVKKTEVQTGGFSKESILPKRNSDKLIARKKDWDPKKYGGFDSPTVAYSVLVVAKVEKGKSKKLKSVKELLGITIMERSSFEKNPIDFLEAKGYKEVKKDLIIKLPKYSLFELENGRKRMLASAGELQKGNELALPSKYVNFLYLASHYEKLKGSPEDNEQKQLFVEQHKHYLDEIIEQISEFSKRVILADANLDKVLSAYNKHRDKPIREQAENIIHLFTLTNLGAPAAFKYFDTTIDRKRYTSTKEVLDATLIHQSITGLYETRIDLSQLGGDGGEAAAKGGGGSEAAAKGGMDPLQLLQPLEAEIKGTKLKAHWNSGATITCVPQAFLEEEVPIKNIWIKTIHGEKEQPVYYLTFKIQGRKVEAEVISSPYDYILVSPSDIPWLMKKPLQLTTLVPLQEYEERLLKQTMLTGSYKEKLQSLFLKYDALWQHWENQVGHRRIKPHHIATGTVNPRPQKQYPINPKAKASIQTVINDLLKQGVLIQQNSIMNTPVYPVPKPDGKWRMVLDYREVNKTIPLIAAQNQHSAGILSSIFRGKYKTTLDLSNGFWAHSITPESYWLTAFTWLGQQYCWTRLPQGFLNSPALFNADVVDLLKEVPNVQVYVDDIYISHDDPREHLEQLEKVFSLLLNAGYVVSLKKSEIAQHEVEFLGFNITKEGRGLTETFKQKLLNITPPRDLKQLQSILGKLNFARNFIPNFSELVKPLYNIIATAPGKYITWTTDNSQQLQNIISMLNSAENLEERNPEVRLIMKVNTSPSAGYIRFYNEFAKRPIMYLNYVYTKAEVKFTNTEKLLTTIHKGLIKALDLGMGQEILVYSPIVSMTKIQKTPLPERKALPIRWITWMSYLEDPRIQFHYDKTLPELQQVPTVTDDIIAKIKHPSEFSMVFYTDGSAIKHPNVNKSHNAGMGIAQVQFKPEFTVINTWSIPLGDHTAQLAEVAAVEFACKKALKIDGPVLIVTDSFYVAESVNKELPYWQSNGFFNNKKKPLKHVSKWKSIADCIQLKPDIIIIHEKGHQPTASTFHTEGNNLADKLATQGSYVVNAGKRTADGSEFEKRTADGSEFESPKKKAKVE

SEQ ID NO: 661 - protein, 2176 aa, synthetic construct
MPAAKRVKLDGGDKKYSIGLDIGTNSVGWAVITDEYKVPSKKFKVLGNTDRHSIKKNLIGALLFDSGETAEATRLKRTARRRYTRRKNRICYLQEIFSNEMAKVDDSFFHRLEESFLVEEDKKHERHPIFGNIVDEVAYHEKYPTIYHLRKKLVDSTDKADLRLIYLALAHMIKFRGHFLIEGDLNPDNSDVDKLFIQLVQTYNQLFEENPINASGVDAKAILSARLSKSRRLENLIAQLPGEKKNGLFGNLIALSLGLTPNFKSNFDLAEDAKLQLSKDTYDDDLDNLLAQIGDQYADLFLAAKNLSDAILLSDILRVNTEITKAPLSASMIKRYDEHHQDLTLLKALVRQQLPEKYKEIFFDQSKNGYAGYIDGGASQEEFYKFIKPILEKMDGTEELLVKLNREDLLRKQRTFDNGSIPHQIHLGELHAILRRQEDFYPFLKDNREKIEKILTFRIPYYVGPLARGNSRFAWMTRKSEETITPWNFEEVVDKGASAQSFIERMTNFDKNLPNEKVLPKHSLLYEYFTVYNELTKVKYVTEGMRKPAFLSGEQKKAIVDLLFKTNRKVTVKQLKEDYFKKIECFDSVEISGVEDRFNASLGTYHDLLKIIKDKDFLDNEENEDILEDIVLTLTLFEDREMIEERLKTYAHLFDDKVMKQLKRRRYTGWGRLSRKLINGIRDKQSGKTILDFLKSDGFANRNFMQLIHDDSLTFKEDIQKAQVSGQGDSLHEHIANLAGSPAIKKGILQTVKVVDELVKVMGRHKPENIVIEMARENQTTQKGQKNSRERMKRIEEGIKELGSQILKEHPVENTQLQNEKLYLYYLQNGRDMYVDQELDINRLSDYDVDHIVPQSFLKDDSIDNKVLTRSDKARGKSDNVPSEEVVKKMKNYWRQLLNAKLITQRKFDNLTKAERGGLSELDKAGFIKRQLVETRQITKHVAQILDSRMNTKYDENDKLIREVKVITLKSKLVSDFRKDFQFYKVREINNYHHAHDAYLNAVVGTALIKKYPKLESEFVYGDYKVYDVRKMIAKSEQEIGKATAKYFFYSNIMNFFKTEITLANGEIRKRPLIETNGETGEIVWDKGRDFATVRKVLSMPQVNIVKKTEVQTGGFSKESILPKRNSDKLIARKKDWDPKKYGGFDSPTVAYSVLVVAKVEKGKSKKLKSVKELLGITIMERSSFEKNPIDFLEAKGYKEVKKDLIIKLPKYSLFELENGRKRMLASAGELQKGNELALPSKYVNFLYLASHYEKLKGSPEDNEQKQLFVEQHKHYLDEIIEQISEFSKRVILADANLDKVLSAYNKHRDKPIREQAENIIHLFTLTNLGAPAAFKYFDTTIDRKRYTSTKEVLDATLIHQSITGLYETRIDLSQLGGDGGGGSEAAAKGGGGGMDPLQLLQPLEAEIKGTKLKAHWNSGATITCVPQAFLEEEVPIKNIWIKTIHGEKEQPVYYLTFKIQGRKVEAEVISSPYDYILVSPSDIPWLMKKPLQLTTLVPLQEYEERLLKQTMLTGSYKEKLQSLFLKYDALWQHWENQVGHRRIKPHHIATGTVNPRPQKQYPINPKAKASIQTVINDLLKQGVLIQQNSIMNTPVYPVPKPDGKWRMVLDYREVNKTIPLIAAQNQHSAGILSSIFRGKYKTTLDLSNGFWAHSITPESYWLTAFTWLGQQYCWTRLPQGFLNSPALFNADVVDLLKEVPNVQVYVDDIYISHDDPREHLEQLEKVFSLLLNAGYVVSLKKSEIAQHEVEFLGFNITKEGRGLTETFKQKLLNITPPRDLKQLQSILGKLNFARNFIPNFSELVKPLYNIIATAPGKYITWTTDNSQQLQNIISMLNSAENLEERNPEVRLIMKVNTSPSAGYIRFYNEFAKRPIMYLNYVYTKAEVKFTNTEKLLTTIHKGLIKALDLGMGQEILVYSPIVSMTKIQKTPLPERKALPIRWITWMSYLEDPRIQFHYDKTLPELQQVPTVTDDIIAKIKHPSEFSMVFYTDGSAIKHPNVNKSHNAGMGIAQVQFKPEFTVINTWSIPLGDHTAQLAEVAAVEFACKKALKIDGPVLIVTDSFYVAESVNKELPYWQSNGFFNNKKKPLKHVSKWKSIADCIQLKPDIIIIHEKGHQPTASTFHTEGNNLADKLATQGSYVVNAGKRTADGSEFEKRTADGSEFESPKKKAKVE

SEQ ID NO: 662 - protein, 2183 aa, synthetic construct
MPAAKRVKLDGGDKKYSIGLDIGTNSVGWAVITDEYKVPSKKFKVLGNTDRHSIKKNLIGALLFDSGETAEATRLKRTARRRYTRRKNRICYLQEIFSNEMAKVDDSFFHRLEESFLVEEDKKHERHPIFGNIVDEVAYHEKYPTIYHLRKKLVDSTDKADLRLIYLALAHMIKFRGHFLIEGDLNPDNSDVDKLFIQLVQTYNQLFEENPINASGVDAKAILSARLSKSRRLENLIAQLPGEKKNGLFGNLIALSLGLTPNFKSNFDLAEDAKLQLSKDTYDDDLDNLLAQIGDQYADLFLAAKNLSDAILLSDILRVNTEITKAPLSASMIKRYDEHHQDLTLLKALVRQQLPEKYKEIFFDQSKNGYAGYIDGGASQEEFYKFIKPILEKMDGTEELLVKLNREDLLRKQRTFDNGSIPHQIHLGELHAILRRQEDFYPFLKDNREKIEKILTFRIPYYVGPLARGNSRFAWMTRKSEETITPWNFEEVVDKGASAQSFIERMTNFDKNLPNEKVLPKHSLLYEYFTVYNELTKVKYVTEGMRKPAFLSGEQKKAIVDLLFKTNRKVTVKQLKEDYFKKIECFDSVEISGVEDRFNASLGTYHDLLKIIKDKDFLDNEENEDILEDIVLTLTLFEDREMIEERLKTYAHLFDDKVMKQLKRRRYTGWGRLSRKLINGIRDKQSGKTILDFLKSDGFANRNFMQLIHDDSLTFKEDIQKAQVSGQGDSLHEHIANLAGSPAIKKGILQTVKVVDELVKVMGRHKPENIVIEMARENQTTQKGQKNSRERMKRIEEGIKELGSQILKEHPVENTQLQNEKLYLYYLQNGRDMYVDQELDINRLSDYDVDHIVPQSFLKDDSIDNKVLTRSDKARGKSDNVPSEEVVKKMKNYWRQLLNAKLITQRKFDNLTKAERGGLSELDKAGFIKRQLVETRQITKHVAQILDSRMNTKYDENDKLIREVKVITLKSKLVSDFRKDFQFYKVREINNYHHAHDAYLNAVVGTALIKKYPKLESEFVYGDYKVYDVRKMIAKSEQEIGKATAKYFFYSNIMNFFKTEITLANGEIRKRPLIETNGETGEIVWDKGRDFATVRKVLSMPQVNIVKKTEVQTGGFSKESILPKRNSDKLIARKKDWDPKKYGGFDSPTVAYSVLVVAKVEKGKSKKLKSVKELLGITIMERSSFEKNPIDFLEAKGYKEVKKDLIIKLPKYSLFELENGRKRMLASAGELQKGNELALPSKYVNFLYLASHYEKLKGSPEDNEQKQLFVEQHKHYLDEIIEQISEFSKRVILADANLDKVLSAYNKHRDKPIREQAENIIHLFTLTNLGAPAAFKYFDTTIDRKRYTSTKEVLDATLIHQSITGLYETRIDLSQLGGDGGGSSGSSGSSGSSGSSGSSGGMDPLQLLQPLEAEIKGTKLKAHWNSGATITCVPQAFLEEEVPIKNIWIKTIHGEKEQPVYYLTFKIQGRKVEAEVISSPYDYILVSPSDIPWLMKKPLQLTTLVPLQEYEERLLKQTMLTGSYKEKLQSLFLKYDALWQHWENQVGHRRIKPHHIATGTVNPRPQKQYPINPKAKASIQTVINDLLKQGVLIQQNSIMNTPVYPVPKPDGKWRMVLDYREVNKTIPLIAAQNQHSAGILSSIFRGKYKTTLDLSNGFWAHSITPESYWLTAFTWLGQQYCWTRLPQGFLNSPALFNADVVDLLKEVPNVQVYVDDIYISHDDPREHLEQLEKVFSLLLNAGYVVSLKKSEIAQHEVEFLGFNITKEGRGLTETFKQKLLNITPPRDLKQLQSILGKLNFARNFIPNFSELVKPLYNIIATAPGKYITWTTDNSQQLQNIISMLNSAENLEERNPEVRLIMKVNTSPSAGYIRFYNEFAKRPIMYLNYVYTKAEVKFTNTEKLLTTIHKGLIKALDLGMGQEILVYSPIVSMTKIQKTPLPERKALPIRWITWMSYLEDPRIQFHYDKTLPELQQVPTVTDDIIAKIKHPSEFSMVFYTDGSAIKHPNVNKSHNAGMGIAQVQFKPEFTVINTWSIPLGDHTAQLAEVAAVEFACKKALKIDGPVLIVTDSFYVAESVNKELPYWQSNGFFNNKKKPLKHVSKWKSIADCIQLKPDIIIIHEKGHQPTASTFHTEGNNLADKLATQGSYVVNAGKRTADGSEFEKRTADGSEFESPKKKAKVE

SEQ ID NO: 663 - protein, 2176 aa, synthetic construct
MPAAKRVKLDGGDKKYSIGLDIGTNSVGWAVITDEYKVPSKKFKVLGNTDRHSIKKNLIGALLFDSGETAEATRLKRTARRRYTRRKNRICYLQEIFSNEMAKVDDSFFHRLEESFLVEEDKKHERHPIFGNIVDEVAYHEKYPTIYHLRKKLVDSTDKADLRLIYLALAHMIKFRGHFLIEGDLNPDNSDVDKLFIQLVQTYNQLFEENPINASGVDAKAILSARLSKSRRLENLIAQLPGEKKNGLFGNLIALSLGLTPNFKSNFDLAEDAKLQLSKDTYDDDLDNLLAQIGDQYADLFLAAKNLSDAILLSDILRVNTEITKAPLSASMIKRYDEHHQDLTLLKALVRQQLPEKYKEIFFDQSKNGYAGYIDGGASQEEFYKFIKPILEKMDGTEELLVKLNREDLLRKQRTFDNGSIPHQIHLGELHAILRRQEDFYPFLKDNREKIEKILTFRIPYYVGPLARGNSRFAWMTRKSEETITPWNFEEVVDKGASAQSFIERMTNFDKNLPNEKVLPKHSLLYEYFTVYNELTKVKYVTEGMRKPAFLSGEQKKAIVDLLFKTNRKVTVKQLKEDYFKKIECFDSVEISGVEDRFNASLGTYHDLLKIIKDKDFLDNEENEDILEDIVLTLTLFEDREMIEERLKTYAHLFDDKVMKQLKRRRYTGWGRLSRKLINGIRDKQSGKTILDFLKSDGFANRNFMQLIHDDSLTFKEDIQKAQVSGQGDSLHEHIANLAGSPAIKKGILQTVKVVDELVKVMGRHKPENIVIEMARENQTTQKGQKNSRERMKRIEEGIKELGSQILKEHPVENTQLQNEKLYLYYLQNGRDMYVDQELDINRLSDYDVDHIVPQSFLKDDSIDNKVLTRSDKARGKSDNVPSEEVVKKMKNYWRQLLNAKLITQRKFDNLTKAERGGLSELDKAGFIKRQLVETRQITKHVAQILDSRMNTKYDENDKLIREVKVITLKSKLVSDFRKDFQFYKVREINNYHHAHDAYLNAVVGTALIKKYPKLESEFVYGDYKVYDVRKMIAKSEQEIGKATAKYFFYSNIMNFFKTEITLANGEIRKRPLIETNGETGEIVWDKGRDFATVRKVLSMPQVNIVKKTEVQTGGFSKESILPKRNSDKLIARKKDWDPKKYGGFDSPTVAYSVLVVAKVEKGKSKKLKSVKELLGITIMERSSFEKNPIDFLEAKGYKEVKKDLIIKLPKYSLFELENGRKRMLASAGELQKGNELALPSKYVNFLYLASHYEKLKGSPEDNEQKQLFVEQHKHYLDEIIEQISEFSKRVILADANLDKVLSAYNKHRDKPIREQAENIIHLFTLTNLGAPAAFKYFDTTIDRKRYTSTKEVLDATLIHQSITGLYETRIDLSQLGGDGGGGGPAPEAAAKGGMDPLQLLQPLEAEIKGTKLKAHWNSGATITCVPQAFLEEEVPIKNIWIKTIHGEKEQPVYYLTFKIQGRKVEAEVISSPYDYILVSPSDIPWLMKKPLQLTTLVPLQEYEERLLKQTMLTGSYKEKLQSLFLKYDALWQHWENQVGHRRIKPHHIATGTVNPRPQKQYPINPKAKASIQTVINDLLKQGVLIQQNSIMNTPVYPVPKPDGKWRMVLDYREVNKTIPLIAAQNQHSAGILSSIFRGKYKTTLDLSNGFWAHSITPESYWLTAFTWLGQQYCWTRLPQGFLNSPALFNADVVDLLKEVPNVQVYVDDIYISHDDPREHLEQLEKVFSLLLNAGYVVSLKKSEIAQHEVEFLGFNITKEGRGLTETFKQKLLNITPPRDLKQLQSILGKLNFARNFIPNFSELVKPLYNIIATAPGKYITWTTDNSQQLQNIISMLNSAENLEERNPEVRLIMKVNTSPSAGYIRFYNEFAKRPIMYLNYVYTKAEVKFTNTEKLLTTIHKGLIKALDLGMGQEILVYSPIVSMTKIQKTPLPERKALPIRWITWMSYLEDPRIQFHYDKTLPELQQVPTVTDDIIAKIKHPSEFSMVFYTDGSAIKHPNVNKSHNAGMGIAQVQFKPEFTVINTWSIPLGDHTAQLAEVAAVEFACKKALKIDGPVLIVTDSFYVAESVNKELPYWQSNGFFNNKKKPLKHVSKWKSIADCIQLKPDIIIIHEKGHQPTASTFHTEGNNLADKLATQGSYVVNAGKRTADGSEFEKRTADGSEFESPKKKAKVE

SEQ ID NO: 664 - protein, 2176 aa, synthetic construct
MPAAKRVKLDGGDKKYSIGLDIGTNSVGWAVITDEYKVPSKKFKVLGNTDRHSIKKNLIGALLFDSGETAEATRLKRTARRRYTRRKNRICYLQEIFSNEMAKVDDSFFHRLEESFLVEEDKKHERHPIFGNIVDEVAYHEKYPTIYHLRKKLVDSTDKADLRLIYLALAHMIKFRGHFLIEGDLNPDNSDVDKLFIQLVQTYNQLFEENPINASGVDAKAILSARLSKSRRLENLIAQLPGEKKNGLFGNLIALSLGLTPNFKSNFDLAEDAKLQLSKDTYDDDLDNLLAQIGDQYADLFLAAKNLSDAILLSDILRVNTEITKAPLSASMIKRYDEHHQDLTLLKALVRQQLPEKYKEIFFDQSKNGYAGYIDGGASQEEFYKFIKPILEKMDGTEELLVKLNREDLLRKQRTFDNGSIPHQIHLGELHAILRRQEDFYPFLKDNREKIEKILTFRIPYYVGPLARGNSRFAWMTRKSEETITPWNFEEVVDKGASAQSFIERMTNFDKNLPNEKVLPKHSLLYEYFTVYNELTKVKYVTEGMRKPAFLSGEQKKAIVDLLFKTNRKVTVKQLKEDYFKKIECFDSVEISGVEDRFNASLGTYHDLLKIIKDKDFLDNEENEDILEDIVLTLTLFEDREMIEERLKTYAHLFDDKVMKQLKRRRYTGWGRLSRKLINGIRDKQSGKTILDFLKSDGFANRNFMQLIHDDSLTFKEDIQKAQVSGQGDSLHEHIANLAGSPAIKKGILQTVKVVDELVKVMGRHKPENIVIEMARENQTTQKGQKNSRERMKRIEEGIKELGSQILKEHPVENTQLQNEKLYLYYLQNGRDMYVDQELDINRLSDYDVDHIVPQSFLKDDSIDNKVLTRSDKARGKSDNVPSEEVVKKMKNYWRQLLNAKLITQRKFDNLTKAERGGLSELDKAGFIKRQLVETRQITKHVAQILDSRMNTKYDENDKLIREVKVITLKSKLVSDFRKDFQFYKVREINNYHHAHDAYLNAVVGTALIKKYPKLESEFVYGDYKVYDVRKMIAKSEQEIGKATAKYFFYSNIMNFFKTEITLANGEIRKRPLIETNGETGEIVWDKGRDFATVRKVLSMPQVNIVKKTEVQTGGFSKESILPKRNSDKLIARKKDWDPKKYGGFDSPTVAYSVLVVAKVEKGKSKKLKSVKELLGITIMERSSFEKNPIDFLEAKGYKEVKKDLIIKLPKYSLFELENGRKRMLASAGELQKGNELALPSKYVNFLYLASHYEKLKGSPEDNEQKQLFVEQHKHYLDEIIEQISEFSKRVILADANLDKVLSAYNKHRDKPIREQAENIIHLFTLTNLGAPAAFKYFDTTIDRKRYTSTKEVLDATLIHQSITGLYETRIDLSQLGGDGGEAAAKPAPGGGGGMDPLQLLQPLEAEIKGTKLKAHWNSGATITCVPQAFLEEEVPIKNIWIKTIHGEKEQPVYYLTFKIQGRKVEAEVISSPYDYILVSPSDIPWLMKKPLQLTTLVPLQEYEERLLKQTMLTGSYKEKLQSLFLKYDALWQHWENQVGHRRIKPHHIATGTVNPRPQKQYPINPKAKASIQTVINDLLKQGVLIQQNSIMNTPVYPVPKPDGKWRMVLDYREVNKTIPLIAAQNQHSAGILSSIFRGKYKTTLDLSNGFWAHSITPESYWLTAFTWLGQQYCWTRLPQGFLNSPALFNADVVDLLKEVPNVQVYVDDIYISHDDPREHLEQLEKVFSLLLNAGYVVSLKKSEIAQHEVEFLGFNITKEGRGLTETFKQKLLNITPPRDLKQLQSILGKLNFARNFIPNFSELVKPLYNIIATAPGKYITWTTDNSQQLQNIISMLNSAENLEERNPEVRLIMKVNTSPSAGYIRFYNEFAKRPIMYLNYVYTKAEVKFTNTEKLLTTIHKGLIKALDLGMGQEILVYSPIVSMTKIQKTPLPERKALPIRWITWMSYLEDPRIQFHYDKTLPELQQVPTVTDDIIAKIKHPSEFSMVFYTDGSAIKHPNVNKSHNAGMGIAQVQFKPEFTVINTWSIPLGDHTAQLAEVAAVEFACKKALKIDGPVLIVTDSFYVAESVNKELPYWQSNGFFNNKKKPLKHVSKWKSIADCIQLKPDIIIIHEKGHQPTASTFHTEGNNLADKLATQGSYVVNAGKRTADGSEFEKRTADGSEFESPKKKAKVE

SEQ ID NO: 665 - protein, 2176 aa, synthetic construct
MPAAKRVKLDGGDKKYSIGLDIGTNSVGWAVITDEYKVPSKKFKVLGNTDRHSIKKNLIGALLFDSGETAEATRLKRTARRRYTRRKNRICYLQEIFSNEMAKVDDSFFHRLEESFLVEEDKKHERHPIFGNIVDEVAYHEKYPTIYHLRKKLVDSTDKADLRLIYLALAHMIKFRGHFLIEGDLNPDNSDVDKLFIQLVQTYNQLFEENPINASGVDAKAILSARLSKSRRLENLIAQLPGEKKNGLFGNLIALSLGLTPNFKSNFDLAEDAKLQLSKDTYDDDLDNLLAQIGDQYADLFLAAKNLSDAILLSDILRVNTEITKAPLSASMIKRYDEHHQDLTLLKALVRQQLPEKYKEIFFDQSKNGYAGYIDGGASQEEFYKFIKPILEKMDGTEELLVKLNREDLLRKQRTFDNGSIPHQIHLGELHAILRRQEDFYPFLKDNREKIEKILTFRIPYYVGPLARGNSRFAWMTRKSEETITPWNFEEVVDKGASAQSFIERMTNFDKNLPNEKVLPKHSLLYEYFTVYNELTKVKYVTEGMRKPAFLSGEQKKAIVDLLFKTNRKVTVKQLKEDYFKKIECFDSVEISGVEDRFNASLGTYHDLLKIIKDKDFLDNEENEDILEDIVLTLTLFEDREMIEERLKTYAHLFDDKVMKQLKRRRYTGWGRLSRKLINGIRDKQSGKTILDFLKSDGFANRNFMQLIHDDSLTFKEDIQKAQVSGQGDSLHEHIANLAGSPAIKKGILQTVKVVDELVKVMGRHKPENIVIEMARENQTTQKGQKNSRERMKRIEEGIKELGSQILKEHPVENTQLQNEKLYLYYLQNGRDMYVDQELDINRLSDYDVDHIVPQSFLKDDSIDNKVLTRSDKARGKSDNVPSEEVVKKMKNYWRQLLNAKLITQRKFDNLTKAERGGLSELDKAGFIKRQLVETRQITKHVAQILDSRMNTKYDENDKLIREVKVITLKSKLVSDFRKDFQFYKVREINNYHHAHDAYLNAVVGTALIKKYPKLESEFVYGDYKVYDVRKMIAKSEQEIGKATAKYFFYSNIMNFFKTEITLANGEIRKRPLIETNGETGEIVWDKGRDFATVRKVLSMPQVNIVKKTEVQTGGFSKESILPKRNSDKLIARKKDWDPKKYGGFDSPTVAYSVLVVAKVEKGKSKKLKSVKELLGITIMERSSFEKNPIDFLEAKGYKEVKKDLIIKLPKYSLFELENGRKRMLASAGELQKGNELALPSKYVNFLYLASHYEKLKGSPEDNEQKQLFVEQHKHYLDEIIEQISEFSKRVILADANLDKVLSAYNKHRDKPIREQAENIIHLFTLTNLGAPAAFKYFDTTIDRKRYTSTKEVLDATLIHQSITGLYETRIDLSQLGGDGGEAAAKGGSGSSGGMDPLQLLQPLEAEIKGTKLKAHWNSGATITCVPQAFLEEEVPIKNIWIKTIHGEKEQPVYYLTFKIQGRKVEAEVISSPYDYILVSPSDIPWLMKKPLQLTTLVPLQEYEERLLKQTMLTGSYKEKLQSLFLKYDALWQHWENQVGHRRIKPHHIATGTVNPRPQKQYPINPKAKASIQTVINDLLKQGVLIQQNSIMNTPVYPVPKPDGKWRMVLDYREVNKTIPLIAAQNQHSAGILSSIFRGKYKTTLDLSNGFWAHSITPESYWLTAFTWLGQQYCWTRLPQGFLNSPALFNADVVDLLKEVPNVQVYVDDIYISHDDPREHLEQLEKVFSLLLNAGYVVSLKKSEIAQHEVEFLGFNITKEGRGLTETFKQKLLNITPPRDLKQLQSILGKLNFARNFIPNFSELVKPLYNIIATAPGKYITWTTDNSQQLQNIISMLNSAENLEERNPEVRLIMKVNTSPSAGYIRFYNEFAKRPIMYLNYVYTKAEVKFTNTEKLLTTIHKGLIKALDLGMGQEILVYSPIVSMTKIQKTPLPERKALPIRWITWMSYLEDPRIQFHYDKTLPELQQVPTVTDDIIAKIKHPSEFSMVFYTDGSAIKHPNVNKSHNAGMGIAQVQFKPEFTVINTWSIPLGDHTAQLAEVAAVEFACKKALKIDGPVLIVTDSFYVAESVNKELPYWQSNGFFNNKKKPLKHVSKWKSIADCIQLKPDIIIIHEKGHQPTASTFHTEGNNLADKLATQGSYVVNAGKRTADGSEFEKRTADGSEFESPKKKAKVE

SEQ ID NO: 666 - protein, 2174 aa, synthetic construct
MPAAKRVKLDGGDKKYSIGLDIGTNSVGWAVITDEYKVPSKKFKVLGNTDRHSIKKNLIGALLFDSGETAEATRLKRTARRRYTRRKNRICYLQEIFSNEMAKVDDSFFHRLEESFLVEEDKKHERHPIFGNIVDEVAYHEKYPTIYHLRKKLVDSTDKADLRLIYLALAHMIKFRGHFLIEGDLNPDNSDVDKLFIQLVQTYNQLFEENPINASGVDAKAILSARLSKSRRLENLIAQLPGEKKNGLFGNLIALSLGLTPNFKSNFDLAEDAKLQLSKDTYDDDLDNLLAQIGDQYADLFLAAKNLSDAILLSDILRVNTEITKAPLSASMIKRYDEHHQDLTLLKALVRQQLPEKYKEIFFDQSKNGYAGYIDGGASQEEFYKFIKPILEKMDGTEELLVKLNREDLLRKQRTFDNGSIPHQIHLGELHAILRRQEDFYPFLKDNREKIEKILTFRIPYYVGPLARGNSRFAWMTRKSEETITPWNFEEVVDKGASAQSFIERMTNFDKNLPNEKVLPKHSLLYEYFTVYNELTKVKYVTEGMRKPAFLSGEQKKAIVDLLFKTNRKVTVKQLKEDYFKKIECFDSVEISGVEDRFNASLGTYHDLLKIIKDKDFLDNEENEDILEDIVLTLTLFEDREMIEERLKTYAHLFDDKVMKQLKRRRYTGWGRLSRKLINGIRDKQSGKTILDFLKSDGFANRNFMQLIHDDSLTFKEDIQKAQVSGQGDSLHEHIANLAGSPAIKKGILQTVKVVDELVKVMGRHKPENIVIEMARENQTTQKGQKNSRERMKRIEEGIKELGSQILKEHPVENTQLQNEKLYLYYLQNGRDMYVDQELDINRLSDYDVDHIVPQSFLKDDSIDNKVLTRSDKARGKSDNVPSEEVVKKMKNYWRQLLNAKLITQRKFDNLTKAERGGLSELDKAGFIKRQLVETRQITKHVAQILDSRMNTKYDENDKLIREVKVITLKSKLVSDFRKDFQFYKVREINNYHHAHDAYLNAVVGTALIKKYPKLESEFVYGDYKVYDVRKMIAKSEQEIGKATAKYFFYSNIMNFFKTEITLANGEIRKRPLIETNGETGEIVWDKGRDFATVRKVLSMPQVNIVKKTEVQTGGFSKESILPKRNSDKLIARKKDWDPKKYGGFDSPTVAYSVLVVAKVEKGKSKKLKSVKELLGITIMERSSFEKNPIDFLEAKGYKEVKKDLIIKLPKYSLFELENGRKRMLASAGELQKGNELALPSKYVNFLYLASHYEKLKGSPEDNEQKQLFVEQHKHYLDEIIEQISEFSKRVILADANLDKVLSAYNKHRDKPIREQAENIIHLFTLTNLGAPAAFKYFDTTIDRKRYTSTKEVLDATLIHQSITGLYETRIDLSQLGGDGGPAPAPAPAPGGMDPLQLLQPLEAEIKGTKLKAHWNSGATITCVPQAFLEEEVPIKNIWIKTIHGEKEQPVYYLTFKIQGRKVEAEVISSPYDYILVSPSDIPWLMKKPLQLTTLVPLQEYEERLLKQTMLTGSYKEKLQSLFLKYDALWQHWENQVGHRRIKPHHIATGTVNPRPQKQYPINPKAKASIQTVINDLLKQGVLIQQNSIMNTPVYPVPKPDGKWRMVLDYREVNKTIPLIAAQNQHSAGILSSIFRGKYKTTLDLSNGFWAHSITPESYWLTAFTWLGQQYCWTRLPQGFLNSPALFNADVVDLLKEVPNVQVYVDDIYISHDDPREHLEQLEKVFSLLLNAGYVVSLKKSEIAQHEVEFLGFNITKEGRGLTETFKQKLLNITPPRDLKQLQSILGKLNFARNFIPNFSELVKPLYNIIATAPGKYITWTTDNSQQLQNIISMLNSAENLEERNPEVRLIMKVNTSPSAGYIRFYNEFAKRPIMYLNYVYTKAEVKFTNTEKLLTTIHKGLIKALDLGMGQEILVYSPIVSMTKIQKTPLPERKALPIRWITWMSYLEDPRIQFHYDKTLPELQQVPTVTDDIIAKIKHPSEFSMVFYTDGSAIKHPNVNKSHNAGMGIAQVQFKPEFTVINTWSIPLGDHTAQLAEVAAVEFACKKALKIDGPVLIVTDSFYVAESVNKELPYWQSNGFFNNKKKPLKHVSKWKSIADCIQLKPDIIIIHEKGHQPTASTFHTEGNNLADKLATQGSYVVNAGKRTADGSEFEKRTADGSEFESPKKKAKVE

SEQ ID NO: 667 - protein, 2176 aa, synthetic construct
MPAAKRVKLDGGDKKYSIGLDIGTNSVGWAVITDEYKVPSKKFKVLGNTDRHSIKKNLIGALLFDSGETAEATRLKRTARRRYTRRKNRICYLQEIFSNEMAKVDDSFFHRLEESFLVEEDKKHERHPIFGNIVDEVAYHEKYPTIYHLRKKLVDSTDKADLRLIYLALAHMIKFRGHFLIEGDLNPDNSDVDKLFIQLVQTYNQLFEENPINASGVDAKAILSARLSKSRRLENLIAQLPGEKKNGLFGNLIALSLGLTPNFKSNFDLAEDAKLQLSKDTYDDDLDNLLAQIGDQYADLFLAAKNLSDAILLSDILRVNTEITKAPLSASMIKRYDEHHQDLTLLKALVRQQLPEKYKEIFFDQSKNGYAGYIDGGASQEEFYKFIKPILEKMDGTEELLVKLNREDLLRKQRTFDNGSIPHQIHLGELHAILRRQEDFYPFLKDNREKIEKILTFRIPYYVGPLARGNSRFAWMTRKSEETITPWNFEEVVDKGASAQSFIERMTNFDKNLPNEKVLPKHSLLYEYFTVYNELTKVKYVTEGMRKPAFLSGEQKKAIVDLLFKTNRKVTVKQLKEDYFKKIECFDSVEISGVEDRFNASLGTYHDLLKIIKDKDFLDNEENEDILEDIVLTLTLFEDREMIEERLKTYAHLFDDKVMKQLKRRRYTGWGRLSRKLINGIRDKQSGKTILDFLKSDGFANRNFMQLIHDDSLTFKEDIQKAQVSGQGDSLHEHIANLAGSPAIKKGILQTVKVVDELVKVMGRHKPENIVIEMARENQTTQKGQKNSRERMKRIEEGIKELGSQILKEHPVENTQLQNEKLYLYYLQNGRDMYVDQELDINRLSDYDVDHIVPQSFLKDDSIDNKVLTRSDKARGKSDNVPSEEVVKKMKNYWRQLLNAKLITQRKFDNLTKAERGGLSELDKAGFIKRQLVETRQITKHVAQILDSRMNTKYDENDKLIREVKVITLKSKLVSDFRKDFQFYKVREINNYHHAHDAYLNAVVGTALIKKYPKLESEFVYGDYKVYDVRKMIAKSEQEIGKATAKYFFYSNIMNFFKTEITLANGEIRKRPLIETNGETGEIVWDKGRDFATVRKVLSMPQVNIVKKTEVQTGGFSKESILPKRNSDKLIARKKDWDPKKYGGFDSPTVAYSVLVVAKVEKGKSKKLKSVKELLGITIMERSSFEKNPIDFLEAKGYKEVKKDLIIKLPKYSLFELENGRKRMLASAGELQKGNELALPSKYVNFLYLASHYEKLKGSPEDNEQKQLFVEQHKHYLDEIIEQISEFSKRVILADANLDKVLSAYNKHRDKPIREQAENIIHLFTLTNLGAPAAFKYFDTTIDRKRYTSTKEVLDATLIHQSITGLYETRIDLSQLGGDGGGSSGGGEAAAKGGMDPLQLLQPLEAEIKGTKLKAHWNSGATITCVPQAFLEEEVPIKNIWIKTIHGEKEQPVYYLTFKIQGRKVEAEVISSPYDYILVSPSDIPWLMKKPLQLTTLVPLQEYEERLLKQTMLTGSYKEKLQSLFLKYDALWQHWENQVGHRRIKPHHIATGTVNPRPQKQYPINPKAKASIQTVINDLLKQGVLIQQNSIMNTPVYPVPKPDGKWRMVLDYREVNKTIPLIAAQNQHSAGILSSIFRGKYKTTLDLSNGFWAHSITPESYWLTAFTWLGQQYCWTRLPQGFLNSPALFNADVVDLLKEVPNVQVYVDDIYISHDDPREHLEQLEKVFSLLLNAGYVVSLKKSEIAQHEVEFLGFNITKEGRGLTETFKQKLLNITPPRDLKQLQSILGKLNFARNFIPNFSELVKPLYNIIATAPGKYITWTTDNSQQLQNIISMLNSAENLEERNPEVRLIMKVNTSPSAGYIRFYNEFAKRPIMYLNYVYTKAEVKFTNTEKLLTTIHKGLIKALDLGMGQEILVYSPIVSMTKIQKTPLPERKALPIRWITWMSYLEDPRIQFHYDKTLPELQQVPTVTDDIIAKIKHPSEFSMVFYTDGSAIKHPNVNKSHNAGMGIAQVQFKPEFTVINTWSIPLGDHTAQLAEVAAVEFACKKALKIDGPVLIVTDSFYVAESVNKELPYWQSNGFFNNKKKPLKHVSKWKSIADCIQLKPDIIIIHEKGHQPTASTFHTEGNNLADKLATQGSYVVNAGKRTADGSEFEKRTADGSEFESPKKKAKVE

SEQ ID NO: 668 - protein, 2176 aa, synthetic construct
MPAAKRVKLDGGDKKYSIGLDIGTNSVGWAVITDEYKVPSKKFKVLGNTDRHSIKKNLIGALLFDSGETAEATRLKRTARRRYTRRKNRICYLQEIFSNEMAKVDDSFFHRLEESFLVEEDKKHERHPIFGNIVDEVAYHEKYPTIYHLRKKLVDSTDKADLRLIYLALAHMIKFRGHFLIEGDLNPDNSDVDKLFIQLVQTYNQLFEENPINASGVDAKAILSARLSKSRRLENLIAQLPGEKKNGLFGNLIALSLGLTPNFKSNFDLAEDAKLQLSKDTYDDDLDNLLAQIGDQYADLFLAAKNLSDAILLSDILRVNTEITKAPLSASMIKRYDEHHQDLTLLKALVRQQLPEKYKEIFFDQSKNGYAGYIDGGASQEEFYKFIKPILEKMDGTEELLVKLNREDLLRKQRTFDNGSIPHQIHLGELHAILRRQEDFYPFLKDNREKIEKILTFRIPYYVGPLARGNSRFAWMTRKSEETITPWNFEEVVDKGASAQSFIERMTNFDKNLPNEKVLPKHSLLYEYFTVYNELTKVKYVTEGMRKPAFLSGEQKKAIVDLLFKTNRKVTVKQLKEDYFKKIECFDSVEISGVEDRFNASLGTYHDLLKIIKDKDFLDNEENEDILEDIVLTLTLFEDREMIEERLKTYAHLFDDKVMKQLKRRRYTGWGRLSRKLINGIRDKQSGKTILDFLKSDGFANRNFMQLIHDDSLTFKEDIQKAQVSGQGDSLHEHIANLAGSPAIKKGILQTVKVVDELVKVMGRHKPENIVIEMARENQTTQKGQKNSRERMKRIEEGIKELGSQILKEHPVENTQLQNEKLYLYYLQNGRDMYVDQELDINRLSDYDVDHIVPQSFLKDDSIDNKVLTRSDKARGKSDNVPSEEVVKKMKNYWRQLLNAKLITQRKFDNLTKAERGGLSELDKAGFIKRQLVETRQITKHVAQILDSRMNTKYDENDKLIREVKVITLKSKLVSDFRKDFQFYKVREINNYHHAHDAYLNAVVGTALIKKYPKLESEFVYGDYKVYDVRKMIAKSEQEIGKATAKYFFYSNIMNFFKTEITLANGEIRKRPLIETNGETGEIVWDKGRDFATVRKVLSMPQVNIVKKTEVQTGGFSKESILPKRNSDKLIARKKDWDPKKYGGFDSPTVAYSVLVVAKVEKGKSKKLKSVKELLGITIMERSSFEKNPIDFLEAKGYKEVKKDLIIKLPKYSLFELENGRKRMLASAGELQKGNELALPSKYVNFLYLASHYEKLKGSPEDNEQKQLFVEQHKHYLDEIIEQISEFSKRVILADANLDKVLSAYNKHRDKPIREQAENIIHLFTLTNLGAPAAFKYFDTTIDRKRYTSTKEVLDATLIHQSITGLYETRIDLSQLGGDGGGGSEAAAKPAPGGMDPLQLLQPLEAEIKGTKLKAHWNSGATITCVPQAFLEEEVPIKNIWIKTIHGEKEQPVYYLTFKIQGRKVEAEVISSPYDYILVSPSDIPWLMKKPLQLTTLVPLQEYEERLLKQTMLTGSYKEKLQSLFLKYDALWQHWENQVGHRRIKPHHIATGTVNPRPQKQYPINPKAKASIQTVINDLLKQGVLIQQNSIMNTPVYPVPKPDGKWRMVLDYREVNKTIPLIAAQNQHSAGILSSIFRGKYKTTLDLSNGFWAHSITPESYWLTAFTWLGQQYCWTRLPQGFLNSPALFNADVVDLLKEVPNVQVYVDDIYISHDDPREHLEQLEKVFSLLLNAGYVVSLKKSEIAQHEVEFLGFNITKEGRGLTETFKQKLLNITPPRDLKQLQSILGKLNFARNFIPNFSELVKPLYNIIATAPGKYITWTTDNSQQLQNIISMLNSAENLEERNPEVRLIMKVNTSPSAGYIRFYNEFAKRPIMYLNYVYTKAEVKFTNTEKLLTTIHKGLIKALDLGMGQEILVYSPIVSMTKIQKTPLPERKALPIRWITWMSYLEDPRIQFHYDKTLPELQQVPTVTDDIIAKIKHPSEFSMVFYTDGSAIKHPNVNKSHNAGMGIAQVQFKPEFTVINTWSIPLGDHTAQLAEVAAVEFACKKALKIDGPVLIVTDSFYVAESVNKELPYWQSNGFFNNKKKPLKHVSKWKSIADCIQLKPDIIIIHEKGHQPTASTFHTEGNNLADKLATQGSYVVNAGKRTADGSEFEKRTADGSEFESPKKKAKVE

SEQ ID NO: 669 - protein, 2174 aa, synthetic construct
MPAAKRVKLDGGDKKYSIGLDIGTNSVGWAVITDEYKVPSKKFKVLGNTDRHSIKKNLIGALLFDSGETAEATRLKRTARRRYTRRKNRICYLQEIFSNEMAKVDDSFFHRLEESFLVEEDKKHERHPIFGNIVDEVAYHEKYPTIYHLRKKLVDSTDKADLRLIYLALAHMIKFRGHFLIEGDLNPDNSDVDKLFIQLVQTYNQLFEENPINASGVDAKAILSARLSKSRRLENLIAQLPGEKKNGLFGNLIALSLGLTPNFKSNFDLAEDAKLQLSKDTYDDDLDNLLAQIGDQYADLFLAAKNLSDAILLSDILRVNTEITKAPLSASMIKRYDEHHQDLTLLKALVRQQLPEKYKEIFFDQSKNGYAGYIDGGASQEEFYKFIKPILEKMDGTEELLVKLNREDLLRKQRTFDNGSIPHQIHLGELHAILRRQEDFYPFLKDNREKIEKILTFRIPYYVGPLARGNSRFAWMTRKSEETITPWNFEEVVDKGASAQSFIERMTNFDKNLPNEKVLPKHSLLYEYFTVYNELTKVKYVTEGMRKPAFLSGEQKKAIVDLLFKTNRKVTVKQLKEDYFKKIECFDSVEISGVEDRFNASLGTYHDLLKIIKDKDFLDNEENEDILEDIVLTLTLFEDREMIEERLKTYAHLFDDKVMKQLKRRRYTGWGRLSRKLINGIRDKQSGKTILDFLKSDGFANRNFMQLIHDDSLTFKEDIQKAQVSGQGDSLHEHIANLAGSPAIKKGILQTVKVVDELVKVMGRHKPENIVIEMARENQTTQKGQKNSRERMKRIEEGIKELGSQILKEHPVENTQLQNEKLYLYYLQNGRDMYVDQELDINRLSDYDVDHIVPQSFLKDDSIDNKVLTRSDKARGKSDNVPSEEVVKKMKNYWRQLLNAKLITQRKFDNLTKAERGGLSELDKAGFIKRQLVETRQITKHVAQILDSRMNTKYDENDKLIREVKVITLKSKLVSDFRKDFQFYKVREINNYHHAHDAYLNAVVGTALIKKYPKLESEFVYGDYKVYDVRKMIAKSEQEIGKATAKYFFYSNIMNFFKTEITLANGEIRKRPLIETNGETGEIVWDKGRDFATVRKVLSMPQVNIVKKTEVQTGGFSKESILPKRNSDKLIARKKDWDPKKYGGFDSPTVAYSVLVVAKVEKGKSKKLKSVKELLGITIMERSSFEKNPIDFLEAKGYKEVKKDLIIKLPKYSLFELENGRKRMLASAGELQKGNELALPSKYVNFLYLASHYEKLKGSPEDNEQKQLFVEQHKHYLDEIIEQISEFSKRVILADANLDKVLSAYNKHRDKPIREQAENIIHLFTLTNLGAPAAFKYFDTTIDRKRYTSTKEVLDATLIHQSITGLYETRIDLSQLGGDGGGGGGSSPAPGGMDPLQLLQPLEAEIKGTKLKAHWNSGATITCVPQAFLEEEVPIKNIWIKTIHGEKEQPVYYLTFKIQGRKVEAEVISSPYDYILVSPSDIPWLMKKPLQLTTLVPLQEYEERLLKQTMLTGSYKEKLQSLFLKYDALWQHWENQVGHRRIKPHHIATGTVNPRPQKQYPINPKAKASIQTVINDLLKQGVLIQQNSIMNTPVYPVPKPDGKWRMVLDYREVNKTIPLIAAQNQHSAGILSSIFRGKYKTTLDLSNGFWAHSITPESYWLTAFTWLGQQYCWTRLPQGFLNSPALFNADVVDLLKEVPNVQVYVDDIYISHDDPREHLEQLEKVFSLLLNAGYVVSLKKSEIAQHEVEFLGFNITKEGRGLTETFKQKLLNITPPRDLKQLQSILGKLNFARNFIPNFSELVKPLYNIIATAPGKYITWTTDNSQQLQNIISMLNSAENLEERNPEVRLIMKVNTSPSAGYIRFYNEFAKRPIMYLNYVYTKAEVKFTNTEKLLTTIHKGLIKALDLGMGQEILVYSPIVSMTKIQKTPLPERKALPIRWITWMSYLEDPRIQFHYDKTLPELQQVPTVTDDIIAKIKHPSEFSMVFYTDGSAIKHPNVNKSHNAGMGIAQVQFKPEFTVINTWSIPLGDHTAQLAEVAAVEFACKKALKIDGPVLIVTDSFYVAESVNKELPYWQSNGFFNNKKKPLKHVSKWKSIADCIQLKPDIIIIHEKGHQPTASTFHTEGNNLADKLATQGSYVVNAGKRTADGSEFEKRTADGSEFESPKKKAKVE

SEQ ID NO: 670 - protein, 2176 aa, synthetic construct
MPAAKRVKLDGGDKKYSIGLDIGTNSVGWAVITDEYKVPSKKFKVLGNTDRHSIKKNLIGALLFDSGETAEATRLKRTARRRYTRRKNRICYLQEIFSNEMAKVDDSFFHRLEESFLVEEDKKHERHPIFGNIVDEVAYHEKYPTIYHLRKKLVDSTDKADLRLIYLALAHMIKFRGHFLIEGDLNPDNSDVDKLFIQLVQTYNQLFEENPINASGVDAKAILSARLSKSRRLENLIAQLPGEKKNGLFGNLIALSLGLTPNFKSNFDLAEDAKLQLSKDTYDDDLDNLLAQIGDQYADLFLAAKNLSDAILLSDILRVNTEITKAPLSASMIKRYDEHHQDLTLLKALVRQQLPEKYKEIFFDQSKNGYAGYIDGGASQEEFYKFIKPILEKMDGTEELLVKLNREDLLRKQRTFDNGSIPHQIHLGELHAILRRQEDFYPFLKDNREKIEKILTFRIPYYVGPLARGNSRFAWMTRKSEETITPWNFEEVVDKGASAQSFIERMTNFDKNLPNEKVLPKHSLLYEYFTVYNELTKVKYVTEGMRKPAFLSGEQKKAIVDLLFKTNRKVTVKQLKEDYFKKIECFDSVEISGVEDRFNASLGTYHDLLKIIKDKDFLDNEENEDILEDIVLTLTLFEDREMIEERLKTYAHLFDDKVMKQLKRRRYTGWGRLSRKLINGIRDKQSGKTILDFLKSDGFANRNFMQLIHDDSLTFKEDIQKAQVSGQGDSLHEHIANLAGSPAIKKGILQTVKVVDELVKVMGRHKPENIVIEMARENQTTQKGQKNSRERMKRIEEGIKELGSQILKEHPVENTQLQNEKLYLYYLQNGRDMYVDQELDINRLSDYDVDHIVPQSFLKDDSIDNKVLTRSDKARGKSDNVPSEEVVKKMKNYWRQLLNAKLITQRKFDNLTKAERGGLSELDKAGFIKRQLVETRQITKHVAQILDSRMNTKYDENDKLIREVKVITLKSKLVSDFRKDFQFYKVREINNYHHAHDAYLNAVVGTALIKKYPKLESEFVYGDYKVYDVRKMIAKSEQEIGKATAKYFFYSNIMNFFKTEITLANGEIRKRPLIETNGETGEIVWDKGRDFATVRKVLSMPQVNIVKKTEVQTGGFSKESILPKRNSDKLIARKKDWDPKKYGGFDSPTVAYSVLVVAKVEKGKSKKLKSVKELLGITIMERSSFEKNPIDFLEAKGYKEVKKDLIIKLPKYSLFELENGRKRMLASAGELQKGNELALPSKYVNFLYLASHYEKLKGSPEDNEQKQLFVEQHKHYLDEIIEQISEFSKRVILADANLDKVLSAYNKHRDKPIREQAENIIHLFTLTNLGAPAAFKYFDTTIDRKRYTSTKEVLDATLIHQSITGLYETRIDLSQLGGDGGGSSGGSEAAAKGGMDPLQLLQPLEAEIKGTKLKAHWNSGATITCVPQAFLEEEVPIKNIWIKTIHGEKEQPVYYLTFKIQGRKVEAEVISSPYDYILVSPSDIPWLMKKPLQLTTLVPLQEYEERLLKQTMLTGSYKEKLQSLFLKYDALWQHWENQVGHRRIKPHHIATGTVNPRPQKQYPINPKAKASIQTVINDLLKQGVLIQQNSIMNTPVYPVPKPDGKWRMVLDYREVNKTIPLIAAQNQHSAGILSSIFRGKYKTTLDLSNGFWAHSITPESYWLTAFTWLGQQYCWTRLPQGFLNSPALFNADVVDLLKEVPNVQVYVDDIYISHDDPREHLEQLEKVFSLLLNAGYVVSLKKSEIAQHEVEFLGFNITKEGRGLTETFKQKLLNITPPRDLKQLQSILGKLNFARNFIPNFSELVKPLYNIIATAPGKYITWTTDNSQQLQNIISMLNSAENLEERNPEVRLIMKVNTSPSAGYIRFYNEFAKRPIMYLNYVYTKAEVKFTNTEKLLTTIHKGLIKALDLGMGQEILVYSPIVSMTKIQKTPLPERKALPIRWITWMSYLEDPRIQFHYDKTLPELQQVPTVTDDIIAKIKHPSEFSMVFYTDGSAIKHPNVNKSHNAGMGIAQVQFKPEFTVINTWSIPLGDHTAQLAEVAAVEFACKKALKIDGPVLIVTDSFYVAESVNKELPYWQSNGFFNNKKKPLKHVSKWKSIADCIQLKPDIIIIHEKGHQPTASTFHTEGNNLADKLATQGSYVVNAGKRTADGSEFEKRTADGSEFESPKKKAKVE

SEQ ID NO: 671 - protein, 2176 aa, synthetic construct
MPAAKRVKLDGGDKKYSIGLDIGTNSVGWAVITDEYKVPSKKFKVLGNTDRHSIKKNLIGALLFDSGETAEATRLKRTARRRYTRRKNRICYLQEIFSNEMAKVDDSFFHRLEESFLVEEDKKHERHPIFGNIVDEVAYHEKYPTIYHLRKKLVDSTDKADLRLIYLALAHMIKFRGHFLIEGDLNPDNSDVDKLFIQLVQTYNQLFEENPINASGVDAKAILSARLSKSRRLENLIAQLPGEKKNGLFGNLIALSLGLTPNFKSNFDLAEDAKLQLSKDTYDDDLDNLLAQIGDQYADLFLAAKNLSDAILLSDILRVNTEITKAPLSASMIKRYDEHHQDLTLLKALVRQQLPEKYKEIFFDQSKNGYAGYIDGGASQEEFYKFIKPILEKMDGTEELLVKLNREDLLRKQRTFDNGSIPHQIHLGELHAILRRQEDFYPFLKDNREKIEKILTFRIPYYVGPLARGNSRFAWMTRKSEETITPWNFEEVVDKGASAQSFIERMTNFDKNLPNEKVLPKHSLLYEYFTVYNELTKVKYVTEGMRKPAFLSGEQKKAIVDLLFKTNRKVTVKQLKEDYFKKIECFDSVEISGVEDRFNASLGTYHDLLKIIKDKDFLDNEENEDILEDIVLTLTLFEDREMIEERLKTYAHLFDDKVMKQLKRRRYTGWGRLSRKLINGIRDKQSGKTILDFLKSDGFANRNFMQLIHDDSLTFKEDIQKAQVSGQGDSLHEHIANLAGSPAIKKGILQTVKVVDELVKVMGRHKPENIVIEMARENQTTQKGQKNSRERMKRIEEGIKELGSQILKEHPVENTQLQNEKLYLYYLQNGRDMYVDQELDINRLSDYDVDHIVPQSFLKDDSIDNKVLTRSDKARGKSDNVPSEEVVKKMKNYWRQLLNAKLITQRKFDNLTKAERGGLSELDKAGFIKRQLVETRQITKHVAQILDSRMNTKYDENDKLIREVKVITLKSKLVSDFRKDFQFYKVREINNYHHAHDAYLNAVVGTALIKKYPKLESEFVYGDYKVYDVRKMIAKSEQEIGKATAKYFFYSNIMNFFKTEITLANGEIRKRPLIETNGETGEIVWDKGRDFATVRKVLSMPQVNIVKKTEVQTGGFSKESILPKRNSDKLIARKKDWDPKKYGGFDSPTVAYSVLVVAKVEKGKSKKLKSVKELLGITIMERSSFEKNPIDFLEAKGYKEVKKDLIIKLPKYSLFELENGRKRMLASAGELQKGNELALPSKYVNFLYLASHYEKLKGSPEDNEQKQLFVEQHKHYLDEIIEQISEFSKRVILADANLDKVLSAYNKHRDKPIREQAENIIHLFTLTNLGAPAAFKYFDTTIDRKRYTSTKEVLDATLIHQSITGLYETRIDLSQLGGDGGEAAAKGSSGGGGGMDPLQLLQPLEAEIKGTKLKAHWNSGATITCVPQAFLEEEVPIKNIWIKTIHGEKEQPVYYLTFKIQGRKVEAEVISSPYDYILVSPSDIPWLMKKPLQLTTLVPLQEYEERLLKQTMLTGSYKEKLQSLFLKYDALWQHWENQVGHRRIKPHHIATGTVNPRPQKQYPINPKAKASIQTVINDLLKQGVLIQQNSIMNTPVYPVPKPDGKWRMVLDYREVNKTIPLIAAQNQHSAGILSSIFRGKYKTTLDLSNGFWAHSITPESYWLTAFTWLGQQYCWTRLPQGFLNSPALFNADVVDLLKEVPNVQVYVDDIYISHDDPREHLEQLEKVFSLLLNAGYVVSLKKSEIAQHEVEFLGFNITKEGRGLTETFKQKLLNITPPRDLKQLQSILGKLNFARNFIPNFSELVKPLYNIIATAPGKYITWTTDNSQQLQNIISMLNSAENLEERNPEVRLIMKVNTSPSAGYIRFYNEFAKRPIMYLNYVYTKAEVKFTNTEKLLTTIHKGLIKALDLGMGQEILVYSPIVSMTKIQKTPLPERKALPIRWITWMSYLEDPRIQFHYDKTLPELQQVPTVTDDIIAKIKHPSEFSMVFYTDGSAIKHPNVNKSHNAGMGIAQVQFKPEFTVINTWSIPLGDHTAQLAEVAAVEFACKKALKIDGPVLIVTDSFYVAESVNKELPYWQSNGFFNNKKKPLKHVSKWKSIADCIQLKPDIIIIHEKGHQPTASTFHTEGNNLADKLATQGSYVVNAGKRTADGSEFEKRTADGSEFESPKKKAKVE

SEQ ID NO: 672 - protein, 2171 aa, synthetic construct
MPAAKRVKLDGGDKKYSIGLDIGTNSVGWAVITDEYKVPSKKFKVLGNTDRHSIKKNLIGALLFDSGETAEATRLKRTARRRYTRRKNRICYLQEIFSNEMAKVDDSFFHRLEESFLVEEDKKHERHPIFGNIVDEVAYHEKYPTIYHLRKKLVDSTDKADLRLIYLALAHMIKFRGHFLIEGDLNPDNSDVDKLFIQLVQTYNQLFEENPINASGVDAKAILSARLSKSRRLENLIAQLPGEKKNGLFGNLIALSLGLTPNFKSNFDLAEDAKLQLSKDTYDDDLDNLLAQIGDQYADLFLAAKNLSDAILLSDILRVNTEITKAPLSASMIKRYDEHHQDLTLLKALVRQQLPEKYKEIFFDQSKNGYAGYIDGGASQEEFYKFIKPILEKMDGTEELLVKLNREDLLRKQRTFDNGSIPHQIHLGELHAILRRQEDFYPFLKDNREKIEKILTFRIPYYVGPLARGNSRFAWMTRKSEETITPWNFEEVVDKGASAQSFIERMTNFDKNLPNEKVLPKHSLLYEYFTVYNELTKVKYVTEGMRKPAFLSGEQKKAIVDLLFKTNRKVTVKQLKEDYFKKIECFDSVEISGVEDRFNASLGTYHDLLKIIKDKDFLDNEENEDILEDIVLTLTLFEDREMIEERLKTYAHLFDDKVMKQLKRRRYTGWGRLSRKLINGIRDKQSGKTILDFLKSDGFANRNFMQLIHDDSLTFKEDIQKAQVSGQGDSLHEHIANLAGSPAIKKGILQTVKVVDELVKVMGRHKPENIVIEMARENQTTQKGQKNSRERMKRIEEGIKELGSQILKEHPVENTQLQNEKLYLYYLQNGRDMYVDQELDINRLSDYDVDHIVPQSFLKDDSIDNKVLTRSDKARGKSDNVPSEEVVKKMKNYWRQLLNAKLITQRKFDNLTKAERGGLSELDKAGFIKRQLVETRQITKHVAQILDSRMNTKYDENDKLIREVKVITLKSKLVSDFRKDFQFYKVREINNYHHAHDAYLNAVVGTALIKKYPKLESEFVYGDYKVYDVRKMIAKSEQEIGKATAKYFFYSNIMNFFKTEITLANGEIRKRPLIETNGETGEIVWDKGRDFATVRKVLSMPQVNIVKKTEVQTGGFSKESILPKRNSDKLIARKKDWDPKKYGGFDSPTVAYSVLVVAKVEKGKSKKLKSVKELLGITIMERSSFEKNPIDFLEAKGYKEVKKDLIIKLPKYSLFELENGRKRMLASAGELQKGNELALPSKYVNFLYLASHYEKLKGSPEDNEQKQLFVEQHKHYLDEIIEQISEFSKRVILADANLDKVLSAYNKHRDKPIREQAENIIHLFTLTNLGAPAAFKYFDTTIDRKRYTSTKEVLDATLIHQSITGLYETRIDLSQLGGDGGGGSPAPGGMDPLQLLQPLEAEIKGTKLKAHWNSGATITCVPQAFLEEEVPIKNIWIKTIHGEKEQPVYYLTFKIQGRKVEAEVISSPYDYILVSPSDIPWLMKKPLQLTTLVPLQEYEERLLKQTMLTGSYKEKLQSLFLKYDALWQHWENQVGHRRIKPHHIATGTVNPRPQKQYPINPKAKASIQTVINDLLKQGVLIQQNSIMNTPVYPVPKPDGKWRMVLDYREVNKTIPLIAAQNQHSAGILSSIFRGKYKTTLDLSNGFWAHSITPESYWLTAFTWLGQQYCWTRLPQGFLNSPALFNADVVDLLKEVPNVQVYVDDIYISHDDPREHLEQLEKVFSLLLNAGYVVSLKKSEIAQHEVEFLGFNITKEGRGLTETFKQKLLNITPPRDLKQLQSILGKLNFARNFIPNFSELVKPLYNIIATAPGKYITWTTDNSQQLQNIISMLNSAENLEERNPEVRLIMKVNTSPSAGYIRFYNEFAKRPIMYLNYVYTKAEVKFTNTEKLLTTIHKGLIKALDLGMGQEILVYSPIVSMTKIQKTPLPERKALPIRWITWMSYLEDPRIQFHYDKTLPELQQVPTVTDDIIAKIKHPSEFSMVFYTDGSAIKHPNVNKSHNAGMGIAQVQFKPEFTVINTWSIPLGDHTAQLAEVAAVEFACKKALKIDGPVLIVTDSFYVAESVNKELPYWQSNGFFNNKKKPLKHVSKWKSIADCIQLKPDIIIIHEKGHQPTASTFHTEGNNLADKLATQGSYVVNAGKRTADGSEFEKRTADGSEFESPKKKAKVE

SEQ ID NO: 673 - protein, 2185 aa, synthetic construct
MPAAKRVKLDGGDKKYSIGLDIGTNSVGWAVITDEYKVPSKKFKVLGNTDRHSIKKNLIGALLFDSGETAEATRLKRTARRRYTRRKNRICYLQEIFSNEMAKVDDSFFHRLEESFLVEEDKKHERHPIFGNIVDEVAYHEKYPTIYHLRKKLVDSTDKADLRLIYLALAHMIKFRGHFLIEGDLNPDNSDVDKLFIQLVQTYNQLFEENPINASGVDAKAILSARLSKSRRLENLIAQLPGEKKNGLFGNLIALSLGLTPNFKSNFDLAEDAKLQLSKDTYDDDLDNLLAQIGDQYADLFLAAKNLSDAILLSDILRVNTEITKAPLSASMIKRYDEHHQDLTLLKALVRQQLPEKYKEIFFDQSKNGYAGYIDGGASQEEFYKFIKPILEKMDGTEELLVKLNREDLLRKQRTFDNGSIPHQIHLGELHAILRRQEDFYPFLKDNREKIEKILTFRIPYYVGPLARGNSRFAWMTRKSEETITPWNFEEVVDKGASAQSFIERMTNFDKNLPNEKVLPKHSLLYEYFTVYNELTKVKYVTEGMRKPAFLSGEQKKAIVDLLFKTNRKVTVKQLKEDYFKKIECFDSVEISGVEDRFNASLGTYHDLLKIIKDKDFLDNEENEDILEDIVLTLTLFEDREMIEERLKTYAHLFDDKVMKQLKRRRYTGWGRLSRKLINGIRDKQSGKTILDFLKSDGFANRNFMQLIHDDSLTFKEDIQKAQVSGQGDSLHEHIANLAGSPAIKKGILQTVKVVDELVKVMGRHKPENIVIEMARENQTTQKGQKNSRERMKRIEEGIKELGSQILKEHPVENTQLQNEKLYLYYLQNGRDMYVDQELDINRLSDYDVDHIVPQSFLKDDSIDNKVLTRSDKARGKSDNVPSEEVVKKMKNYWRQLLNAKLITQRKFDNLTKAERGGLSELDKAGFIKRQLVETRQITKHVAQILDSRMNTKYDENDKLIREVKVITLKSKLVSDFRKDFQFYKVREINNYHHAHDAYLNAVVGTALIKKYPKLESEFVYGDYKVYDVRKMIAKSEQEIGKATAKYFFYSNIMNFFKTEITLANGEIRKRPLIETNGETGEIVWDKGRDFATVRKVLSMPQVNIVKKTEVQTGGFSKESILPKRNSDKLIARKKDWDPKKYGGFDSPTVAYSVLVVAKVEKGKSKKLKSVKELLGITIMERSSFEKNPIDFLEAKGYKEVKKDLIIKLPKYSLFELENGRKRMLASAGELQKGNELALPSKYVNFLYLASHYEKLKGSPEDNEQKQLFVEQHKHYLDEIIEQISEFSKRVILADANLDKVLSAYNKHRDKPIREQAENIIHLFTLTNLGAPAAFKYFDTTIDRKRYTSTKEVLDATLIHQSITGLYETRIDLSQLGGDGGGGGGSGGGGSGGGGSGGGGSGGMDPLQLLQPLEAEIKGTKLKAHWNSGATITCVPQAFLEEEVPIKNIWIKTIHGEKEQPVYYLTFKIQGRKVEAEVISSPYDYILVSPSDIPWLMKKPLQLTTLVPLQEYEERLLKQTMLTGSYKEKLQSLFLKYDALWQHWENQVGHRRIKPHHIATGTVNPRPQKQYPINPKAKASIQTVINDLLKQGVLIQQNSIMNTPVYPVPKPDGKWRMVLDYREVNKTIPLIAAQNQHSAGILSSIFRGKYKTTLDLSNGFWAHSITPESYWLTAFTWLGQQYCWTRLPQGFLNSPALFNADVVDLLKEVPNVQVYVDDIYISHDDPREHLEQLEKVFSLLLNAGYVVSLKKSEIAQHEVEFLGFNITKEGRGLTETFKQKLLNITPPRDLKQLQSILGKLNFARNFIPNFSELVKPLYNIIATAPGKYITWTTDNSQQLQNIISMLNSAENLEERNPEVRLIMKVNTSPSAGYIRFYNEFAKRPIMYLNYVYTKAEVKFTNTEKLLTTIHKGLIKALDLGMGQEILVYSPIVSMTKIQKTPLPERKALPIRWITWMSYLEDPRIQFHYDKTLPELQQVPTVTDDIIAKIKHPSEFSMVFYTDGSAIKHPNVNKSHNAGMGIAQVQFKPEFTVINTWSIPLGDHTAQLAEVAAVEFACKKALKIDGPVLIVTDSFYVAESVNKELPYWQSNGFFNNKKKPLKHVSKWKSIADCIQLKPDIIIIHEKGHQPTASTFHTEGNNLADKLATQGSYVVNAGKRTADGSEFEKRTADGSEFESPKKKAKVE

SEQ ID NO: 674 - protein, 2176 aa, synthetic construct
MPAAKRVKLDGGDKKYSIGLDIGTNSVGWAVITDEYKVPSKKFKVLGNTDRHSIKKNLIGALLFDSGETAEATRLKRTARRRYTRRKNRICYLQEIFSNEMAKVDDSFFHRLEESFLVEEDKKHERHPIFGNIVDEVAYHEKYPTIYHLRKKLVDSTDKADLRLIYLALAHMIKFRGHFLIEGDLNPDNSDVDKLFIQLVQTYNQLFEENPINASGVDAKAILSARLSKSRRLENLIAQLPGEKKNGLFGNLIALSLGLTPNFKSNFDLAEDAKLQLSKDTYDDDLDNLLAQIGDQYADLFLAAKNLSDAILLSDILRVNTEITKAPLSASMIKRYDEHHQDLTLLKALVRQQLPEKYKEIFFDQSKNGYAGYIDGGASQEEFYKFIKPILEKMDGTEELLVKLNREDLLRKQRTFDNGSIPHQIHLGELHAILRRQEDFYPFLKDNREKIEKILTFRIPYYVGPLARGNSRFAWMTRKSEETITPWNFEEVVDKGASAQSFIERMTNFDKNLPNEKVLPKHSLLYEYFTVYNELTKVKYVTEGMRKPAFLSGEQKKAIVDLLFKTNRKVTVKQLKEDYFKKIECFDSVEISGVEDRFNASLGTYHDLLKIIKDKDFLDNEENEDILEDIVLTLTLFEDREMIEERLKTYAHLFDDKVMKQLKRRRYTGWGRLSRKLINGIRDKQSGKTILDFLKSDGFANRNFMQLIHDDSLTFKEDIQKAQVSGQGDSLHEHIANLAGSPAIKKGILQTVKVVDELVKVMGRHKPENIVIEMARENQTTQKGQKNSRERMKRIEEGIKELGSQILKEHPVENTQLQNEKLYLYYLQNGRDMYVDQELDINRLSDYDVDHIVPQSFLKDDSIDNKVLTRSDKARGKSDNVPSEEVVKKMKNYWRQLLNAKLITQRKFDNLTKAERGGLSELDKAGFIKRQLVETRQITKHVAQILDSRMNTKYDENDKLIREVKVITLKSKLVSDFRKDFQFYKVREINNYHHAHDAYLNAVVGTALIKKYPKLESEFVYGDYKVYDVRKMIAKSEQEIGKATAKYFFYSNIMNFFKTEITLANGEIRKRPLIETNGETGEIVWDKGRDFATVRKVLSMPQVNIVKKTEVQTGGFSKESILPKRNSDKLIARKKDWDPKKYGGFDSPTVAYSVLVVAKVEKGKSKKLKSVKELLGITIMERSSFEKNPIDFLEAKGYKEVKKDLIIKLPKYSLFELENGRKRMLASAGELQKGNELALPSKYVNFLYLASHYEKLKGSPEDNEQKQLFVEQHKHYLDEIIEQISEFSKRVILADANLDKVLSAYNKHRDKPIREQAENIIHLFTLTNLGAPAAFKYFDTTIDRKRYTSTKEVLDATLIHQSITGLYETRIDLSQLGGDGGGSSEAAAKGGGGGMDPLQLLQPLEAEIKGTKLKAHWNSGATITCVPQAFLEEEVPIKNIWIKTIHGEKEQPVYYLTFKIQGRKVEAEVISSPYDYILVSPSDIPWLMKKPLQLTTLVPLQEYEERLLKQTMLTGSYKEKLQSLFLKYDALWQHWENQVGHRRIKPHHIATGTVNPRPQKQYPINPKAKASIQTVINDLLKQGVLIQQNSIMNTPVYPVPKPDGKWRMVLDYREVNKTIPLIAAQNQHSAGILSSIFRGKYKTTLDLSNGFWAHSITPESYWLTAFTWLGQQYCWTRLPQGFLNSPALFNADVVDLLKEVPNVQVYVDDIYISHDDPREHLEQLEKVFSLLLNAGYVVSLKKSEIAQHEVEFLGFNITKEGRGLTETFKQKLLNITPPRDLKQLQSILGKLNFARNFIPNFSELVKPLYNIIATAPGKYITWTTDNSQQLQNIISMLNSAENLEERNPEVRLIMKVNTSPSAGYIRFYNEFAKRPIMYLNYVYTKAEVKFTNTEKLLTTIHKGLIKALDLGMGQEILVYSPIVSMTKIQKTPLPERKALPIRWITWMSYLEDPRIQFHYDKTLPELQQVPTVTDDIIAKIKHPSEFSMVFYTDGSAIKHPNVNKSHNAGMGIAQVQFKPEFTVINTWSIPLGDHTAQLAEVAAVEFACKKALKIDGPVLIVTDSFYVAESVNKELPYWQSNGFFNNKKKPLKHVSKWKSIADCIQLKPDIIIIHEKGHQPTASTFHTEGNNLADKLATQGSYVVNAGKRTADGSEFEKRTADGSEFESPKKKAKVE

SEQ ID NO: 675 - protein, 2176 aa, synthetic construct
MPAAKRVKLDGGDKKYSIGLDIGTNSVGWAVITDEYKVPSKKFKVLGNTDRHSIKKNLIGALLFDSGETAEATRLKRTARRRYTRRKNRICYLQEIFSNEMAKVDDSFFHRLEESFLVEEDKKHERHPIFGNIVDEVAYHEKYPTIYHLRKKLVDSTDKADLRLIYLALAHMIKFRGHFLIEGDLNPDNSDVDKLFIQLVQTYNQLFEENPINASGVDAKAILSARLSKSRRLENLIAQLPGEKKNGLFGNLIALSLGLTPNFKSNFDLAEDAKLQLSKDTYDDDLDNLLAQIGDQYADLFLAAKNLSDAILLSDILRVNTEITKAPLSASMIKRYDEHHQDLTLLKALVRQQLPEKYKEIFFDQSKNGYAGYIDGGASQEEFYKFIKPILEKMDGTEELLVKLNREDLLRKQRTFDNGSIPHQIHLGELHAILRRQEDFYPFLKDNREKIEKILTFRIPYYVGPLARGNSRFAWMTRKSEETITPWNFEEVVDKGASAQSFIERMTNFDKNLPNEKVLPKHSLLYEYFTVYNELTKVKYVTEGMRKPAFLSGEQKKAIVDLLFKTNRKVTVKQLKEDYFKKIECFDSVEISGVEDRFNASLGTYHDLLKIIKDKDFLDNEENEDILEDIVLTLTLFEDREMIEERLKTYAHLFDDKVMKQLKRRRYTGWGRLSRKLINGIRDKQSGKTILDFLKSDGFANRNFMQLIHDDSLTFKEDIQKAQVSGQGDSLHEHIANLAGSPAIKKGILQTVKVVDELVKVMGRHKPENIVIEMARENQTTQKGQKNSRERMKRIEEGIKELGSQILKEHPVENTQLQNEKLYLYYLQNGRDMYVDQELDINRLSDYDVDHIVPQSFLKDDSIDNKVLTRSDKARGKSDNVPSEEVVKKMKNYWRQLLNAKLITQRKFDNLTKAERGGLSELDKAGFIKRQLVETRQITKHVAQILDSRMNTKYDENDKLIREVKVITLKSKLVSDFRKDFQFYKVREINNYHHAHDAYLNAVVGTALIKKYPKLESEFVYGDYKVYDVRKMIAKSEQEIGKATAKYFFYSNIMNFFKTEITLANGEIRKRPLIETNGETGEIVWDKGRDFATVRKVLSMPQVNIVKKTEVQTGGFSKESILPKRNSDKLIARKKDWDPKKYGGFDSPTVAYSVLVVAKVEKGKSKKLKSVKELLGITIMERSSFEKNPIDFLEAKGYKEVKKDLIIKLPKYSLFELENGRKRMLASAGELQKGNELALPSKYVNFLYLASHYEKLKGSPEDNEQKQLFVEQHKHYLDEIIEQISEFSKRVILADANLDKVLSAYNKHRDKPIREQAENIIHLFTLTNLGAPAAFKYFDTTIDRKRYTSTKEVLDATLIHQSITGLYETRIDLSQLGGDGGGSSPAPEAAAKGGMDPLQLLQPLEAEIKGTKLKAHWNSGATITCVPQAFLEEEVPIKNIWIKTIHGEKEQPVYYLTFKIQGRKVEAEVISSPYDYILVSPSDIPWLMKKPLQLTTLVPLQEYEERLLKQTMLTGSYKEKLQSLFLKYDALWQHWENQVGHRRIKPHHIATGTVNPRPQKQYPINPKAKASIQTVINDLLKQGVLIQQNSIMNTPVYPVPKPDGKWRMVLDYREVNKTIPLIAAQNQHSAGILSSIFRGKYKTTLDLSNGFWAHSITPESYWLTAFTWLGQQYCWTRLPQGFLNSPALFNADVVDLLKEVPNVQVYVDDIYISHDDPREHLEQLEKVFSLLLNAGYVVSLKKSEIAQHEVEFLGFNITKEGRGLTETFKQKLLNITPPRDLKQLQSILGKLNFARNFIPNFSELVKPLYNIIATAPGKYITWTTDNSQQLQNIISMLNSAENLEERNPEVRLIMKVNTSPSAGYIRFYNEFAKRPIMYLNYVYTKAEVKFTNTEKLLTTIHKGLIKALDLGMGQEILVYSPIVSMTKIQKTPLPERKALPIRWITWMSYLEDPRIQFHYDKTLPELQQVPTVTDDIIAKIKHPSEFSMVFYTDGSAIKHPNVNKSHNAGMGIAQVQFKPEFTVINTWSIPLGDHTAQLAEVAAVEFACKKALKIDGPVLIVTDSFYVAESVNKELPYWQSNGFFNNKKKPLKHVSKWKSIADCIQLKPDIIIIHEKGHQPTASTFHTEGNNLADKLATQGSYVVNAGKRTADGSEFEKRTADGSEFESPKKKAKVE

SEQ ID NO: 676 - protein, 2171 aa, synthetic construct
MPAAKRVKLDGGDKKYSIGLDIGTNSVGWAVITDEYKVPSKKFKVLGNTDRHSIKKNLIGALLFDSGETAEATRLKRTARRRYTRRKNRICYLQEIFSNEMAKVDDSFFHRLEESFLVEEDKKHERHPIFGNIVDEVAYHEKYPTIYHLRKKLVDSTDKADLRLIYLALAHMIKFRGHFLIEGDLNPDNSDVDKLFIQLVQTYNQLFEENPINASGVDAKAILSARLSKSRRLENLIAQLPGEKKNGLFGNLIALSLGLTPNFKSNFDLAEDAKLQLSKDTYDDDLDNLLAQIGDQYADLFLAAKNLSDAILLSDILRVNTEITKAPLSASMIKRYDEHHQDLTLLKALVRQQLPEKYKEIFFDQSKNGYAGYIDGGASQEEFYKFIKPILEKMDGTEELLVKLNREDLLRKQRTFDNGSIPHQIHLGELHAILRRQEDFYPFLKDNREKIEKILTFRIPYYVGPLARGNSRFAWMTRKSEETITPWNFEEVVDKGASAQSFIERMTNFDKNLPNEKVLPKHSLLYEYFTVYNELTKVKYVTEGMRKPAFLSGEQKKAIVDLLFKTNRKVTVKQLKEDYFKKIECFDSVEISGVEDRFNASLGTYHDLLKIIKDKDFLDNEENEDILEDIVLTLTLFEDREMIEERLKTYAHLFDDKVMKQLKRRRYTGWGRLSRKLINGIRDKQSGKTILDFLKSDGFANRNFMQLIHDDSLTFKEDIQKAQVSGQGDSLHEHIANLAGSPAIKKGILQTVKVVDELVKVMGRHKPENIVIEMARENQTTQKGQKNSRERMKRIEEGIKELGSQILKEHPVENTQLQNEKLYLYYLQNGRDMYVDQELDINRLSDYDVDHIVPQSFLKDDSIDNKVLTRSDKARGKSDNVPSEEVVKKMKNYWRQLLNAKLITQRKFDNLTKAERGGLSELDKAGFIKRQLVETRQITKHVAQILDSRMNTKYDENDKLIREVKVITLKSKLVSDFRKDFQFYKVREINNYHHAHDAYLNAVVGTALIKKYPKLESEFVYGDYKVYDVRKMIAKSEQEIGKATAKYFFYSNIMNFFKTEITLANGEIRKRPLIETNGETGEIVWDKGRDFATVRKVLSMPQVNIVKKTEVQTGGFSKESILPKRNSDKLIARKKDWDPKKYGGFDSPTVAYSVLVVAKVEKGKSKKLKSVKELLGITIMERSSFEKNPIDFLEAKGYKEVKKDLIIKLPKYSLFELENGRKRMLASAGELQKGNELALPSKYVNFLYLASHYEKLKGSPEDNEQKQLFVEQHKHYLDEIIEQISEFSKRVILADANLDKVLSAYNKHRDKPIREQAENIIHLFTLTNLGAPAAFKYFDTTIDRKRYTSTKEVLDATLIHQSITGLYETRIDLSQLGGDGGPAPGGGGGMDPLQLLQPLEAEIKGTKLKAHWNSGATITCVPQAFLEEEVPIKNIWIKTIHGEKEQPVYYLTFKIQGRKVEAEVISSPYDYILVSPSDIPWLMKKPLQLTTLVPLQEYEERLLKQTMLTGSYKEKLQSLFLKYDALWQHWENQVGHRRIKPHHIATGTVNPRPQKQYPINPKAKASIQTVINDLLKQGVLIQQNSIMNTPVYPVPKPDGKWRMVLDYREVNKTIPLIAAQNQHSAGILSSIFRGKYKTTLDLSNGFWAHSITPESYWLTAFTWLGQQYCWTRLPQGFLNSPALFNADVVDLLKEVPNVQVYVDDIYISHDDPREHLEQLEKVFSLLLNAGYVVSLKKSEIAQHEVEFLGFNITKEGRGLTETFKQKLLNITPPRDLKQLQSILGKLNFARNFIPNFSELVKPLYNIIATAPGKYITWTTDNSQQLQNIISMLNSAENLEERNPEVRLIMKVNTSPSAGYIRFYNEFAKRPIMYLNYVYTKAEVKFTNTEKLLTTIHKGLIKALDLGMGQEILVYSPIVSMTKIQKTPLPERKALPIRWITWMSYLEDPRIQFHYDKTLPELQQVPTVTDDIIAKIKHPSEFSMVFYTDGSAIKHPNVNKSHNAGMGIAQVQFKPEFTVINTWSIPLGDHTAQLAEVAAVEFACKKALKIDGPVLIVTDSFYVAESVNKELPYWQSNGFFNNKKKPLKHVSKWKSIADCIQLKPDIIIIHEKGHQPTASTFHTEGNNLADKLATQGSYVVNAGKRTADGSEFEKRTADGSEFESPKKKAKVE

SEQ ID NO: 677 - protein, 2180 aa, synthetic construct
MPAAKRVKLDGGDKKYSIGLDIGTNSVGWAVITDEYKVPSKKFKVLGNTDRHSIKKNLIGALLFDSGETAEATRLKRTARRRYTRRKNRICYLQEIFSNEMAKVDDSFFHRLEESFLVEEDKKHERHPIFGNIVDEVAYHEKYPTIYHLRKKLVDSTDKADLRLIYLALAHMIKFRGHFLIEGDLNPDNSDVDKLFIQLVQTYNQLFEENPINASGVDAKAILSARLSKSRRLENLIAQLPGEKKNGLFGNLIALSLGLTPNFKSNFDLAEDAKLQLSKDTYDDDLDNLLAQIGDQYADLFLAAKNLSDAILLSDILRVNTEITKAPLSASMIKRYDEHHQDLTLLKALVRQQLPEKYKEIFFDQSKNGYAGYIDGGASQEEFYKFIKPILEKMDGTEELLVKLNREDLLRKQRTFDNGSIPHQIHLGELHAILRRQEDFYPFLKDNREKIEKILTFRIPYYVGPLARGNSRFAWMTRKSEETITPWNFEEVVDKGASAQSFIERMTNFDKNLPNEKVLPKHSLLYEYFTVYNELTKVKYVTEGMRKPAFLSGEQKKAIVDLLFKTNRKVTVKQLKEDYFKKIECFDSVEISGVEDRFNASLGTYHDLLKIIKDKDFLDNEENEDILEDIVLTLTLFEDREMIEERLKTYAHLFDDKVMKQLKRRRYTGWGRLSRKLINGIRDKQSGKTILDFLKSDGFANRNFMQLIHDDSLTFKEDIQKAQVSGQGDSLHEHIANLAGSPAIKKGILQTVKVVDELVKVMGRHKPENIVIEMARENQTTQKGQKNSRERMKRIEEGIKELGSQILKEHPVENTQLQNEKLYLYYLQNGRDMYVDQELDINRLSDYDVDHIVPQSFLKDDSIDNKVLTRSDKARGKSDNVPSEEVVKKMKNYWRQLLNAKLITQRKFDNLTKAERGGLSELDKAGFIKRQLVETRQITKHVAQILDSRMNTKYDENDKLIREVKVITLKSKLVSDFRKDFQFYKVREINNYHHAHDAYLNAVVGTALIKKYPKLESEFVYGDYKVYDVRKMIAKSEQEIGKATAKYFFYSNIMNFFKTEITLANGEIRKRPLIETNGETGEIVWDKGRDFATVRKVLSMPQVNIVKKTEVQTGGFSKESILPKRNSDKLIARKKDWDPKKYGGFDSPTVAYSVLVVAKVEKGKSKKLKSVKELLGITIMERSSFEKNPIDFLEAKGYKEVKKDLIIKLPKYSLFELENGRKRMLASAGELQKGNELALPSKYVNFLYLASHYEKLKGSPEDNEQKQLFVEQHKHYLDEIIEQISEFSKRVILADANLDKVLSAYNKHRDKPIREQAENIIHLFTLTNLGAPAAFKYFDTTIDRKRYTSTKEVLDATLIHQSITGLYETRIDLSQLGGDGGGSSGSSGSSGSSGSSGGMDPLQLLQPLEAEIKGTKLKAHWNSGATITCVPQAFLEEEVPIKNIWIKTIHGEKEQPVYYLTFKIQGRKVEAEVISSPYDYILVSPSDIPWLMKKPLQLTTLVPLQEYEERLLKQTMLTGSYKEKLQSLFLKYDALWQHWENQVGHRRIKPHHIATGTVNPRPQKQYPINPKAKASIQTVINDLLKQGVLIQQNSIMNTPVYPVPKPDGKWRMVLDYREVNKTIPLIAAQNQHSAGILSSIFRGKYKTTLDLSNGFWAHSITPESYWLTAFTWLGQQYCWTRLPQGFLNSPALFNADVVDLLKEVPNVQVYVDDIYISHDDPREHLEQLEKVFSLLLNAGYVVSLKKSEIAQHEVEFLGFNITKEGRGLTETFKQKLLNITPPRDLKQLQSILGKLNFARNFIPNFSELVKPLYNIIATAPGKYITWTTDNSQQLQNIISMLNSAENLEERNPEVRLIMKVNTSPSAGYIRFYNEFAKRPIMYLNYVYTKAEVKFTNTEKLLTTIHKGLIKALDLGMGQEILVYSPIVSMTKIQKTPLPERKALPIRWITWMSYLEDPRIQFHYDKTLPELQQVPTVTDDIIAKIKHPSEFSMVFYTDGSAIKHPNVNKSHNAGMGIAQVQFKPEFTVINTWSIPLGDHTAQLAEVAAVEFACKKALKIDGPVLIVTDSFYVAESVNKELPYWQSNGFFNNKKKPLKHVSKWKSIADCIQLKPDIIIIHEKGHQPTASTFHTEGNNLADKLATQGSYVVNAGKRTADGSEFEKRTADGSEFESPKKKAKVE

SEQ ID NO: 678 - protein, 2174 aa, synthetic construct
MPAAKRVKLDGGDKKYSIGLDIGTNSVGWAVITDEYKVPSKKFKVLGNTDRHSIKKNLIGALLFDSGETAEATRLKRTARRRYTRRKNRICYLQEIFSNEMAKVDDSFFHRLEESFLVEEDKKHERHPIFGNIVDEVAYHEKYPTIYHLRKKLVDSTDKADLRLIYLALAHMIKFRGHFLIEGDLNPDNSDVDKLFIQLVQTYNQLFEENPINASGVDAKAILSARLSKSRRLENLIAQLPGEKKNGLFGNLIALSLGLTPNFKSNFDLAEDAKLQLSKDTYDDDLDNLLAQIGDQYADLFLAAKNLSDAILLSDILRVNTEITKAPLSASMIKRYDEHHQDLTLLKALVRQQLPEKYKEIFFDQSKNGYAGYIDGGASQEEFYKFIKPILEKMDGTEELLVKLNREDLLRKQRTFDNGSIPHQIHLGELHAILRRQEDFYPFLKDNREKIEKILTFRIPYYVGPLARGNSRFAWMTRKSEETITPWNFEEVVDKGASAQSFIERMTNFDKNLPNEKVLPKHSLLYEYFTVYNELTKVKYVTEGMRKPAFLSGEQKKAIVDLLFKTNRKVTVKQLKEDYFKKIECFDSVEISGVEDRFNASLGTYHDLLKIIKDKDFLDNEENEDILEDIVLTLTLFEDREMIEERLKTYAHLFDDKVMKQLKRRRYTGWGRLSRKLINGIRDKQSGKTILDFLKSDGFANRNFMQLIHDDSLTFKEDIQKAQVSGQGDSLHEHIANLAGSPAIKKGILQTVKVVDELVKVMGRHKPENIVIEMARENQTTQKGQKNSRERMKRIEEGIKELGSQILKEHPVENTQLQNEKLYLYYLQNGRDMYVDQELDINRLSDYDVDHIVPQSFLKDDSIDNKVLTRSDKARGKSDNVPSEEVVKKMKNYWRQLLNAKLITQRKFDNLTKAERGGLSELDKAGFIKRQLVETRQITKHVAQILDSRMNTKYDENDKLIREVKVITLKSKLVSDFRKDFQFYKVREINNYHHAHDAYLNAVVGTALIKKYPKLESEFVYGDYKVYDVRKMIAKSEQEIGKATAKYFFYSNIMNFFKTEITLANGEIRKRPLIETNGETGEIVWDKGRDFATVRKVLSMPQVNIVKKTEVQTGGFSKESILPKRNSDKLIARKKDWDPKKYGGFDSPTVAYSVLVVAKVEKGKSKKLKSVKELLGITIMERSSFEKNPIDFLEAKGYKEVKKDLIIKLPKYSLFELENGRKRMLASAGELQKGNELALPSKYVNFLYLASHYEKLKGSPEDNEQKQLFVEQHKHYLDEIIEQISEFSKRVILADANLDKVLSAYNKHRDKPIREQAENIIHLFTLTNLGAPAAFKYFDTTIDRKRYTSTKEVLDATLIHQSITGLYETRIDLSQLGGDGGGGGPAPGGSGGMDPLQLLQPLEAEIKGTKLKAHWNSGATITCVPQAFLEEEVPIKNIWIKTIHGEKEQPVYYLTFKIQGRKVEAEVISSPYDYILVSPSDIPWLMKKPLQLTTLVPLQEYEERLLKQTMLTGSYKEKLQSLFLKYDALWQHWENQVGHRRIKPHHIATGTVNPRPQKQYPINPKAKASIQTVINDLLKQGVLIQQNSIMNTPVYPVPKPDGKWRMVLDYREVNKTIPLIAAQNQHSAGILSSIFRGKYKTTLDLSNGFWAHSITPESYWLTAFTWLGQQYCWTRLPQGFLNSPALFNADVVDLLKEVPNVQVYVDDIYISHDDPREHLEQLEKVFSLLLNAGYVVSLKKSEIAQHEVEFLGFNITKEGRGLTETFKQKLLNITPPRDLKQLQSILGKLNFARNFIPNFSELVKPLYNIIATAPGKYITWTTDNSQQLQNIISMLNSAENLEERNPEVRLIMKVNTSPSAGYIRFYNEFAKRPIMYLNYVYTKAEVKFTNTEKLLTTIHKGLIKALDLGMGQEILVYSPIVSMTKIQKTPLPERKALPIRWITWMSYLEDPRIQFHYDKTLPELQQVPTVTDDIIAKIKHPSEFSMVFYTDGSAIKHPNVNKSHNAGMGIAQVQFKPEFTVINTWSIPLGDHTAQLAEVAAVEFACKKALKIDGPVLIVTDSFYVAESVNKELPYWQSNGFFNNKKKPLKHVSKWKSIADCIQLKPDIIIIHEKGHQPTASTFHTEGNNLADKLATQGSYVVNAGKRTADGSEFEKRTADGSEFESPKKKAKVE

SEQ ID NO: 679 - protein, 2176 aa, synthetic construct
MPAAKRVKLDGGDKKYSIGLDIGTNSVGWAVITDEYKVPSKKFKVLGNTDRHSIKKNLIGALLFDSGETAEATRLKRTARRRYTRRKNRICYLQEIFSNEMAKVDDSFFHRLEESFLVEEDKKHERHPIFGNIVDEVAYHEKYPTIYHLRKKLVDSTDKADLRLIYLALAHMIKFRGHFLIEGDLNPDNSDVDKLFIQLVQTYNQLFEENPINASGVDAKAILSARLSKSRRLENLIAQLPGEKKNGLFGNLIALSLGLTPNFKSNFDLAEDAKLQLSKDTYDDDLDNLLAQIGDQYADLFLAAKNLSDAILLSDILRVNTEITKAPLSASMIKRYDEHHQDLTLLKALVRQQLPEKYKEIFFDQSKNGYAGYIDGGASQEEFYKFIKPILEKMDGTEELLVKLNREDLLRKQRTFDNGSIPHQIHLGELHAILRRQEDFYPFLKDNREKIEKILTFRIPYYVGPLARGNSRFAWMTRKSEETITPWNFEEVVDKGASAQSFIERMTNFDKNLPNEKVLPKHSLLYEYFTVYNELTKVKYVTEGMRKPAFLSGEQKKAIVDLLFKTNRKVTVKQLKEDYFKKIECFDSVEISGVEDRFNASLGTYHDLLKIIKDKDFLDNEENEDILEDIVLTLTLFEDREMIEERLKTYAHLFDDKVMKQLKRRRYTGWGRLSRKLINGIRDKQSGKTILDFLKSDGFANRNFMQLIHDDSLTFKEDIQKAQVSGQGDSLHEHIANLAGSPAIKKGILQTVKVVDELVKVMGRHKPENIVIEMARENQTTQKGQKNSRERMKRIEEGIKELGSQILKEHPVENTQLQNEKLYLYYLQNGRDMYVDQELDINRLSDYDVDHIVPQSFLKDDSIDNKVLTRSDKARGKSDNVPSEEVVKKMKNYWRQLLNAKLITQRKFDNLTKAERGGLSELDKAGFIKRQLVETRQITKHVAQILDSRMNTKYDENDKLIREVKVITLKSKLVSDFRKDFQFYKVREINNYHHAHDAYLNAVVGTALIKKYPKLESEFVYGDYKVYDVRKMIAKSEQEIGKATAKYFFYSNIMNFFKTEITLANGEIRKRPLIETNGETGEIVWDKGRDFATVRKVLSMPQVNIVKKTEVQTGGFSKESILPKRNSDKLIARKKDWDPKKYGGFDSPTVAYSVLVVAKVEKGKSKKLKSVKELLGITIMERSSFEKNPIDFLEAKGYKEVKKDLIIKLPKYSLFELENGRKRMLASAGELQKGNELALPSKYVNFLYLASHYEKLKGSPEDNEQKQLFVEQHKHYLDEIIEQISEFSKRVILADANLDKVLSAYNKHRDKPIREQAENIIHLFTLTNLGAPAAFKYFDTTIDRKRYTSTKEVLDATLIHQSITGLYETRIDLSQLGGDGGGGSGSSEAAAKGGMDPLQLLQPLEAEIKGTKLKAHWNSGATITCVPQAFLEEEVPIKNIWIKTIHGEKEQPVYYLTFKIQGRKVEAEVISSPYDYILVSPSDIPWLMKKPLQLTTLVPLQEYEERLLKQTMLTGSYKEKLQSLFLKYDALWQHWENQVGHRRIKPHHIATGTVNPRPQKQYPINPKAKASIQTVINDLLKQGVLIQQNSIMNTPVYPVPKPDGKWRMVLDYREVNKTIPLIAAQNQHSAGILSSIFRGKYKTTLDLSNGFWAHSITPESYWLTAFTWLGQQYCWTRLPQGFLNSPALFNADVVDLLKEVPNVQVYVDDIYISHDDPREHLEQLEKVFSLLLNAGYVVSLKKSEIAQHEVEFLGFNITKEGRGLTETFKQKLLNITPPRDLKQLQSILGKLNFARNFIPNFSELVKPLYNIIATAPGKYITWTTDNSQQLQNIISMLNSAENLEERNPEVRLIMKVNTSPSAGYIRFYNEFAKRPIMYLNYVYTKAEVKFTNTEKLLTTIHKGLIKALDLGMGQEILVYSPIVSMTKIQKTPLPERKALPIRWITWMSYLEDPRIQFHYDKTLPELQQVPTVTDDIIAKIKHPSEFSMVFYTDGSAIKHPNVNKSHNAGMGIAQVQFKPEFTVINTWSIPLGDHTAQLAEVAAVEFACKKALKIDGPVLIVTDSFYVAESVNKELPYWQSNGFFNNKKKPLKHVSKWKSIADCIQLKPDIIIIHEKGHQPTASTFHTEGNNLADKLATQGSYVVNAGKRTADGSEFEKRTADGSEFESPKKKAKVE

SEQ ID NO: 680 - protein, 2176 aa, synthetic construct
MPAAKRVKLDGGDKKYSIGLDIGTNSVGWAVITDEYKVPSKKFKVLGNTDRHSIKKNLIGALLFDSGETAEATRLKRTARRRYTRRKNRICYLQEIFSNEMAKVDDSFFHRLEESFLVEEDKKHERHPIFGNIVDEVAYHEKYPTIYHLRKKLVDSTDKADLRLIYLALAHMIKFRGHFLIEGDLNPDNSDVDKLFIQLVQTYNQLFEENPINASGVDAKAILSARLSKSRRLENLIAQLPGEKKNGLFGNLIALSLGLTPNFKSNFDLAEDAKLQLSKDTYDDDLDNLLAQIGDQYADLFLAAKNLSDAILLSDILRVNTEITKAPLSASMIKRYDEHHQDLTLLKALVRQQLPEKYKEIFFDQSKNGYAGYIDGGASQEEFYKFIKPILEKMDGTEELLVKLNREDLLRKQRTFDNGSIPHQIHLGELHAILRRQEDFYPFLKDNREKIEKILTFRIPYYVGPLARGNSRFAWMTRKSEETITPWNFEEVVDKGASAQSFIERMTNFDKNLPNEKVLPKHSLLYEYFTVYNELTKVKYVTEGMRKPAFLSGEQKKAIVDLLFKTNRKVTVKQLKEDYFKKIECFDSVEISGVEDRFNASLGTYHDLLKIIKDKDFLDNEENEDILEDIVLTLTLFEDREMIEERLKTYAHLFDDKVMKQLKRRRYTGWGRLSRKLINGIRDKQSGKTILDFLKSDGFANRNFMQLIHDDSLTFKEDIQKAQVSGQGDSLHEHIANLAGSPAIKKGILQTVKVVDELVKVMGRHKPENIVIEMARENQTTQKGQKNSRERMKRIEEGIKELGSQILKEHPVENTQLQNEKLYLYYLQNGRDMYVDQELDINRLSDYDVDHIVPQSFLKDDSIDNKVLTRSDKARGKSDNVPSEEVVKKMKNYWRQLLNAKLITQRKFDNLTKAERGGLSELDKAGFIKRQLVETRQITKHVAQILDSRMNTKYDENDKLIREVKVITLKSKLVSDFRKDFQFYKVREINNYHHAHDAYLNAVVGTALIKKYPKLESEFVYGDYKVYDVRKMIAKSEQEIGKATAKYFFYSNIMNFFKTEITLANGEIRKRPLIETNGETGEIVWDKGRDFATVRKVLSMPQVNIVKKTEVQTGGFSKESILPKRNSDKLIARKKDWDPKKYGGFDSPTVAYSVLVVAKVEKGKSKKLKSVKELLGITIMERSSFEKNPIDFLEAKGYKEVKKDLIIKLPKYSLFELENGRKRMLASAGELQKGNELALPSKYVNFLYLASHYEKLKGSPEDNEQKQLFVEQHKHYLDEIIEQISEFSKRVILADANLDKVLSAYNKHRDKPIREQAENIIHLFTLTNLGAPAAFKYFDTTIDRKRYTSTKEVLDATLIHQSITGLYETRIDLSQLGGDGGEAAAKGGSPAPGGMDPLQLLQPLEAEIKGTKLKAHWNSGATITCVPQAFLEEEVPIKNIWIKTIHGEKEQPVYYLTFKIQGRKVEAEVISSPYDYILVSPSDIPWLMKKPLQLTTLVPLQEYEERLLKQTMLTGSYKEKLQSLFLKYDALWQHWENQVGHRRIKPHHIATGTVNPRPQKQYPINPKAKASIQTVINDLLKQGVLIQQNSIMNTPVYPVPKPDGKWRMVLDYREVNKTIPLIAAQNQHSAGILSSIFRGKYKTTLDLSNGFWAHSITPESYWLTAFTWLGQQYCWTRLPQGFLNSPALFNADVVDLLKEVPNVQVYVDDIYISHDDPREHLEQLEKVFSLLLNAGYVVSLKKSEIAQHEVEFLGFNITKEGRGLTETFKQKLLNITPPRDLKQLQSILGKLNFARNFIPNFSELVKPLYNIIATAPGKYITWTTDNSQQLQNIISMLNSAENLEERNPEVRLIMKVNTSPSAGYIRFYNEFAKRPIMYLNYVYTKAEVKFTNTEKLLTTIHKGLIKALDLGMGQEILVYSPIVSMTKIQKTPLPERKALPIRWITWMSYLEDPRIQFHYDKTLPELQQVPTVTDDIIAKIKHPSEFSMVFYTDGSAIKHPNVNKSHNAGMGIAQVQFKPEFTVINTWSIPLGDHTAQLAEVAAVEFACKKALKIDGPVLIVTDSFYVAESVNKELPYWQSNGFFNNKKKPLKHVSKWKSIADCIQLKPDIIIIHEKGHQPTASTFHTEGNNLADKLATQGSYVVNAGKRTADGSEFEKRTADGSEFESPKKKAKVE

SEQ ID NO: 681 - protein, 2175 aa, synthetic construct
MPAAKRVKLDGGDKKYSIGLDIGTNSVGWAVITDEYKVPSKKFKVLGNTDRHSIKKNLIGALLFDSGETAEATRLKRTARRRYTRRKNRICYLQEIFSNEMAKVDDSFFHRLEESFLVEEDKKHERHPIFGNIVDEVAYHEKYPTIYHLRKKLVDSTDKADLRLIYLALAHMIKFRGHFLIEGDLNPDNSDVDKLFIQLVQTYNQLFEENPINASGVDAKAILSARLSKSRRLENLIAQLPGEKKNGLFGNLIALSLGLTPNFKSNFDLAEDAKLQLSKDTYDDDLDNLLAQIGDQYADLFLAAKNLSDAILLSDILRVNTEITKAPLSASMIKRYDEHHQDLTLLKALVRQQLPEKYKEIFFDQSKNGYAGYIDGGASQEEFYKFIKPILEKMDGTEELLVKLNREDLLRKQRTFDNGSIPHQIHLGELHAILRRQEDFYPFLKDNREKIEKILTFRIPYYVGPLARGNSRFAWMTRKSEETITPWNFEEVVDKGASAQSFIERMTNFDKNLPNEKVLPKHSLLYEYFTVYNELTKVKYVTEGMRKPAFLSGEQKKAIVDLLFKTNRKVTVKQLKEDYFKKIECFDSVEISGVEDRFNASLGTYHDLLKIIKDKDFLDNEENEDILEDIVLTLTLFEDREMIEERLKTYAHLFDDKVMKQLKRRRYTGWGRLSRKLINGIRDKQSGKTILDFLKSDGFANRNFMQLIHDDSLTFKEDIQKAQVSGQGDSLHEHIANLAGSPAIKKGILQTVKVVDELVKVMGRHKPENIVIEMARENQTTQKGQKNSRERMKRIEEGIKELGSQILKEHPVENTQLQNEKLYLYYLQNGRDMYVDQELDINRLSDYDVDHIVPQSFLKDDSIDNKVLTRSDKARGKSDNVPSEEVVKKMKNYWRQLLNAKLITQRKFDNLTKAERGGLSELDKAGFIKRQLVETRQITKHVAQILDSRMNTKYDENDKLIREVKVITLKSKLVSDFRKDFQFYKVREINNYHHAHDAYLNAVVGTALIKKYPKLESEFVYGDYKVYDVRKMIAKSEQEIGKATAKYFFYSNIMNFFKTEITLANGEIRKRPLIETNGETGEIVWDKGRDFATVRKVLSMPQVNIVKKTEVQTGGFSKESILPKRNSDKLIARKKDWDPKKYGGFDSPTVAYSVLVVAKVEKGKSKKLKSVKELLGITIMERSSFEKNPIDFLEAKGYKEVKKDLIIKLPKYSLFELENGRKRMLASAGELQKGNELALPSKYVNFLYLASHYEKLKGSPEDNEQKQLFVEQHKHYLDEIIEQISEFSKRVILADANLDKVLSAYNKHRDKPIREQAENIIHLFTLTNLGAPAAFKYFDTTIDRKRYTSTKEVLDATLIHQSITGLYETRIDLSQLGGDGGGGGGSGGGGSGGMDPLQLLQPLEAEIKGTKLKAHWNSGATITCVPQAFLEEEVPIKNIWIKTIHGEKEQPVYYLTFKIQGRKVEAEVISSPYDYILVSPSDIPWLMKKPLQLTTLVPLQEYEERLLKQTMLTGSYKEKLQSLFLKYDALWQHWENQVGHRRIKPHHIATGTVNPRPQKQYPINPKAKASIQTVINDLLKQGVLIQQNSIMNTPVYPVPKPDGKWRMVLDYREVNKTIPLIAAQNQHSAGILSSIFRGKYKTTLDLSNGFWAHSITPESYWLTAFTWLGQQYCWTRLPQGFLNSPALFNADVVDLLKEVPNVQVYVDDIYISHDDPREHLEQLEKVFSLLLNAGYVVSLKKSEIAQHEVEFLGFNITKEGRGLTETFKQKLLNITPPRDLKQLQSILGKLNFARNFIPNFSELVKPLYNIIATAPGKYITWTTDNSQQLQNIISMLNSAENLEERNPEVRLIMKVNTSPSAGYIRFYNEFAKRPIMYLNYVYTKAEVKFTNTEKLLTTIHKGLIKALDLGMGQEILVYSPIVSMTKIQKTPLPERKALPIRWITWMSYLEDPRIQFHYDKTLPELQQVPTVTDDIIAKIKHPSEFSMVFYTDGSAIKHPNVNKSHNAGMGIAQVQFKPEFTVINTWSIPLGDHTAQLAEVAAVEFACKKALKIDGPVLIVTDSFYVAESVNKELPYWQSNGFFNNKKKPLKHVSKWKSIADCIQLKPDIIIIHEKGHQPTASTFHTEGNNLADKLATQGSYVVNAGKRTADGSEFEKRTADGSEFESPKKKAKVE

SEQ ID NO: 682 - protein, 2171 aa, synthetic construct
MPAAKRVKLDGGDKKYSIGLDIGTNSVGWAVITDEYKVPSKKFKVLGNTDRHSIKKNLIGALLFDSGETAEATRLKRTARRRYTRRKNRICYLQEIFSNEMAKVDDSFFHRLEESFLVEEDKKHERHPIFGNIVDEVAYHEKYPTIYHLRKKLVDSTDKADLRLIYLALAHMIKFRGHFLIEGDLNPDNSDVDKLFIQLVQTYNQLFEENPINASGVDAKAILSARLSKSRRLENLIAQLPGEKKNGLFGNLIALSLGLTPNFKSNFDLAEDAKLQLSKDTYDDDLDNLLAQIGDQYADLFLAAKNLSDAILLSDILRVNTEITKAPLSASMIKRYDEHHQDLTLLKALVRQQLPEKYKEIFFDQSKNGYAGYIDGGASQEEFYKFIKPILEKMDGTEELLVKLNREDLLRKQRTFDNGSIPHQIHLGELHAILRRQEDFYPFLKDNREKIEKILTFRIPYYVGPLARGNSRFAWMTRKSEETITPWNFEEVVDKGASAQSFIERMTNFDKNLPNEKVLPKHSLLYEYFTVYNELTKVKYVTEGMRKPAFLSGEQKKAIVDLLFKTNRKVTVKQLKEDYFKKIECFDSVEISGVEDRFNASLGTYHDLLKIIKDKDFLDNEENEDILEDIVLTLTLFEDREMIEERLKTYAHLFDDKVMKQLKRRRYTGWGRLSRKLINGIRDKQSGKTILDFLKSDGFANRNFMQLIHDDSLTFKEDIQKAQVSGQGDSLHEHIANLAGSPAIKKGILQTVKVVDELVKVMGRHKPENIVIEMARENQTTQKGQKNSRERMKRIEEGIKELGSQILKEHPVENTQLQNEKLYLYYLQNGRDMYVDQELDINRLSDYDVDHIVPQSFLKDDSIDNKVLTRSDKARGKSDNVPSEEVVKKMKNYWRQLLNAKLITQRKFDNLTKAERGGLSELDKAGFIKRQLVETRQITKHVAQILDSRMNTKYDENDKLIREVKVITLKSKLVSDFRKDFQFYKVREINNYHHAHDAYLNAVVGTALIKKYPKLESEFVYGDYKVYDVRKMIAKSEQEIGKATAKYFFYSNIMNFFKTEITLANGEIRKRPLIETNGETGEIVWDKGRDFATVRKVLSMPQVNIVKKTEVQTGGFSKESILPKRNSDKLIARKKDWDPKKYGGFDSPTVAYSVLVVAKVEKGKSKKLKSVKELLGITIMERSSFEKNPIDFLEAKGYKEVKKDLIIKLPKYSLFELENGRKRMLASAGELQKGNELALPSKYVNFLYLASHYEKLKGSPEDNEQKQLFVEQHKHYLDEIIEQISEFSKRVILADANLDKVLSAYNKHRDKPIREQAENIIHLFTLTNLGAPAAFKYFDTTIDRKRYTSTKEVLDATLIHQSITGLYETRIDLSQLGGDGGGGSGGSGGMDPLQLLQPLEAEIKGTKLKAHWNSGATITCVPQAFLEEEVPIKNIWIKTIHGEKEQPVYYLTFKIQGRKVEAEVISSPYDYILVSPSDIPWLMKKPLQLTTLVPLQEYEERLLKQTMLTGSYKEKLQSLFLKYDALWQHWENQVGHRRIKPHHIATGTVNPRPQKQYPINPKAKASIQTVINDLLKQGVLIQQNSIMNTPVYPVPKPDGKWRMVLDYREVNKTIPLIAAQNQHSAGILSSIFRGKYKTTLDLSNGFWAHSITPESYWLTAFTWLGQQYCWTRLPQGFLNSPALFNADVVDLLKEVPNVQVYVDDIYISHDDPREHLEQLEKVFSLLLNAGYVVSLKKSEIAQHEVEFLGFNITKEGRGLTETFKQKLLNITPPRDLKQLQSILGKLNFARNFIPNFSELVKPLYNIIATAPGKYITWTTDNSQQLQNIISMLNSAENLEERNPEVRLIMKVNTSPSAGYIRFYNEFAKRPIMYLNYVYTKAEVKFTNTEKLLTTIHKGLIKALDLGMGQEILVYSPIVSMTKIQKTPLPERKALPIRWITWMSYLEDPRIQFHYDKTLPELQQVPTVTDDIIAKIKHPSEFSMVFYTDGSAIKHPNVNKSHNAGMGIAQVQFKPEFTVINTWSIPLGDHTAQLAEVAAVEFACKKALKIDGPVLIVTDSFYVAESVNKELPYWQSNGFFNNKKKPLKHVSKWKSIADCIQLKPDIIIIHEKGHQPTASTFHTEGNNLADKLATQGSYVVNAGKRTADGSEFEKRTADGSEFESPKKKAKVE

SEQ ID NO: 683 - protein, 2174 aa, synthetic construct
MPAAKRVKLDGGDKKYSIGLDIGTNSVGWAVITDEYKVPSKKFKVLGNTDRHSIKKNLIGALLFDSGETAEATRLKRTARRRYTRRKNRICYLQEIFSNEMAKVDDSFFHRLEESFLVEEDKKHERHPIFGNIVDEVAYHEKYPTIYHLRKKLVDSTDKADLRLIYLALAHMIKFRGHFLIEGDLNPDNSDVDKLFIQLVQTYNQLFEENPINASGVDAKAILSARLSKSRRLENLIAQLPGEKKNGLFGNLIALSLGLTPNFKSNFDLAEDAKLQLSKDTYDDDLDNLLAQIGDQYADLFLAAKNLSDAILLSDILRVNTEITKAPLSASMIKRYDEHHQDLTLLKALVRQQLPEKYKEIFFDQSKNGYAGYIDGGASQEEFYKFIKPILEKMDGTEELLVKLNREDLLRKQRTFDNGSIPHQIHLGELHAILRRQEDFYPFLKDNREKIEKILTFRIPYYVGPLARGNSRFAWMTRKSEETITPWNFEEVVDKGASAQSFIERMTNFDKNLPNEKVLPKHSLLYEYFTVYNELTKVKYVTEGMRKPAFLSGEQKKAIVDLLFKTNRKVTVKQLKEDYFKKIECFDSVEISGVEDRFNASLGTYHDLLKIIKDKDFLDNEENEDILEDIVLTLTLFEDREMIEERLKTYAHLFDDKVMKQLKRRRYTGWGRLSRKLINGIRDKQSGKTILDFLKSDGFANRNFMQLIHDDSLTFKEDIQKAQVSGQGDSLHEHIANLAGSPAIKKGILQTVKVVDELVKVMGRHKPENIVIEMARENQTTQKGQKNSRERMKRIEEGIKELGSQILKEHPVENTQLQNEKLYLYYLQNGRDMYVDQELDINRLSDYDVDHIVPQSFLKDDSIDNKVLTRSDKARGKSDNVPSEEVVKKMKNYWRQLLNAKLITQRKFDNLTKAERGGLSELDKAGFIKRQLVETRQITKHVAQILDSRMNTKYDENDKLIREVKVITLKSKLVSDFRKDFQFYKVREINNYHHAHDAYLNAVVGTALIKKYPKLESEFVYGDYKVYDVRKMIAKSEQEIGKATAKYFFYSNIMNFFKTEITLANGEIRKRPLIETNGETGEIVWDKGRDFATVRKVLSMPQVNIVKKTEVQTGGFSKESILPKRNSDKLIARKKDWDPKKYGGFDSPTVAYSVLVVAKVEKGKSKKLKSVKELLGITIMERSSFEKNPIDFLEAKGYKEVKKDLIIKLPKYSLFELENGRKRMLASAGELQKGNELALPSKYVNFLYLASHYEKLKGSPEDNEQKQLFVEQHKHYLDEIIEQISEFSKRVILADANLDKVLSAYNKHRDKPIREQAENIIHLFTLTNLGAPAAFKYFDTTIDRKRYTSTKEVLDATLIHQSITGLYETRIDLSQLGGDGGGSSGGSPAPGGMDPLQLLQPLEAEIKGTKLKAHWNSGATITCVPQAFLEEEVPIKNIWIKTIHGEKEQPVYYLTFKIQGRKVEAEVISSPYDYILVSPSDIPWLMKKPLQLTTLVPLQEYEERLLKQTMLTGSYKEKLQSLFLKYDALWQHWENQVGHRRIKPHHIATGTVNPRPQKQYPINPKAKASIQTVINDLLKQGVLIQQNSIMNTPVYPVPKPDGKWRMVLDYREVNKTIPLIAAQNQHSAGILSSIFRGKYKTTLDLSNGFWAHSITPESYWLTAFTWLGQQYCWTRLPQGFLNSPALFNADVVDLLKEVPNVQVYVDDIYISHDDPREHLEQLEKVFSLLLNAGYVVSLKKSEIAQHEVEFLGFNITKEGRGLTETFKQKLLNITPPRDLKQLQSILGKLNFARNFIPNFSELVKPLYNIIATAPGKYITWTTDNSQQLQNIISMLNSAENLEERNPEVRLIMKVNTSPSAGYIRFYNEFAKRPIMYLNYVYTKAEVKFTNTEKLLTTIHKGLIKALDLGMGQEILVYSPIVSMTKIQKTPLPERKALPIRWITWMSYLEDPRIQFHYDKTLPELQQVPTVTDDIIAKIKHPSEFSMVFYTDGSAIKHPNVNKSHNAGMGIAQVQFKPEFTVINTWSIPLGDHTAQLAEVAAVEFACKKALKIDGPVLIVTDSFYVAESVNKELPYWQSNGFFNNKKKPLKHVSKWKSIADCIQLKPDIIIIHEKGHQPTASTFHTEGNNLADKLATQGSYVVNAGKRTADGSEFEKRTADGSEFESPKKKAKVE

SEQ ID NO: 684 - protein, 2176 aa, synthetic construct
MPAAKRVKLDGGDKKYSIGLDIGTNSVGWAVITDEYKVPSKKFKVLGNTDRHSIKKNLIGALLFDSGETAEATRLKRTARRRYTRRKNRICYLQEIFSNEMAKVDDSFFHRLEESFLVEEDKKHERHPIFGNIVDEVAYHEKYPTIYHLRKKLVDSTDKADLRLIYLALAHMIKFRGHFLIEGDLNPDNSDVDKLFIQLVQTYNQLFEENPINASGVDAKAILSARLSKSRRLENLIAQLPGEKKNGLFGNLIALSLGLTPNFKSNFDLAEDAKLQLSKDTYDDDLDNLLAQIGDQYADLFLAAKNLSDAILLSDILRVNTEITKAPLSASMIKRYDEHHQDLTLLKALVRQQLPEKYKEIFFDQSKNGYAGYIDGGASQEEFYKFIKPILEKMDGTEELLVKLNREDLLRKQRTFDNGSIPHQIHLGELHAILRRQEDFYPFLKDNREKIEKILTFRIPYYVGPLARGNSRFAWMTRKSEETITPWNFEEVVDKGASAQSFIERMTNFDKNLPNEKVLPKHSLLYEYFTVYNELTKVKYVTEGMRKPAFLSGEQKKAIVDLLFKTNRKVTVKQLKEDYFKKIECFDSVEISGVEDRFNASLGTYHDLLKIIKDKDFLDNEENEDILEDIVLTLTLFEDREMIEERLKTYAHLFDDKVMKQLKRRRYTGWGRLSRKLINGIRDKQSGKTILDFLKSDGFANRNFMQLIHDDSLTFKEDIQKAQVSGQGDSLHEHIANLAGSPAIKKGILQTVKVVDELVKVMGRHKPENIVIEMARENQTTQKGQKNSRERMKRIEEGIKELGSQILKEHPVENTQLQNEKLYLYYLQNGRDMYVDQELDINRLSDYDVDHIVPQSFLKDDSIDNKVLTRSDKARGKSDNVPSEEVVKKMKNYWRQLLNAKLITQRKFDNLTKAERGGLSELDKAGFIKRQLVETRQITKHVAQILDSRMNTKYDENDKLIREVKVITLKSKLVSDFRKDFQFYKVREINNYHHAHDAYLNAVVGTALIKKYPKLESEFVYGDYKVYDVRKMIAKSEQEIGKATAKYFFYSNIMNFFKTEITLANGEIRKRPLIETNGETGEIVWDKGRDFATVRKVLSMPQVNIVKKTEVQTGGFSKESILPKRNSDKLIARKKDWDPKKYGGFDSPTVAYSVLVVAKVEKGKSKKLKSVKELLGITIMERSSFEKNPIDFLEAKGYKEVKKDLIIKLPKYSLFELENGRKRMLASAGELQKGNELALPSKYVNFLYLASHYEKLKGSPEDNEQKQLFVEQHKHYLDEIIEQISEFSKRVILADANLDKVLSAYNKHRDKPIREQAENIIHLFTLTNLGAPAAFKYFDTTIDRKRYTSTKEVLDATLIHQSITGLYETRIDLSQLGGDGGGGSEAAAKGSSGGMDPLQLLQPLEAEIKGTKLKAHWNSGATITCVPQAFLEEEVPIKNIWIKTIHGEKEQPVYYLTFKIQGRKVEAEVISSPYDYILVSPSDIPWLMKKPLQLTTLVPLQEYEERLLKQTMLTGSYKEKLQSLFLKYDALWQHWENQVGHRRIKPHHIATGTVNPRPQKQYPINPKAKASIQTVINDLLKQGVLIQQNSIMNTPVYPVPKPDGKWRMVLDYREVNKTIPLIAAQNQHSAGILSSIFRGKYKTTLDLSNGFWAHSITPESYWLTAFTWLGQQYCWTRLPQGFLNSPALFNADVVDLLKEVPNVQVYVDDIYISHDDPREHLEQLEKVFSLLLNAGYVVSLKKSEIAQHEVEFLGFNITKEGRGLTETFKQKLLNITPPRDLKQLQSILGKLNFARNFIPNFSELVKPLYNIIATAPGKYITWTTDNSQQLQNIISMLNSAENLEERNPEVRLIMKVNTSPSAGYIRFYNEFAKRPIMYLNYVYTKAEVKFTNTEKLLTTIHKGLIKALDLGMGQEILVYSPIVSMTKIQKTPLPERKALPIRWITWMSYLEDPRIQFHYDKTLPELQQVPTVTDDIIAKIKHPSEFSMVFYTDGSAIKHPNVNKSHNAGMGIAQVQFKPEFTVINTWSIPLGDHTAQLAEVAAVEFACKKALKIDGPVLIVTDSFYVAESVNKELPYWQSNGFFNNKKKPLKHVSKWKSIADCIQLKPDIIIIHEKGHQPTASTFHTEGNNLADKLATQGSYVVNAGKRTADGSEFEKRTADGSEFESPKKKAKVE

SEQ ID NO: 685 - protein, 2176 aa, synthetic construct
MPAAKRVKLDGGDKKYSIGLDIGTNSVGWAVITDEYKVPSKKFKVLGNTDRHSIKKNLIGALLFDSGETAEATRLKRTARRRYTRRKNRICYLQEIFSNEMAKVDDSFFHRLEESFLVEEDKKHERHPIFGNIVDEVAYHEKYPTIYHLRKKLVDSTDKADLRLIYLALAHMIKFRGHFLIEGDLNPDNSDVDKLFIQLVQTYNQLFEENPINASGVDAKAILSARLSKSRRLENLIAQLPGEKKNGLFGNLIALSLGLTPNFKSNFDLAEDAKLQLSKDTYDDDLDNLLAQIGDQYADLFLAAKNLSDAILLSDILRVNTEITKAPLSASMIKRYDEHHQDLTLLKALVRQQLPEKYKEIFFDQSKNGYAGYIDGGASQEEFYKFIKPILEKMDGTEELLVKLNREDLLRKQRTFDNGSIPHQIHLGELHAILRRQEDFYPFLKDNREKIEKILTFRIPYYVGPLARGNSRFAWMTRKSEETITPWNFEEVVDKGASAQSFIERMTNFDKNLPNEKVLPKHSLLYEYFTVYNELTKVKYVTEGMRKPAFLSGEQKKAIVDLLFKTNRKVTVKQLKEDYFKKIECFDSVEISGVEDRFNASLGTYHDLLKIIKDKDFLDNEENEDILEDIVLTLTLFEDREMIEERLKTYAHLFDDKVMKQLKRRRYTGWGRLSRKLINGIRDKQSGKTILDFLKSDGFANRNFMQLIHDDSLTFKEDIQKAQVSGQGDSLHEHIANLAGSPAIKKGILQTVKVVDELVKVMGRHKPENIVIEMARENQTTQKGQKNSRERMKRIEEGIKELGSQILKEHPVENTQLQNEKLYLYYLQNGRDMYVDQELDINRLSDYDVDHIVPQSFLKDDSIDNKVLTRSDKARGKSDNVPSEEVVKKMKNYWRQLLNAKLITQRKFDNLTKAERGGLSELDKAGFIKRQLVETRQITKHVAQILDSRMNTKYDENDKLIREVKVITLKSKLVSDFRKDFQFYKVREINNYHHAHDAYLNAVVGTALIKKYPKLESEFVYGDYKVYDVRKMIAKSEQEIGKATAKYFFYSNIMNFFKTEITLANGEIRKRPLIETNGETGEIVWDKGRDFATVRKVLSMPQVNIVKKTEVQTGGFSKESILPKRNSDKLIARKKDWDPKKYGGFDSPTVAYSVLVVAKVEKGKSKKLKSVKELLGITIMERSSFEKNPIDFLEAKGYKEVKKDLIIKLPKYSLFELENGRKRMLASAGELQKGNELALPSKYVNFLYLASHYEKLKGSPEDNEQKQLFVEQHKHYLDEIIEQISEFSKRVILADANLDKVLSAYNKHRDKPIREQAENIIHLFTLTNLGAPAAFKYFDTTIDRKRYTSTKEVLDATLIHQSITGLYETRIDLSQLGGDGGGGGEAAAKGSSGGMDPLQLLQPLEAEIKGTKLKAHWNSGATITCVPQAFLEEEVPIKNIWIKTIHGEKEQPVYYLTFKIQGRKVEAEVISSPYDYILVSPSDIPWLMKKPLQLTTLVPLQEYEERLLKQTMLTGSYKEKLQSLFLKYDALWQHWENQVGHRRIKPHHIATGTVNPRPQKQYPINPKAKASIQTVINDLLKQGVLIQQNSIMNTPVYPVPKPDGKWRMVLDYREVNKTIPLIAAQNQHSAGILSSIFRGKYKTTLDLSNGFWAHSITPESYWLTAFTWLGQQYCWTRLPQGFLNSPALFNADVVDLLKEVPNVQVYVDDIYISHDDPREHLEQLEKVFSLLLNAGYVVSLKKSEIAQHEVEFLGFNITKEGRGLTETFKQKLLNITPPRDLKQLQSILGKLNFARNFIPNFSELVKPLYNIIATAPGKYITWTTDNSQQLQNIISMLNSAENLEERNPEVRLIMKVNTSPSAGYIRFYNEFAKRPIMYLNYVYTKAEVKFTNTEKLLTTIHKGLIKALDLGMGQEILVYSPIVSMTKIQKTPLPERKALPIRWITWMSYLEDPRIQFHYDKTLPELQQVPTVTDDIIAKIKHPSEFSMVFYTDGSAIKHPNVNKSHNAGMGIAQVQFKPEFTVINTWSIPLGDHTAQLAEVAAVEFACKKALKIDGPVLIVTDSFYVAESVNKELPYWQSNGFFNNKKKPLKHVSKWKSIADCIQLKPDIIIIHEKGHQPTASTFHTEGNNLADKLATQGSYVVNAGKRTADGSEFEKRTADGSEFESPKKKAKVE

SEQ ID NO: 686 - protein, 2176 aa, synthetic construct
MPAAKRVKLDGGDKKYSIGLDIGTNSVGWAVITDEYKVPSKKFKVLGNTDRHSIKKNLIGALLFDSGETAEATRLKRTARRRYTRRKNRICYLQEIFSNEMAKVDDSFFHRLEESFLVEEDKKHERHPIFGNIVDEVAYHEKYPTIYHLRKKLVDSTDKADLRLIYLALAHMIKFRGHFLIEGDLNPDNSDVDKLFIQLVQTYNQLFEENPINASGVDAKAILSARLSKSRRLENLIAQLPGEKKNGLFGNLIALSLGLTPNFKSNFDLAEDAKLQLSKDTYDDDLDNLLAQIGDQYADLFLAAKNLSDAILLSDILRVNTEITKAPLSASMIKRYDEHHQDLTLLKALVRQQLPEKYKEIFFDQSKNGYAGYIDGGASQEEFYKFIKPILEKMDGTEELLVKLNREDLLRKQRTFDNGSIPHQIHLGELHAILRRQEDFYPFLKDNREKIEKILTFRIPYYVGPLARGNSRFAWMTRKSEETITPWNFEEVVDKGASAQSFIERMTNFDKNLPNEKVLPKHSLLYEYFTVYNELTKVKYVTEGMRKPAFLSGEQKKAIVDLLFKTNRKVTVKQLKEDYFKKIECFDSVEISGVEDRFNASLGTYHDLLKIIKDKDFLDNEENEDILEDIVLTLTLFEDREMIEERLKTYAHLFDDKVMKQLKRRRYTGWGRLSRKLINGIRDKQSGKTILDFLKSDGFANRNFMQLIHDDSLTFKEDIQKAQVSGQGDSLHEHIANLAGSPAIKKGILQTVKVVDELVKVMGRHKPENIVIEMARENQTTQKGQKNSRERMKRIEEGIKELGSQILKEHPVENTQLQNEKLYLYYLQNGRDMYVDQELDINRLSDYDVDHIVPQSFLKDDSIDNKVLTRSDKARGKSDNVPSEEVVKKMKNYWRQLLNAKLITQRKFDNLTKAERGGLSELDKAGFIKRQLVETRQITKHVAQILDSRMNTKYDENDKLIREVKVITLKSKLVSDFRKDFQFYKVREINNYHHAHDAYLNAVVGTALIKKYPKLESEFVYGDYKVYDVRKMIAKSEQEIGKATAKYFFYSNIMNFFKTEITLANGEIRKRPLIETNGETGEIVWDKGRDFATVRKVLSMPQVNIVKKTEVQTGGFSKESILPKRNSDKLIARKKDWDPKKYGGFDSPTVAYSVLVVAKVEKGKSKKLKSVKELLGITIMERSSFEKNPIDFLEAKGYKEVKKDLIIKLPKYSLFELENGRKRMLASAGELQKGNELALPSKYVNFLYLASHYEKLKGSPEDNEQKQLFVEQHKHYLDEIIEQISEFSKRVILADANLDKVLSAYNKHRDKPIREQAENIIHLFTLTNLGAPAAFKYFDTTIDRKRYTSTKEVLDATLIHQSITGLYETRIDLSQLGGDGGEAAAKPAPGSSGGMDPLQLLQPLEAEIKGTKLKAHWNSGATITCVPQAFLEEEVPIKNIWIKTIHGEKEQPVYYLTFKIQGRKVEAEVISSPYDYILVSPSDIPWLMKKPLQLTTLVPLQEYEERLLKQTMLTGSYKEKLQSLFLKYDALWQHWENQVGHRRIKPHHIATGTVNPRPQKQYPINPKAKASIQTVINDLLKQGVLIQQNSIMNTPVYPVPKPDGKWRMVLDYREVNKTIPLIAAQNQHSAGILSSIFRGKYKTTLDLSNGFWAHSITPESYWLTAFTWLGQQYCWTRLPQGFLNSPALFNADVVDLLKEVPNVQVYVDDIYISHDDPREHLEQLEKVFSLLLNAGYVVSLKKSEIAQHEVEFLGFNITKEGRGLTETFKQKLLNITPPRDLKQLQSILGKLNFARNFIPNFSELVKPLYNIIATAPGKYITWTTDNSQQLQNIISMLNSAENLEERNPEVRLIMKVNTSPSAGYIRFYNEFAKRPIMYLNYVYTKAEVKFTNTEKLLTTIHKGLIKALDLGMGQEILVYSPIVSMTKIQKTPLPERKALPIRWITWMSYLEDPRIQFHYDKTLPELQQVPTVTDDIIAKIKHPSEFSMVFYTDGSAIKHPNVNKSHNAGMGIAQVQFKPEFTVINTWSIPLGDHTAQLAEVAAVEFACKKALKIDGPVLIVTDSFYVAESVNKELPYWQSNGFFNNKKKPLKHVSKWKSIADCIQLKPDIIIIHEKGHQPTASTFHTEGNNLADKLATQGSYVVNAGKRTADGSEFEKRTADGSEFESPKKKAKVE

SEQ ID NO: 687 - protein, 2174 aa, synthetic construct
MPAAKRVKLDGGDKKYSIGLDIGTNSVGWAVITDEYKVPSKKFKVLGNTDRHSIKKNLIGALLFDSGETAEATRLKRTARRRYTRRKNRICYLQEIFSNEMAKVDDSFFHRLEESFLVEEDKKHERHPIFGNIVDEVAYHEKYPTIYHLRKKLVDSTDKADLRLIYLALAHMIKFRGHFLIEGDLNPDNSDVDKLFIQLVQTYNQLFEENPINASGVDAKAILSARLSKSRRLENLIAQLPGEKKNGLFGNLIALSLGLTPNFKSNFDLAEDAKLQLSKDTYDDDLDNLLAQIGDQYADLFLAAKNLSDAILLSDILRVNTEITKAPLSASMIKRYDEHHQDLTLLKALVRQQLPEKYKEIFFDQSKNGYAGYIDGGASQEEFYKFIKPILEKMDGTEELLVKLNREDLLRKQRTFDNGSIPHQIHLGELHAILRRQEDFYPFLKDNREKIEKILTFRIPYYVGPLARGNSRFAWMTRKSEETITPWNFEEVVDKGASAQSFIERMTNFDKNLPNEKVLPKHSLLYEYFTVYNELTKVKYVTEGMRKPAFLSGEQKKAIVDLLFKTNRKVTVKQLKEDYFKKIECFDSVEISGVEDRFNASLGTYHDLLKIIKDKDFLDNEENEDILEDIVLTLTLFEDREMIEERLKTYAHLFDDKVMKQLKRRRYTGWGRLSRKLINGIRDKQSGKTILDFLKSDGFANRNFMQLIHDDSLTFKEDIQKAQVSGQGDSLHEHIANLAGSPAIKKGILQTVKVVDELVKVMGRHKPENIVIEMARENQTTQKGQKNSRERMKRIEEGIKELGSQILKEHPVENTQLQNEKLYLYYLQNGRDMYVDQELDINRLSDYDVDHIVPQSFLKDDSIDNKVLTRSDKARGKSDNVPSEEVVKKMKNYWRQLLNAKLITQRKFDNLTKAERGGLSELDKAGFIKRQLVETRQITKHVAQILDSRMNTKYDENDKLIREVKVITLKSKLVSDFRKDFQFYKVREINNYHHAHDAYLNAVVGTALIKKYPKLESEFVYGDYKVYDVRKMIAKSEQEIGKATAKYFFYSNIMNFFKTEITLANGEIRKRPLIETNGETGEIVWDKGRDFATVRKVLSMPQVNIVKKTEVQTGGFSKESILPKRNSDKLIARKKDWDPKKYGGFDSPTVAYSVLVVAKVEKGKSKKLKSVKELLGITIMERSSFEKNPIDFLEAKGYKEVKKDLIIKLPKYSLFELENGRKRMLASAGELQKGNELALPSKYVNFLYLASHYEKLKGSPEDNEQKQLFVEQHKHYLDEIIEQISEFSKRVILADANLDKVLSAYNKHRDKPIREQAENIIHLFTLTNLGAPAAFKYFDTTIDRKRYTSTKEVLDATLIHQSITGLYETRIDLSQLGGDGGGGGPAPGSSGGMDPLQLLQPLEAEIKGTKLKAHWNSGATITCVPQAFLEEEVPIKNIWIKTIHGEKEQPVYYLTFKIQGRKVEAEVISSPYDYILVSPSDIPWLMKKPLQLTTLVPLQEYEERLLKQTMLTGSYKEKLQSLFLKYDALWQHWENQVGHRRIKPHHIATGTVNPRPQKQYPINPKAKASIQTVINDLLKQGVLIQQNSIMNTPVYPVPKPDGKWRMVLDYREVNKTIPLIAAQNQHSAGILSSIFRGKYKTTLDLSNGFWAHSITPESYWLTAFTWLGQQYCWTRLPQGFLNSPALFNADVVDLLKEVPNVQVYVDDIYISHDDPREHLEQLEKVFSLLLNAGYVVSLKKSEIAQHEVEFLGFNITKEGRGLTETFKQKLLNITPPRDLKQLQSILGKLNFARNFIPNFSELVKPLYNIIATAPGKYITWTTDNSQQLQNIISMLNSAENLEERNPEVRLIMKVNTSPSAGYIRFYNEFAKRPIMYLNYVYTKAEVKFTNTEKLLTTIHKGLIKALDLGMGQEILVYSPIVSMTKIQKTPLPERKALPIRWITWMSYLEDPRIQFHYDKTLPELQQVPTVTDDIIAKIKHPSEFSMVFYTDGSAIKHPNVNKSHNAGMGIAQVQFKPEFTVINTWSIPLGDHTAQLAEVAAVEFACKKALKIDGPVLIVTDSFYVAESVNKELPYWQSNGFFNNKKKPLKHVSKWKSIADCIQLKPDIIIIHEKGHQPTASTFHTEGNNLADKLATQGSYVVNAGKRTADGSEFEKRTADGSEFESPKKKAKVE

SEQ ID NO: 688 - protein, 2173 aa, synthetic construct
MPAAKRVKLDGGDKKYSIGLDIGTNSVGWAVITDEYKVPSKKFKVLGNTDRHSIKKNLIGALLFDSGETAEATRLKRTARRRYTRRKNRICYLQEIFSNEMAKVDDSFFHRLEESFLVEEDKKHERHPIFGNIVDEVAYHEKYPTIYHLRKKLVDSTDKADLRLIYLALAHMIKFRGHFLIEGDLNPDNSDVDKLFIQLVQTYNQLFEENPINASGVDAKAILSARLSKSRRLENLIAQLPGEKKNGLFGNLIALSLGLTPNFKSNFDLAEDAKLQLSKDTYDDDLDNLLAQIGDQYADLFLAAKNLSDAILLSDILRVNTEITKAPLSASMIKRYDEHHQDLTLLKALVRQQLPEKYKEIFFDQSKNGYAGYIDGGASQEEFYKFIKPILEKMDGTEELLVKLNREDLLRKQRTFDNGSIPHQIHLGELHAILRRQEDFYPFLKDNREKIEKILTFRIPYYVGPLARGNSRFAWMTRKSEETITPWNFEEVVDKGASAQSFIERMTNFDKNLPNEKVLPKHSLLYEYFTVYNELTKVKYVTEGMRKPAFLSGEQKKAIVDLLFKTNRKVTVKQLKEDYFKKIECFDSVEISGVEDRFNASLGTYHDLLKIIKDKDFLDNEENEDILEDIVLTLTLFEDREMIEERLKTYAHLFDDKVMKQLKRRRYTGWGRLSRKLINGIRDKQSGKTILDFLKSDGFANRNFMQLIHDDSLTFKEDIQKAQVSGQGDSLHEHIANLAGSPAIKKGILQTVKVVDELVKVMGRHKPENIVIEMARENQTTQKGQKNSRERMKRIEEGIKELGSQILKEHPVENTQLQNEKLYLYYLQNGRDMYVDQELDINRLSDYDVDHIVPQSFLKDDSIDNKVLTRSDKARGKSDNVPSEEVVKKMKNYWRQLLNAKLITQRKFDNLTKAERGGLSELDKAGFIKRQLVETRQITKHVAQILDSRMNTKYDENDKLIREVKVITLKSKLVSDFRKDFQFYKVREINNYHHAHDAYLNAVVGTALIKKYPKLESEFVYGDYKVYDVRKMIAKSEQEIGKATAKYFFYSNIMNFFKTEITLANGEIRKRPLIETNGETGEIVWDKGRDFATVRKVLSMPQVNIVKKTEVQTGGFSKESILPKRNSDKLIARKKDWDPKKYGGFDSPTVAYSVLVVAKVEKGKSKKLKSVKELLGITIMERSSFEKNPIDFLEAKGYKEVKKDLIIKLPKYSLFELENGRKRMLASAGELQKGNELALPSKYVNFLYLASHYEKLKGSPEDNEQKQLFVEQHKHYLDEIIEQISEFSKRVILADANLDKVLSAYNKHRDKPIREQAENIIHLFTLTNLGAPAAFKYFDTTIDRKRYTSTKEVLDATLIHQSITGLYETRIDLSQLGGDGGEAAAKGSSGGMDPLQLLQPLEAEIKGTKLKAHWNSGATITCVPQAFLEEEVPIKNIWIKTIHGEKEQPVYYLTFKIQGRKVEAEVISSPYDYILVSPSDIPWLMKKPLQLTTLVPLQEYEERLLKQTMLTGSYKEKLQSLFLKYDALWQHWENQVGHRRIKPHHIATGTVNPRPQKQYPINPKAKASIQTVINDLLKQGVLIQQNSIMNTPVYPVPKPDGKWRMVLDYREVNKTIPLIAAQNQHSAGILSSIFRGKYKTTLDLSNGFWAHSITPESYWLTAFTWLGQQYCWTRLPQGFLNSPALFNADVVDLLKEVPNVQVYVDDIYISHDDPREHLEQLEKVFSLLLNAGYVVSLKKSEIAQHEVEFLGFNITKEGRGLTETFKQKLLNITPPRDLKQLQSILGKLNFARNFIPNFSELVKPLYNIIATAPGKYITWTTDNSQQLQNIISMLNSAENLEERNPEVRLIMKVNTSPSAGYIRFYNEFAKRPIMYLNYVYTKAEVKFTNTEKLLTTIHKGLIKALDLGMGQEILVYSPIVSMTKIQKTPLPERKALPIRWITWMSYLEDPRIQFHYDKTLPELQQVPTVTDDIIAKIKHPSEFSMVFYTDGSAIKHPNVNKSHNAGMGIAQVQFKPEFTVINTWSIPLGDHTAQLAEVAAVEFACKKALKIDGPVLIVTDSFYVAESVNKELPYWQSNGFFNNKKKPLKHVSKWKSIADCIQLKPDIIIIHEKGHQPTASTFHTEGNNLADKLATQGSYVVNAGKRTADGSEFEKRTADGSEFESPKKKAKVE

SEQ ID NO: 689 - protein, 2176 aa, synthetic construct
MPAAKRVKLDGGDKKYSIGLDIGTNSVGWAVITDEYKVPSKKFKVLGNTDRHSIKKNLIGALLFDSGETAEATRLKRTARRRYTRRKNRICYLQEIFSNEMAKVDDSFFHRLEESFLVEEDKKHERHPIFGNIVDEVAYHEKYPTIYHLRKKLVDSTDKADLRLIYLALAHMIKFRGHFLIEGDLNPDNSDVDKLFIQLVQTYNQLFEENPINASGVDAKAILSARLSKSRRLENLIAQLPGEKKNGLFGNLIALSLGLTPNFKSNFDLAEDAKLQLSKDTYDDDLDNLLAQIGDQYADLFLAAKNLSDAILLSDILRVNTEITKAPLSASMIKRYDEHHQDLTLLKALVRQQLPEKYKEIFFDQSKNGYAGYIDGGASQEEFYKFIKPILEKMDGTEELLVKLNREDLLRKQRTFDNGSIPHQIHLGELHAILRRQEDFYPFLKDNREKIEKILTFRIPYYVGPLARGNSRFAWMTRKSEETITPWNFEEVVDKGASAQSFIERMTNFDKNLPNEKVLPKHSLLYEYFTVYNELTKVKYVTEGMRKPAFLSGEQKKAIVDLLFKTNRKVTVKQLKEDYFKKIECFDSVEISGVEDRFNASLGTYHDLLKIIKDKDFLDNEENEDILEDIVLTLTLFEDREMIEERLKTYAHLFDDKVMKQLKRRRYTGWGRLSRKLINGIRDKQSGKTILDFLKSDGFANRNFMQLIHDDSLTFKEDIQKAQVSGQGDSLHEHIANLAGSPAIKKGILQTVKVVDELVKVMGRHKPENIVIEMARENQTTQKGQKNSRERMKRIEEGIKELGSQILKEHPVENTQLQNEKLYLYYLQNGRDMYVDQELDINRLSDYDVDHIVPQSFLKDDSIDNKVLTRSDKARGKSDNVPSEEVVKKMKNYWRQLLNAKLITQRKFDNLTKAERGGLSELDKAGFIKRQLVETRQITKHVAQILDSRMNTKYDENDKLIREVKVITLKSKLVSDFRKDFQFYKVREINNYHHAHDAYLNAVVGTALIKKYPKLESEFVYGDYKVYDVRKMIAKSEQEIGKATAKYFFYSNIMNFFKTEITLANGEIRKRPLIETNGETGEIVWDKGRDFATVRKVLSMPQVNIVKKTEVQTGGFSKESILPKRNSDKLIARKKDWDPKKYGGFDSPTVAYSVLVVAKVEKGKSKKLKSVKELLGITIMERSSFEKNPIDFLEAKGYKEVKKDLIIKLPKYSLFELENGRKRMLASAGELQKGNELALPSKYVNFLYLASHYEKLKGSPEDNEQKQLFVEQHKHYLDEIIEQISEFSKRVILADANLDKVLSAYNKHRDKPIREQAENIIHLFTLTNLGAPAAFKYFDTTIDRKRYTSTKEVLDATLIHQSITGLYETRIDLSQLGGDGGEAAAKPAPGGSGGMNPLQLLQPLPAEVKGTKLLAHWNSGATITCIPESFLEDEQPIKQTLIKTIHGEKQQNVYYLTFKVKGRKVEAEVIASPYEYILLSPTDVPWLTQQPLQLTILVPLQEYQDRILNKTALPEEQKQQLKALFTKYDNLWQHWENQVGHRKIRPHNIATGDYPPRPQKQYPINPKAKPSIQIVIDDLLKQGVLTPQNSTMNTPVYPVPKPDGRWRMVLDYREVNKTIPLTAAQNQHSAGILATIVRQKYKTTLDLANGFWAHPITPDSYWLTAFTWQGKQYCWTRLPQGFLNSPALFTADAVDLLKEVPNVQVYVDDIYLSHDNPHEHIQQLEKVFQILLQAGYVVSLKKSEIGQRTVEFLGFNITKEGRGLTDTFKTKLLNVTPPKDLKQLQSILGLLNFARNFIPNFAELVQTLYNLIASSKGKYIEWTEDNTKQLNKVIEALNTASNLEERLPDQRLVIKVNTSPSAGYVRYYNESGKKPIMYLNYVFSKAELKFSMLEKLLTTMHKALIKAMDLAMGQEILVYSPIVSMTKIQKTPLPERKALPIRWITWMTYLEDPRIQFHYDKTLPELKHIPDVYTSSIPPLKHPSQYEGVFCTDGSAIKSPDPTKSNNAGMGIVHAIYNPEYKILNQWSIPLGHHTAQMAEIAAVEFACKKALKVPGPVLVITDSFYVAESANKELPYWKSNGFVNNKKEPLKHISKWKSIAECLSIKPDITIQHEKGHQPINTSIHTEGNALADKLATQGSYVVNAGKRTADGSEFEKRTADGSEFESPKKKAKVE

SEQ ID NO: 690 - protein, 2176 aa, synthetic construct
MPAAKRVKLDGGDKKYSIGLDIGTNSVGWAVITDEYKVPSKKFKVLGNTDRHSIKKNLIGALLFDSGETAEATRLKRTARRRYTRRKNRICYLQEIFSNEMAKVDDSFFHRLEESFLVEEDKKHERHPIFGNIVDEVAYHEKYPTIYHLRKKLVDSTDKADLRLIYLALAHMIKFRGHFLIEGDLNPDNSDVDKLFIQLVQTYNQLFEENPINASGVDAKAILSARLSKSRRLENLIAQLPGEKKNGLFGNLIALSLGLTPNFKSNFDLAEDAKLQLSKDTYDDDLDNLLAQIGDQYADLFLAAKNLSDAILLSDILRVNTEITKAPLSASMIKRYDEHHQDLTLLKALVRQQLPEKYKEIFFDQSKNGYAGYIDGGASQEEFYKFIKPILEKMDGTEELLVKLNREDLLRKQRTFDNGSIPHQIHLGELHAILRRQEDFYPFLKDNREKIEKILTFRIPYYVGPLARGNSRFAWMTRKSEETITPWNFEEVVDKGASAQSFIERMTNFDKNLPNEKVLPKHSLLYEYFTVYNELTKVKYVTEGMRKPAFLSGEQKKAIVDLLFKTNRKVTVKQLKEDYFKKIECFDSVEISGVEDRFNASLGTYHDLLKIIKDKDFLDNEENEDILEDIVLTLTLFEDREMIEERLKTYAHLFDDKVMKQLKRRRYTGWGRLSRKLINGIRDKQSGKTILDFLKSDGFANRNFMQLIHDDSLTFKEDIQKAQVSGQGDSLHEHIANLAGSPAIKKGILQTVKVVDELVKVMGRHKPENIVIEMARENQTTQKGQKNSRERMKRIEEGIKELGSQILKEHPVENTQLQNEKLYLYYLQNGRDMYVDQELDINRLSDYDVDHIVPQSFLKDDSIDNKVLTRSDKARGKSDNVPSEEVVKKMKNYWRQLLNAKLITQRKFDNLTKAERGGLSELDKAGFIKRQLVETRQITKHVAQILDSRMNTKYDENDKLIREVKVITLKSKLVSDFRKDFQFYKVREINNYHHAHDAYLNAVVGTALIKKYPKLESEFVYGDYKVYDVRKMIAKSEQEIGKATAKYFFYSNIMNFFKTEITLANGEIRKRPLIETNGETGEIVWDKGRDFATVRKVLSMPQVNIVKKTEVQTGGFSKESILPKRNSDKLIARKKDWDPKKYGGFDSPTVAYSVLVVAKVEKGKSKKLKSVKELLGITIMERSSFEKNPIDFLEAKGYKEVKKDLIIKLPKYSLFELENGRKRMLASAGELQKGNELALPSKYVNFLYLASHYEKLKGSPEDNEQKQLFVEQHKHYLDEIIEQISEFSKRVILADANLDKVLSAYNKHRDKPIREQAENIIHLFTLTNLGAPAAFKYFDTTIDRKRYTSTKEVLDATLIHQSITGLYETRIDLSQLGGDGGGGSEAAAKPAPGGMNPLQLLQPLPAEVKGTKLLAHWNSGATITCIPESFLEDEQPIKQTLIKTIHGEKQQNVYYLTFKVKGRKVEAEVIASPYEYILLSPTDVPWLTQQPLQLTILVPLQEYQDRILNKTALPEEQKQQLKALFTKYDNLWQHWENQVGHRKIRPHNIATGDYPPRPQKQYPINPKAKPSIQIVIDDLLKQGVLTPQNSTMNTPVYPVPKPDGRWRMVLDYREVNKTIPLTAAQNQHSAGILATIVRQKYKTTLDLANGFWAHPITPDSYWLTAFTWQGKQYCWTRLPQGFLNSPALFTADAVDLLKEVPNVQVYVDDIYLSHDNPHEHIQQLEKVFQILLQAGYVVSLKKSEIGQRTVEFLGFNITKEGRGLTDTFKTKLLNVTPPKDLKQLQSILGLLNFARNFIPNFAELVQTLYNLIASSKGKYIEWTEDNTKQLNKVIEALNTASNLEERLPDQRLVIKVNTSPSAGYVRYYNESGKKPIMYLNYVFSKAELKFSMLEKLLTTMHKALIKAMDLAMGQEILVYSPIVSMTKIQKTPLPERKALPIRWITWMTYLEDPRIQFHYDKTLPELKHIPDVYTSSIPPLKHPSQYEGVFCTDGSAIKSPDPTKSNNAGMGIVHAIYNPEYKILNQWSIPLGHHTAQMAEIAAVEFACKKALKVPGPVLVITDSFYVAESANKELPYWKSNGFVNNKKEPLKHISKWKSIAECLSIKPDITIQHEKGHQPINTSIHTEGNALADKLATQGSYVVNAGKRTADGSEFEKRTADGSEFESPKKKAKVE

SEQ ID NO: 691 - protein, 2173 aa, synthetic construct
MPAAKRVKLDGGDKKYSIGLDIGTNSVGWAVITDEYKVPSKKFKVLGNTDRHSIKKNLIGALLFDSGETAEATRLKRTARRRYTRRKNRICYLQEIFSNEMAKVDDSFFHRLEESFLVEEDKKHERHPIFGNIVDEVAYHEKYPTIYHLRKKLVDSTDKADLRLIYLALAHMIKFRGHFLIEGDLNPDNSDVDKLFIQLVQTYNQLFEENPINASGVDAKAILSARLSKSRRLENLIAQLPGEKKNGLFGNLIALSLGLTPNFKSNFDLAEDAKLQLSKDTYDDDLDNLLAQIGDQYADLFLAAKNLSDAILLSDILRVNTEITKAPLSASMIKRYDEHHQDLTLLKALVRQQLPEKYKEIFFDQSKNGYAGYIDGGASQEEFYKFIKPILEKMDGTEELLVKLNREDLLRKQRTFDNGSIPHQIHLGELHAILRRQEDFYPFLKDNREKIEKILTFRIPYYVGPLARGNSRFAWMTRKSEETITPWNFEEVVDKGASAQSFIERMTNFDKNLPNEKVLPKHSLLYEYFTVYNELTKVKYVTEGMRKPAFLSGEQKKAIVDLLFKTNRKVTVKQLKEDYFKKIECFDSVEISGVEDRFNASLGTYHDLLKIIKDKDFLDNEENEDILEDIVLTLTLFEDREMIEERLKTYAHLFDDKVMKQLKRRRYTGWGRLSRKLINGIRDKQSGKTILDFLKSDGFANRNFMQLIHDDSLTFKEDIQKAQVSGQGDSLHEHIANLAGSPAIKKGILQTVKVVDELVKVMGRHKPENIVIEMARENQTTQKGQKNSRERMKRIEEGIKELGSQILKEHPVENTQLQNEKLYLYYLQNGRDMYVDQELDINRLSDYDVDHIVPQSFLKDDSIDNKVLTRSDKARGKSDNVPSEEVVKKMKNYWRQLLNAKLITQRKFDNLTKAERGGLSELDKAGFIKRQLVETRQITKHVAQILDSRMNTKYDENDKLIREVKVITLKSKLVSDFRKDFQFYKVREINNYHHAHDAYLNAVVGTALIKKYPKLESEFVYGDYKVYDVRKMIAKSEQEIGKATAKYFFYSNIMNFFKTEITLANGEIRKRPLIETNGETGEIVWDKGRDFATVRKVLSMPQVNIVKKTEVQTGGFSKESILPKRNSDKLIARKKDWDPKKYGGFDSPTVAYSVLVVAKVEKGKSKKLKSVKELLGITIMERSSFEKNPIDFLEAKGYKEVKKDLIIKLPKYSLFELENGRKRMLASAGELQKGNELALPSKYVNFLYLASHYEKLKGSPEDNEQKQLFVEQHKHYLDEIIEQISEFSKRVILADANLDKVLSAYNKHRDKPIREQAENIIHLFTLTNLGAPAAFKYFDTTIDRKRYTSTKEVLDATLIHQSITGLYETRIDLSQLGGDGGGSSEAAAKGGMNPLQLLQPLPAEVKGTKLLAHWNSGATITCIPESFLEDEQPIKQTLIKTIHGEKQQNVYYLTFKVKGRKVEAEVIASPYEYILLSPTDVPWLTQQPLQLTILVPLQEYQDRILNKTALPEEQKQQLKALFTKYDNLWQHWENQVGHRKIRPHNIATGDYPPRPQKQYPINPKAKPSIQIVIDDLLKQGVLTPQNSTMNTPVYPVPKPDGRWRMVLDYREVNKTIPLTAAQNQHSAGILATIVRQKYKTTLDLANGFWAHPITPDSYWLTAFTWQGKQYCWTRLPQGFLNSPALFTADAVDLLKEVPNVQVYVDDIYLSHDNPHEHIQQLEKVFQILLQAGYVVSLKKSEIGQRTVEFLGFNITKEGRGLTDTFKTKLLNVTPPKDLKQLQSILGLLNFARNFIPNFAELVQTLYNLIASSKGKYIEWTEDNTKQLNKVIEALNTASNLEERLPDQRLVIKVNTSPSAGYVRYYNESGKKPIMYLNYVFSKAELKFSMLEKLLTTMHKALIKAMDLAMGQEILVYSPIVSMTKIQKTPLPERKALPIRWITWMTYLEDPRIQFHYDKTLPELKHIPDVYTSSIPPLKHPSQYEGVFCTDGSAIKSPDPTKSNNAGMGIVHAIYNPEYKILNQWSIPLGHHTAQMAEIAAVEFACKKALKVPGPVLVITDSFYVAESANKELPYWKSNGFVNNKKEPLKHISKWKSIAECLSIKPDITIQHEKGHQPINTSIHTEGNALADKLATQGSYVVNAGKRTADGSEFEKRTADGSEFESPKKKAKVE

SEQ ID NO: 692 - protein, 2180 aa, synthetic construct
MPAAKRVKLDGGDKKYSIGLDIGTNSVGWAVITDEYKVPSKKFKVLGNTDRHSIKKNLIGALLFDSGETAEATRLKRTARRRYTRRKNRICYLQEIFSNEMAKVDDSFFHRLEESFLVEEDKKHERHPIFGNIVDEVAYHEKYPTIYHLRKKLVDSTDKADLRLIYLALAHMIKFRGHFLIEGDLNPDNSDVDKLFIQLVQTYNQLFEENPINASGVDAKAILSARLSKSRRLENLIAQLPGEKKNGLFGNLIALSLGLTPNFKSNFDLAEDAKLQLSKDTYDDDLDNLLAQIGDQYADLFLAAKNLSDAILLSDILRVNTEITKAPLSASMIKRYDEHHQDLTLLKALVRQQLPEKYKEIFFDQSKNGYAGYIDGGASQEEFYKFIKPILEKMDGTEELLVKLNREDLLRKQRTFDNGSIPHQIHLGELHAILRRQEDFYPFLKDNREKIEKILTFRIPYYVGPLARGNSRFAWMTRKSEETITPWNFEEVVDKGASAQSFIERMTNFDKNLPNEKVLPKHSLLYEYFTVYNELTKVKYVTEGMRKPAFLSGEQKKAIVDLLFKTNRKVTVKQLKEDYFKKIECFDSVEISGVEDRFNASLGTYHDLLKIIKDKDFLDNEENEDILEDIVLTLTLFEDREMIEERLKTYAHLFDDKVMKQLKRRRYTGWGRLSRKLINGIRDKQSGKTILDFLKSDGFANRNFMQLIHDDSLTFKEDIQKAQVSGQGDSLHEHIANLAGSPAIKKGILQTVKVVDELVKVMGRHKPENIVIEMARENQTTQKGQKNSRERMKRIEEGIKELGSQILKEHPVENTQLQNEKLYLYYLQNGRDMYVDQELDINRLSDYDVDHIVPQSFLKDDSIDNKVLTRSDKARGKSDNVPSEEVVKKMKNYWRQLLNAKLITQRKFDNLTKAERGGLSELDKAGFIKRQLVETRQITKHVAQILDSRMNTKYDENDKLIREVKVITLKSKLVSDFRKDFQFYKVREINNYHHAHDAYLNAVVGTALIKKYPKLESEFVYGDYKVYDVRKMIAKSEQEIGKATAKYFFYSNIMNFFKTEITLANGEIRKRPLIETNGETGEIVWDKGRDFATVRKVLSMPQVNIVKKTEVQTGGFSKESILPKRNSDKLIARKKDWDPKKYGGFDSPTVAYSVLVVAKVEKGKSKKLKSVKELLGITIMERSSFEKNPIDFLEAKGYKEVKKDLIIKLPKYSLFELENGRKRMLASAGELQKGNELALPSKYVNFLYLASHYEKLKGSPEDNEQKQLFVEQHKHYLDEIIEQISEFSKRVILADANLDKVLSAYNKHRDKPIREQAENIIHLFTLTNLGAPAAFKYFDTTIDRKRYTSTKEVLDATLIHQSITGLYETRIDLSQLGGDGGEAAAKGGGGSEAAAKGGMNPLQLLQPLPAEVKGTKLLAHWNSGATITCIPESFLEDEQPIKQTLIKTIHGEKQQNVYYLTFKVKGRKVEAEVIASPYEYILLSPTDVPWLTQQPLQLTILVPLQEYQDRILNKTALPEEQKQQLKALFTKYDNLWQHWENQVGHRKIRPHNIATGDYPPRPQKQYPINPKAKPSIQIVIDDLLKQGVLTPQNSTMNTPVYPVPKPDGRWRMVLDYREVNKTIPLTAAQNQHSAGILATIVRQKYKTTLDLANGFWAHPITPDSYWLTAFTWQGKQYCWTRLPQGFLNSPALFTADAVDLLKEVPNVQVYVDDIYLSHDNPHEHIQQLEKVFQILLQAGYVVSLKKSEIGQRTVEFLGFNITKEGRGLTDTFKTKLLNVTPPKDLKQLQSILGLLNFARNFIPNFAELVQTLYNLIASSKGKYIEWTEDNTKQLNKVIEALNTASNLEERLPDQRLVIKVNTSPSAGYVRYYNESGKKPIMYLNYVFSKAELKFSMLEKLLTTMHKALIKAMDLAMGQEILVYSPIVSMTKIQKTPLPERKALPIRWITWMTYLEDPRIQFHYDKTLPELKHIPDVYTSSIPPLKHPSQYEGVFCTDGSAIKSPDPTKSNNAGMGIVHAIYNPEYKILNQWSIPLGHHTAQMAEIAAVEFACKKALKVPGPVLVITDSFYVAESANKELPYWKSNGFVNNKKEPLKHISKWKSIAECLSIKPDITIQHEKGHQPINTSIHTEGNALADKLATQGSYVVNAGKRTADGSEFEKRTADGSEFESPKKKAKVE

SEQ ID NO: 693 - protein, 2170 aa, synthetic construct
MPAAKRVKLDGGDKKYSIGLDIGTNSVGWAVITDEYKVPSKKFKVLGNTDRHSIKKNLIGALLFDSGETAEATRLKRTARRRYTRRKNRICYLQEIFSNEMAKVDDSFFHRLEESFLVEEDKKHERHPIFGNIVDEVAYHEKYPTIYHLRKKLVDSTDKADLRLIYLALAHMIKFRGHFLIEGDLNPDNSDVDKLFIQLVQTYNQLFEENPINASGVDAKAILSARLSKSRRLENLIAQLPGEKKNGLFGNLIALSLGLTPNFKSNFDLAEDAKLQLSKDTYDDDLDNLLAQIGDQYADLFLAAKNLSDAILLSDILRVNTEITKAPLSASMIKRYDEHHQDLTLLKALVRQQLPEKYKEIFFDQSKNGYAGYIDGGASQEEFYKFIKPILEKMDGTEELLVKLNREDLLRKQRTFDNGSIPHQIHLGELHAILRRQEDFYPFLKDNREKIEKILTFRIPYYVGPLARGNSRFAWMTRKSEETITPWNFEEVVDKGASAQSFIERMTNFDKNLPNEKVLPKHSLLYEYFTVYNELTKVKYVTEGMRKPAFLSGEQKKAIVDLLFKTNRKVTVKQLKEDYFKKIECFDSVEISGVEDRFNASLGTYHDLLKIIKDKDFLDNEENEDILEDIVLTLTLFEDREMIEERLKTYAHLFDDKVMKQLKRRRYTGWGRLSRKLINGIRDKQSGKTILDFLKSDGFANRNFMQLIHDDSLTFKEDIQKAQVSGQGDSLHEHIANLAGSPAIKKGILQTVKVVDELVKVMGRHKPENIVIEMARENQTTQKGQKNSRERMKRIEEGIKELGSQILKEHPVENTQLQNEKLYLYYLQNGRDMYVDQELDINRLSDYDVDHIVPQSFLKDDSIDNKVLTRSDKARGKSDNVPSEEVVKKMKNYWRQLLNAKLITQRKFDNLTKAERGGLSELDKAGFIKRQLVETRQITKHVAQILDSRMNTKYDENDKLIREVKVITLKSKLVSDFRKDFQFYKVREINNYHHAHDAYLNAVVGTALIKKYPKLESEFVYGDYKVYDVRKMIAKSEQEIGKATAKYFFYSNIMNFFKTEITLANGEIRKRPLIETNGETGEIVWDKGRDFATVRKVLSMPQVNIVKKTEVQTGGFSKESILPKRNSDKLIARKKDWDPKKYGGFDSPTVAYSVLVVAKVEKGKSKKLKSVKELLGITIMERSSFEKNPIDFLEAKGYKEVKKDLIIKLPKYSLFELENGRKRMLASAGELQKGNELALPSKYVNFLYLASHYEKLKGSPEDNEQKQLFVEQHKHYLDEIIEQISEFSKRVILADANLDKVLSAYNKHRDKPIREQAENIIHLFTLTNLGAPAAFKYFDTTIDRKRYTSTKEVLDATLIHQSITGLYETRIDLSQLGGDGGPAPAPGGMNPLQLLQPLPAEVKGTKLLAHWNSGATITCIPESFLEDEQPIKQTLIKTIHGEKQQNVYYLTFKVKGRKVEAEVIASPYEYILLSPTDVPWLTQQPLQLTILVPLQEYQDRILNKTALPEEQKQQLKALFTKYDNLWQHWENQVGHRKIRPHNIATGDYPPRPQKQYPINPKAKPSIQIVIDDLLKQGVLTPQNSTMNTPVYPVPKPDGRWRMVLDYREVNKTIPLTAAQNQHSAGILATIVRQKYKTTLDLANGFWAHPITPDSYWLTAFTWQGKQYCWTRLPQGFLNSPALFTADAVDLLKEVPNVQVYVDDIYLSHDNPHEHIQQLEKVFQILLQAGYVVSLKKSEIGQRTVEFLGFNITKEGRGLTDTFKTKLLNVTPPKDLKQLQSILGLLNFARNFIPNFAELVQTLYNLIASSKGKYIEWTEDNTKQLNKVIEALNTASNLEERLPDQRLVIKVNTSPSAGYVRYYNESGKKPIMYLNYVFSKAELKFSMLEKLLTTMHKALIKAMDLAMGQEILVYSPIVSMTKIQKTPLPERKALPIRWITWMTYLEDPRIQFHYDKTLPELKHIPDVYTSSIPPLKHPSQYEGVFCTDGSAIKSPDPTKSNNAGMGIVHAIYNPEYKILNQWSIPLGHHTAQMAEIAAVEFACKKALKVPGPVLVITDSFYVAESANKELPYWKSNGFVNNKKEPLKHISKWKSIAECLSIKPDITIQHEKGHQPINTSIHTEGNALADKLATQGSYVVNAGKRTADGSEFEKRTADGSEFESPKKKAKVE

SEQ ID NO: 694 - protein, 2185 aa, synthetic construct
MPAAKRVKLDGGDKKYSIGLDIGTNSVGWAVITDEYKVPSKKFKVLGNTDRHSIKKNLIGALLFDSGETAEATRLKRTARRRYTRRKNRICYLQEIFSNEMAKVDDSFFHRLEESFLVEEDKKHERHPIFGNIVDEVAYHEKYPTIYHLRKKLVDSTDKADLRLIYLALAHMIKFRGHFLIEGDLNPDNSDVDKLFIQLVQTYNQLFEENPINASGVDAKAILSARLSKSRRLENLIAQLPGEKKNGLFGNLIALSLGLTPNFKSNFDLAEDAKLQLSKDTYDDDLDNLLAQIGDQYADLFLAAKNLSDAILLSDILRVNTEITKAPLSASMIKRYDEHHQDLTLLKALVRQQLPEKYKEIFFDQSKNGYAGYIDGGASQEEFYKFIKPILEKMDGTEELLVKLNREDLLRKQRTFDNGSIPHQIHLGELHAILRRQEDFYPFLKDNREKIEKILTFRIPYYVGPLARGNSRFAWMTRKSEETITPWNFEEVVDKGASAQSFIERMTNFDKNLPNEKVLPKHSLLYEYFTVYNELTKVKYVTEGMRKPAFLSGEQKKAIVDLLFKTNRKVTVKQLKEDYFKKIECFDSVEISGVEDRFNASLGTYHDLLKIIKDKDFLDNEENEDILEDIVLTLTLFEDREMIEERLKTYAHLFDDKVMKQLKRRRYTGWGRLSRKLINGIRDKQSGKTILDFLKSDGFANRNFMQLIHDDSLTFKEDIQKAQVSGQGDSLHEHIANLAGSPAIKKGILQTVKVVDELVKVMGRHKPENIVIEMARENQTTQKGQKNSRERMKRIEEGIKELGSQILKEHPVENTQLQNEKLYLYYLQNGRDMYVDQELDINRLSDYDVDHIVPQSFLKDDSIDNKVLTRSDKARGKSDNVPSEEVVKKMKNYWRQLLNAKLITQRKFDNLTKAERGGLSELDKAGFIKRQLVETRQITKHVAQILDSRMNTKYDENDKLIREVKVITLKSKLVSDFRKDFQFYKVREINNYHHAHDAYLNAVVGTALIKKYPKLESEFVYGDYKVYDVRKMIAKSEQEIGKATAKYFFYSNIMNFFKTEITLANGEIRKRPLIETNGETGEIVWDKGRDFATVRKVLSMPQVNIVKKTEVQTGGFSKESILPKRNSDKLIARKKDWDPKKYGGFDSPTVAYSVLVVAKVEKGKSKKLKSVKELLGITIMERSSFEKNPIDFLEAKGYKEVKKDLIIKLPKYSLFELENGRKRMLASAGELQKGNELALPSKYVNFLYLASHYEKLKGSPEDNEQKQLFVEQHKHYLDEIIEQISEFSKRVILADANLDKVLSAYNKHRDKPIREQAENIIHLFTLTNLGAPAAFKYFDTTIDRKRYTSTKEVLDATLIHQSITGLYETRIDLSQLGGDGGEAAAKEAAAKEAAAKEAAAKGGMNPLQLLQPLPAEVKGTKLLAHWNSGATITCIPESFLEDEQPIKQTLIKTIHGEKQQNVYYLTFKVKGRKVEAEVIASPYEYILLSPTDVPWLTQQPLQLTILVPLQEYQDRILNKTALPEEQKQQLKALFTKYDNLWQHWENQVGHRKIRPHNIATGDYPPRPQKQYPINPKAKPSIQIVIDDLLKQGVLTPQNSTMNTPVYPVPKPDGRWRMVLDYREVNKTIPLTAAQNQHSAGILATIVRQKYKTTLDLANGFWAHPITPDSYWLTAFTWQGKQYCWTRLPQGFLNSPALFTADAVDLLKEVPNVQVYVDDIYLSHDNPHEHIQQLEKVFQILLQAGYVVSLKKSEIGQRTVEFLGFNITKEGRGLTDTFKTKLLNVTPPKDLKQLQSILGLLNFARNFIPNFAELVQTLYNLIASSKGKYIEWTEDNTKQLNKVIEALNTASNLEERLPDQRLVIKVNTSPSAGYVRYYNESGKKPIMYLNYVFSKAELKFSMLEKLLTTMHKALIKAMDLAMGQEILVYSPIVSMTKIQKTPLPERKALPIRWITWMTYLEDPRIQFHYDKTLPELKHIPDVYTSSIPPLKHPSQYEGVFCTDGSAIKSPDPTKSNNAGMGIVHAIYNPEYKILNQWSIPLGHHTAQMAEIAAVEFACKKALKVPGPVLVITDSFYVAESANKELPYWKSNGFVNNKKEPLKHISKWKSIAECLSIKPDITIQHEKGHQPINTSIHTEGNALADKLATQGSYVVNAGKRTADGSEFEKRTADGSEFESPKKKAKVE

SEQ ID NO: 695 - protein, 2081 aa, synthetic construct
MPAAKRVKLDGGDKKYSIGLDIGTNSVGWAVITDEYKVPSKKFKVLGNTDRHSIKKNLIGALLFDSGETAEATRLKRTARRRYTRRKNRICYLQEIFSNEMAKVDDSFFHRLEESFLVEEDKKHERHPIFGNIVDEVAYHEKYPTIYHLRKKLVDSTDKADLRLIYLALAHMIKFRGHFLIEGDLNPDNSDVDKLFIQLVQTYNQLFEENPINASGVDAKAILSARLSKSRRLENLIAQLPGEKKNGLFGNLIALSLGLTPNFKSNFDLAEDAKLQLSKDTYDDDLDNLLAQIGDQYADLFLAAKNLSDAILLSDILRVNTEITKAPLSASMIKRYDEHHQDLTLLKALVRQQLPEKYKEIFFDQSKNGYAGYIDGGASQEEFYKFIKPILEKMDGTEELLVKLNREDLLRKQRTFDNGSIPHQIHLGELHAILRRQEDFYPFLKDNREKIEKILTFRIPYYVGPLARGNSRFAWMTRKSEETITPWNFEEVVDKGASAQSFIERMTNFDKNLPNEKVLPKHSLLYEYFTVYNELTKVKYVTEGMRKPAFLSGEQKKAIVDLLFKTNRKVTVKQLKEDYFKKIECFDSVEISGVEDRFNASLGTYHDLLKIIKDKDFLDNEENEDILEDIVLTLTLFEDREMIEERLKTYAHLFDDKVMKQLKRRRYTGWGRLSRKLINGIRDKQSGKTILDFLKSDGFANRNFMQLIHDDSLTFKEDIQKAQVSGQGDSLHEHIANLAGSPAIKKGILQTVKVVDELVKVMGRHKPENIVIEMARENQTTQKGQKNSRERMKRIEEGIKELGSQILKEHPVENTQLQNEKLYLYYLQNGRDMYVDQELDINRLSDYDVDHIVPQSFLKDDSIDNKVLTRSDKARGKSDNVPSEEVVKKMKNYWRQLLNAKLITQRKFDNLTKAERGGLSELDKAGFIKRQLVETRQITKHVAQILDSRMNTKYDENDKLIREVKVITLKSKLVSDFRKDFQFYKVREINNYHHAHDAYLNAVVGTALIKKYPKLESEFVYGDYKVYDVRKMIAKSEQEIGKATAKYFFYSNIMNFFKTEITLANGEIRKRPLIETNGETGEIVWDKGRDFATVRKVLSMPQVNIVKKTEVQTGGFSKESILPKRNSDKLIARKKDWDPKKYGGFDSPTVAYSVLVVAKVEKGKSKKLKSVKELLGITIMERSSFEKNPIDFLEAKGYKEVKKDLIIKLPKYSLFELENGRKRMLASAGELQKGNELALPSKYVNFLYLASHYEKLKGSPEDNEQKQLFVEQHKHYLDEIIEQISEFSKRVILADANLDKVLSAYNKHRDKPIREQAENIIHLFTLTNLGAPAAFKYFDTTIDRKRYTSTKEVLDATLIHQSITGLYETRIDLSQLGGDGGPAPAPGGVPWLTQQPLQLTILVPLQEYQDRILNKTALPEEQKQQLKALFTKYDNLWQHWENQVGHRKIRPHNIATGDYPPRPQKQYPINPKAKPSIQIVIDDLLKQGVLTPQNSTMNTPVYPVPKPDGRWRMVLDYREVNKTIPLTAAQNQHSAGILATIVRQKYKTTLDLANGFWAHPITPDSYWLTAFTWQGKQYCWTRLPQGFLNSPALFTADAVDLLKEVPNVQVYVDDIYLSHDNPHEHIQQLEKVFQILLQAGYVVSLKKSEIGQRTVEFLGFNITKEGRGLTDTFKTKLLNVTPPKDLKQLQSILGLLNFARNFIPNFAELVQTLYNLIASSKGKYIEWTEDNTKQLNKVIEALNTASNLEERLPDQRLVIKVNTSPSAGYVRYYNESGKKPIMYLNYVFSKAELKFSMLEKLLTTMHKALIKAMDLAMGQEILVYSPIVSMTKIQKTPLPERKALPIRWITWMTYLEDPRIQFHYDKTLPELKHIPDVYTSSIPPLKHPSQYEGVFCTDGSAIKSPDPTKSNNAGMGIVHAIYNPEYKILNQWSIPLGHHTAQMAEIAAVEFACKKALKVPGPVLVITDSFYVAESANKELPYWKSNGFVNNKKEPLKHISKWKSIAECLSIKPDITIQHEKGHQPINTSIHTEGNALADKLATQGSYVVNAGKRTADGSEFEKRTADGSEFESPKKKAKVE

SEQ ID NO: 696 - protein, 2087 aa, synthetic construct
MPAAKRVKLDGGDKKYSIGLDIGTNSVGWAVITDEYKVPSKKFKVLGNTDRHSIKKNLIGALLFDSGETAEATRLKRTARRRYTRRKNRICYLQEIFSNEMAKVDDSFFHRLEESFLVEEDKKHERHPIFGNIVDEVAYHEKYPTIYHLRKKLVDSTDKADLRLIYLALAHMIKFRGHFLIEGDLNPDNSDVDKLFIQLVQTYNQLFEENPINASGVDAKAILSARLSKSRRLENLIAQLPGEKKNGLFGNLIALSLGLTPNFKSNFDLAEDAKLQLSKDTYDDDLDNLLAQIGDQYADLFLAAKNLSDAILLSDILRVNTEITKAPLSASMIKRYDEHHQDLTLLKALVRQQLPEKYKEIFFDQSKNGYAGYIDGGASQEEFYKFIKPILEKMDGTEELLVKLNREDLLRKQRTFDNGSIPHQIHLGELHAILRRQEDFYPFLKDNREKIEKILTFRIPYYVGPLARGNSRFAWMTRKSEETITPWNFEEVVDKGASAQSFIERMTNFDKNLPNEKVLPKHSLLYEYFTVYNELTKVKYVTEGMRKPAFLSGEQKKAIVDLLFKTNRKVTVKQLKEDYFKKIECFDSVEISGVEDRFNASLGTYHDLLKIIKDKDFLDNEENEDILEDIVLTLTLFEDREMIEERLKTYAHLFDDKVMKQLKRRRYTGWGRLSRKLINGIRDKQSGKTILDFLKSDGFANRNFMQLIHDDSLTFKEDIQKAQVSGQGDSLHEHIANLAGSPAIKKGILQTVKVVDELVKVMGRHKPENIVIEMARENQTTQKGQKNSRERMKRIEEGIKELGSQILKEHPVENTQLQNEKLYLYYLQNGRDMYVDQELDINRLSDYDVDHIVPQSFLKDDSIDNKVLTRSDKARGKSDNVPSEEVVKKMKNYWRQLLNAKLITQRKFDNLTKAERGGLSELDKAGFIKRQLVETRQITKHVAQILDSRMNTKYDENDKLIREVKVITLKSKLVSDFRKDFQFYKVREINNYHHAHDAYLNAVVGTALIKKYPKLESEFVYGDYKVYDVRKMIAKSEQEIGKATAKYFFYSNIMNFFKTEITLANGEIRKRPLIETNGETGEIVWDKGRDFATVRKVLSMPQVNIVKKTEVQTGGFSKESILPKRNSDKLIARKKDWDPKKYGGFDSPTVAYSVLVVAKVEKGKSKKLKSVKELLGITIMERSSFEKNPIDFLEAKGYKEVKKDLIIKLPKYSLFELENGRKRMLASAGELQKGNELALPSKYVNFLYLASHYEKLKGSPEDNEQKQLFVEQHKHYLDEIIEQISEFSKRVILADANLDKVLSAYNKHRDKPIREQAENIIHLFTLTNLGAPAAFKYFDTTIDRKRYTSTKEVLDATLIHQSITGLYETRIDLSQLGGDGGPAPGGGEAAAKGGVPWLTQQPLQLTILVPLQEYQDRILNKTALPEEQKQQLKALFTKYDNLWQHWENQVGHRKIRPHNIATGDYPPRPQKQYPINPKAKPSIQIVIDDLLKQGVLTPQNSTMNTPVYPVPKPDGRWRMVLDYREVNKTIPLTAAQNQHSAGILATIVRQKYKTTLDLANGFWAHPITPDSYWLTAFTWQGKQYCWTRLPQGFLNSPALFTADAVDLLKEVPNVQVYVDDIYLSHDNPHEHIQQLEKVFQILLQAGYVVSLKKSEIGQRTVEFLGFNITKEGRGLTDTFKTKLLNVTPPKDLKQLQSILGLLNFARNFIPNFAELVQTLYNLIASSKGKYIEWTEDNTKQLNKVIEALNTASNLEERLPDQRLVIKVNTSPSAGYVRYYNESGKKPIMYLNYVFSKAELKFSMLEKLLTTMHKALIKAMDLAMGQEILVYSPIVSMTKIQKTPLPERKALPIRWITWMTYLEDPRIQFHYDKTLPELKHIPDVYTSSIPPLKHPSQYEGVFCTDGSAIKSPDPTKSNNAGMGIVHAIYNPEYKILNQWSIPLGHHTAQMAEIAAVEFACKKALKVPGPVLVITDSFYVAESANKELPYWKSNGFVNNKKEPLKHISKWKSIAECLSIKPDITIQHEKGHQPINTSIHTEGNALADKLATQGSYVVNAGKRTADGSEFEKRTADGSEFESPKKKAKVE

SEQ ID NO: 697 - protein, 2087 aa, synthetic construct
MPAAKRVKLDGGDKKYSIGLDIGTNSVGWAVITDEYKVPSKKFKVLGNTDRHSIKKNLIGALLFDSGETAEATRLKRTARRRYTRRKNRICYLQEIFSNEMAKVDDSFFHRLEESFLVEEDKKHERHPIFGNIVDEVAYHEKYPTIYHLRKKLVDSTDKADLRLIYLALAHMIKFRGHFLIEGDLNPDNSDVDKLFIQLVQTYNQLFEENPINASGVDAKAILSARLSKSRRLENLIAQLPGEKKNGLFGNLIALSLGLTPNFKSNFDLAEDAKLQLSKDTYDDDLDNLLAQIGDQYADLFLAAKNLSDAILLSDILRVNTEITKAPLSASMIKRYDEHHQDLTLLKALVRQQLPEKYKEIFFDQSKNGYAGYIDGGASQEEFYKFIKPILEKMDGTEELLVKLNREDLLRKQRTFDNGSIPHQIHLGELHAILRRQEDFYPFLKDNREKIEKILTFRIPYYVGPLARGNSRFAWMTRKSEETITPWNFEEVVDKGASAQSFIERMTNFDKNLPNEKVLPKHSLLYEYFTVYNELTKVKYVTEGMRKPAFLSGEQKKAIVDLLFKTNRKVTVKQLKEDYFKKIECFDSVEISGVEDRFNASLGTYHDLLKIIKDKDFLDNEENEDILEDIVLTLTLFEDREMIEERLKTYAHLFDDKVMKQLKRRRYTGWGRLSRKLINGIRDKQSGKTILDFLKSDGFANRNFMQLIHDDSLTFKEDIQKAQVSGQGDSLHEHIANLAGSPAIKKGILQTVKVVDELVKVMGRHKPENIVIEMARENQTTQKGQKNSRERMKRIEEGIKELGSQILKEHPVENTQLQNEKLYLYYLQNGRDMYVDQELDINRLSDYDVDHIVPQSFLKDDSIDNKVLTRSDKARGKSDNVPSEEVVKKMKNYWRQLLNAKLITQRKFDNLTKAERGGLSELDKAGFIKRQLVETRQITKHVAQILDSRMNTKYDENDKLIREVKVITLKSKLVSDFRKDFQFYKVREINNYHHAHDAYLNAVVGTALIKKYPKLESEFVYGDYKVYDVRKMIAKSEQEIGKATAKYFFYSNIMNFFKTEITLANGEIRKRPLIETNGETGEIVWDKGRDFATVRKVLSMPQVNIVKKTEVQTGGFSKESILPKRNSDKLIARKKDWDPKKYGGFDSPTVAYSVLVVAKVEKGKSKKLKSVKELLGITIMERSSFEKNPIDFLEAKGYKEVKKDLIIKLPKYSLFELENGRKRMLASAGELQKGNELALPSKYVNFLYLASHYEKLKGSPEDNEQKQLFVEQHKHYLDEIIEQISEFSKRVILADANLDKVLSAYNKHRDKPIREQAENIIHLFTLTNLGAPAAFKYFDTTIDRKRYTSTKEVLDATLIHQSITGLYETRIDLSQLGGDGGGGGEAAAKGGSGGVPWLTQQPLQLTILVPLQEYQDRILNKTALPEEQKQQLKALFTKYDNLWQHWENQVGHRKIRPHNIATGDYPPRPQKQYPINPKAKPSIQIVIDDLLKQGVLTPQNSTMNTPVYPVPKPDGRWRMVLDYREVNKTIPLTAAQNQHSAGILATIVRQKYKTTLDLANGFWAHPITPDSYWLTAFTWQGKQYCWTRLPQGFLNSPALFTADAVDLLKEVPNVQVYVDDIYLSHDNPHEHIQQLEKVFQILLQAGYVVSLKKSEIGQRTVEFLGFNITKEGRGLTDTFKTKLLNVTPPKDLKQLQSILGLLNFARNFIPNFAELVQTLYNLIASSKGKYIEWTEDNTKQLNKVIEALNTASNLEERLPDQRLVIKVNTSPSAGYVRYYNESGKKPIMYLNYVFSKAELKFSMLEKLLTTMHKALIKAMDLAMGQEILVYSPIVSMTKIQKTPLPERKALPIRWITWMTYLEDPRIQFHYDKTLPELKHIPDVYTSSIPPLKHPSQYEGVFCTDGSAIKSPDPTKSNNAGMGIVHAIYNPEYKILNQWSIPLGHHTAQMAEIAAVEFACKKALKVPGPVLVITDSFYVAESANKELPYWKSNGFVNNKKEPLKHISKWKSIAECLSIKPDITIQHEKGHQPINTSIHTEGNALADKLATQGSYVVNAGKRTADGSEFEKRTADGSEFESPKKKAKVE

SEQ ID NO: 698 - protein, 2087 aa, synthetic construct
MPAAKRVKLDGGDKKYSIGLDIGTNSVGWAVITDEYKVPSKKFKVLGNTDRHSIKKNLIGALLFDSGETAEATRLKRTARRRYTRRKNRICYLQEIFSNEMAKVDDSFFHRLEESFLVEEDKKHERHPIFGNIVDEVAYHEKYPTIYHLRKKLVDSTDKADLRLIYLALAHMIKFRGHFLIEGDLNPDNSDVDKLFIQLVQTYNQLFEENPINASGVDAKAILSARLSKSRRLENLIAQLPGEKKNGLFGNLIALSLGLTPNFKSNFDLAEDAKLQLSKDTYDDDLDNLLAQIGDQYADLFLAAKNLSDAILLSDILRVNTEITKAPLSASMIKRYDEHHQDLTLLKALVRQQLPEKYKEIFFDQSKNGYAGYIDGGASQEEFYKFIKPILEKMDGTEELLVKLNREDLLRKQRTFDNGSIPHQIHLGELHAILRRQEDFYPFLKDNREKIEKILTFRIPYYVGPLARGNSRFAWMTRKSEETITPWNFEEVVDKGASAQSFIERMTNFDKNLPNEKVLPKHSLLYEYFTVYNELTKVKYVTEGMRKPAFLSGEQKKAIVDLLFKTNRKVTVKQLKEDYFKKIECFDSVEISGVEDRFNASLGTYHDLLKIIKDKDFLDNEENEDILEDIVLTLTLFEDREMIEERLKTYAHLFDDKVMKQLKRRRYTGWGRLSRKLINGIRDKQSGKTILDFLKSDGFANRNFMQLIHDDSLTFKEDIQKAQVSGQGDSLHEHIANLAGSPAIKKGILQTVKVVDELVKVMGRHKPENIVIEMARENQTTQKGQKNSRERMKRIEEGIKELGSQILKEHPVENTQLQNEKLYLYYLQNGRDMYVDQELDINRLSDYDVDHIVPQSFLKDDSIDNKVLTRSDKARGKSDNVPSEEVVKKMKNYWRQLLNAKLITQRKFDNLTKAERGGLSELDKAGFIKRQLVETRQITKHVAQILDSRMNTKYDENDKLIREVKVITLKSKLVSDFRKDFQFYKVREINNYHHAHDAYLNAVVGTALIKKYPKLESEFVYGDYKVYDVRKMIAKSEQEIGKATAKYFFYSNIMNFFKTEITLANGEIRKRPLIETNGETGEIVWDKGRDFATVRKVLSMPQVNIVKKTEVQTGGFSKESILPKRNSDKLIARKKDWDPKKYGGFDSPTVAYSVLVVAKVEKGKSKKLKSVKELLGITIMERSSFEKNPIDFLEAKGYKEVKKDLIIKLPKYSLFELENGRKRMLASAGELQKGNELALPSKYVNFLYLASHYEKLKGSPEDNEQKQLFVEQHKHYLDEIIEQISEFSKRVILADANLDKVLSAYNKHRDKPIREQAENIIHLFTLTNLGAPAAFKYFDTTIDRKRYTSTKEVLDATLIHQSITGLYETRIDLSQLGGDGGGGGEAAAKGSSGGVPWLTQQPLQLTILVPLQEYQDRILNKTALPEEQKQQLKALFTKYDNLWQHWENQVGHRKIRPHNIATGDYPPRPQKQYPINPKAKPSIQIVIDDLLKQGVLTPQNSTMNTPVYPVPKPDGRWRMVLDYREVNKTIPLTAAQNQHSAGILATIVRQKYKTTLDLANGFWAHPITPDSYWLTAFTWQGKQYCWTRLPQGFLNSPALFTADAVDLLKEVPNVQVYVDDIYLSHDNPHEHIQQLEKVFQILLQAGYVVSLKKSEIGQRTVEFLGFNITKEGRGLTDTFKTKLLNVTPPKDLKQLQSILGLLNFARNFIPNFAELVQTLYNLIASSKGKYIEWTEDNTKQLNKVIEALNTASNLEERLPDQRLVIKVNTSPSAGYVRYYNESGKKPIMYLNYVFSKAELKFSMLEKLLTTMHKALIKAMDLAMGQEILVYSPIVSMTKIQKTPLPERKALPIRWITWMTYLEDPRIQFHYDKTLPELKHIPDVYTSSIPPLKHPSQYEGVFCTDGSAIKSPDPTKSNNAGMGIVHAIYNPEYKILNQWSIPLGHHTAQMAEIAAVEFACKKALKVPGPVLVITDSFYVAESANKELPYWKSNGFVNNKKEPLKHISKWKSIAECLSIKPDITIQHEKGHQPINTSIHTEGNALADKLATQGSYVVNAGKRTADGSEFEKRTADGSEFESPKKKAKVE

SEQ ID NO: 699 - protein, 2087 aa, synthetic construct
MPAAKRVKLDGGDKKYSIGLDIGTNSVGWAVITDEYKVPSKKFKVLGNTDRHSIKKNLIGALLFDSGETAEATRLKRTARRRYTRRKNRICYLQEIFSNEMAKVDDSFFHRLEESFLVEEDKKHERHPIFGNIVDEVAYHEKYPTIYHLRKKLVDSTDKADLRLIYLALAHMIKFRGHFLIEGDLNPDNSDVDKLFIQLVQTYNQLFEENPINASGVDAKAILSARLSKSRRLENLIAQLPGEKKNGLFGNLIALSLGLTPNFKSNFDLAEDAKLQLSKDTYDDDLDNLLAQIGDQYADLFLAAKNLSDAILLSDILRVNTEITKAPLSASMIKRYDEHHQDLTLLKALVRQQLPEKYKEIFFDQSKNGYAGYIDGGASQEEFYKFIKPILEKMDGTEELLVKLNREDLLRKQRTFDNGSIPHQIHLGELHAILRRQEDFYPFLKDNREKIEKILTFRIPYYVGPLARGNSRFAWMTRKSEETITPWNFEEVVDKGASAQSFIERMTNFDKNLPNEKVLPKHSLLYEYFTVYNELTKVKYVTEGMRKPAFLSGEQKKAIVDLLFKTNRKVTVKQLKEDYFKKIECFDSVEISGVEDRFNASLGTYHDLLKIIKDKDFLDNEENEDILEDIVLTLTLFEDREMIEERLKTYAHLFDDKVMKQLKRRRYTGWGRLSRKLINGIRDKQSGKTILDFLKSDGFANRNFMQLIHDDSLTFKEDIQKAQVSGQGDSLHEHIANLAGSPAIKKGILQTVKVVDELVKVMGRHKPENIVIEMARENQTTQKGQKNSRERMKRIEEGIKELGSQILKEHPVENTQLQNEKLYLYYLQNGRDMYVDQELDINRLSDYDVDHIVPQSFLKDDSIDNKVLTRSDKARGKSDNVPSEEVVKKMKNYWRQLLNAKLITQRKFDNLTKAERGGLSELDKAGFIKRQLVETRQITKHVAQILDSRMNTKYDENDKLIREVKVITLKSKLVSDFRKDFQFYKVREINNYHHAHDAYLNAVVGTALIKKYPKLESEFVYGDYKVYDVRKMIAKSEQEIGKATAKYFFYSNIMNFFKTEITLANGEIRKRPLIETNGETGEIVWDKGRDFATVRKVLSMPQVNIVKKTEVQTGGFSKESILPKRNSDKLIARKKDWDPKKYGGFDSPTVAYSVLVVAKVEKGKSKKLKSVKELLGITIMERSSFEKNPIDFLEAKGYKEVKKDLIIKLPKYSLFELENGRKRMLASAGELQKGNELALPSKYVNFLYLASHYEKLKGSPEDNEQKQLFVEQHKHYLDEIIEQISEFSKRVILADANLDKVLSAYNKHRDKPIREQAENIIHLFTLTNLGAPAAFKYFDTTIDRKRYTSTKEVLDATLIHQSITGLYETRIDLSQLGGDGGGSSGGGEAAAKGGVPWLTQQPLQLTILVPLQEYQDRILNKTALPEEQKQQLKALFTKYDNLWQHWENQVGHRKIRPHNIATGDYPPRPQKQYPINPKAKPSIQIVIDDLLKQGVLTPQNSTMNTPVYPVPKPDGRWRMVLDYREVNKTIPLTAAQNQHSAGILATIVRQKYKTTLDLANGFWAHPITPDSYWLTAFTWQGKQYCWTRLPQGFLNSPALFTADAVDLLKEVPNVQVYVDDIYLSHDNPHEHIQQLEKVFQILLQAGYVVSLKKSEIGQRTVEFLGFNITKEGRGLTDTFKTKLLNVTPPKDLKQLQSILGLLNFARNFIPNFAELVQTLYNLIASSKGKYIEWTEDNTKQLNKVIEALNTASNLEERLPDQRLVIKVNTSPSAGYVRYYNESGKKPIMYLNYVFSKAELKFSMLEKLLTTMHKALIKAMDLAMGQEILVYSPIVSMTKIQKTPLPERKALPIRWITWMTYLEDPRIQFHYDKTLPELKHIPDVYTSSIPPLKHPSQYEGVFCTDGSAIKSPDPTKSNNAGMGIVHAIYNPEYKILNQWSIPLGHHTAQMAEIAAVEFACKKALKVPGPVLVITDSFYVAESANKELPYWKSNGFVNNKKEPLKHISKWKSIAECLSIKPDITIQHEKGHQPINTSIHTEGNALADKLATQGSYVVNAGKRTADGSEFEKRTADGSEFESPKKKAKVE

SEQ ID NO: 700 - protein, 2094 aa, synthetic construct
MPAAKRVKLDGGDKKYSIGLDIGTNSVGWAVITDEYKVPSKKFKVLGNTDRHSIKKNLIGALLFDSGETAEATRLKRTARRRYTRRKNRICYLQEIFSNEMAKVDDSFFHRLEESFLVEEDKKHERHPIFGNIVDEVAYHEKYPTIYHLRKKLVDSTDKADLRLIYLALAHMIKFRGHFLIEGDLNPDNSDVDKLFIQLVQTYNQLFEENPINASGVDAKAILSARLSKSRRLENLIAQLPGEKKNGLFGNLIALSLGLTPNFKSNFDLAEDAKLQLSKDTYDDDLDNLLAQIGDQYADLFLAAKNLSDAILLSDILRVNTEITKAPLSASMIKRYDEHHQDLTLLKALVRQQLPEKYKEIFFDQSKNGYAGYIDGGASQEEFYKFIKPILEKMDGTEELLVKLNREDLLRKQRTFDNGSIPHQIHLGELHAILRRQEDFYPFLKDNREKIEKILTFRIPYYVGPLARGNSRFAWMTRKSEETITPWNFEEVVDKGASAQSFIERMTNFDKNLPNEKVLPKHSLLYEYFTVYNELTKVKYVTEGMRKPAFLSGEQKKAIVDLLFKTNRKVTVKQLKEDYFKKIECFDSVEISGVEDRFNASLGTYHDLLKIIKDKDFLDNEENEDILEDIVLTLTLFEDREMIEERLKTYAHLFDDKVMKQLKRRRYTGWGRLSRKLINGIRDKQSGKTILDFLKSDGFANRNFMQLIHDDSLTFKEDIQKAQVSGQGDSLHEHIANLAGSPAIKKGILQTVKVVDELVKVMGRHKPENIVIEMARENQTTQKGQKNSRERMKRIEEGIKELGSQILKEHPVENTQLQNEKLYLYYLQNGRDMYVDQELDINRLSDYDVDHIVPQSFLKDDSIDNKVLTRSDKARGKSDNVPSEEVVKKMKNYWRQLLNAKLITQRKFDNLTKAERGGLSELDKAGFIKRQLVETRQITKHVAQILDSRMNTKYDENDKLIREVKVITLKSKLVSDFRKDFQFYKVREINNYHHAHDAYLNAVVGTALIKKYPKLESEFVYGDYKVYDVRKMIAKSEQEIGKATAKYFFYSNIMNFFKTEITLANGEIRKRPLIETNGETGEIVWDKGRDFATVRKVLSMPQVNIVKKTEVQTGGFSKESILPKRNSDKLIARKKDWDPKKYGGFDSPTVAYSVLVVAKVEKGKSKKLKSVKELLGITIMERSSFEKNPIDFLEAKGYKEVKKDLIIKLPKYSLFELENGRKRMLASAGELQKGNELALPSKYVNFLYLASHYEKLKGSPEDNEQKQLFVEQHKHYLDEIIEQISEFSKRVILADANLDKVLSAYNKHRDKPIREQAENIIHLFTLTNLGAPAAFKYFDTTIDRKRYTSTKEVLDATLIHQSITGLYETRIDLSQLGGDGGGGSGGSGGSGGSGGSGGSGGVPWLTQQPLQLTILVPLQEYQDRILNKTALPEEQKQQLKALFTKYDNLWQHWENQVGHRKIRPHNIATGDYPPRPQKQYPINPKAKPSIQIVIDDLLKQGVLTPQNSTMNTPVYPVPKPDGRWRMVLDYREVNKTIPLTAAQNQHSAGILATIVRQKYKTTLDLANGFWAHPITPDSYWLTAFTWQGKQYCWTRLPQGFLNSPALFNADAVDLLKEVPNVQVYVDDIYLSHDNPHEHIQQLEKVFQILLQAGYVVSLKKSEIGQRTVEFLGFNITKEGRGLTDTFKTKLLNVTPPKDLKQLQSILGLLNFARNFIPNFAELVQTLYNLIASSPGKYIEWTEDNTKQLNKVIEALNTASNLEERLPDQRLVIKVNTSPSAGYVRYYNESGKKPIMYLNYVFSKAELKFSMLEKLLTTMHKALIKAMDLAMGQEILVYSPIVSMTKIQKTPLPERKALPIRWITWMTYLEDPRIQFHYDKTLPELKHIPDVYTSSIPPLKHPSQYEGVFCTDGSAIKSPDPTKSNNAGMGIVHAIYNPEYKILNQWSIPLGHHTAQMAEIAAVEFACKKALKVPGPVLVITDSFYVAESANKELPYWKSNGFVNNKKEPLKHISKWKSIAECLSIKPDITIQHEKGHQPINTSIHTEGNALADKLATQGSYVVNAGKRTADGSEFEKRTADGSEFESPKKKAKVE

SEQ ID NO: 701 - protein, 2091 aa, synthetic construct
MPAAKRVKLDGGDKKYSIGLDIGTNSVGWAVITDEYKVPSKKFKVLGNTDRHSIKKNLIGALLFDSGETAEATRLKRTARRRYTRRKNRICYLQEIFSNEMAKVDDSFFHRLEESFLVEEDKKHERHPIFGNIVDEVAYHEKYPTIYHLRKKLVDSTDKADLRLIYLALAHMIKFRGHFLIEGDLNPDNSDVDKLFIQLVQTYNQLFEENPINASGVDAKAILSARLSKSRRLENLIAQLPGEKKNGLFGNLIALSLGLTPNFKSNFDLAEDAKLQLSKDTYDDDLDNLLAQIGDQYADLFLAAKNLSDAILLSDILRVNTEITKAPLSASMIKRYDEHHQDLTLLKALVRQQLPEKYKEIFFDQSKNGYAGYIDGGASQEEFYKFIKPILEKMDGTEELLVKLNREDLLRKQRTFDNGSIPHQIHLGELHAILRRQEDFYPFLKDNREKIEKILTFRIPYYVGPLARGNSRFAWMTRKSEETITPWNFEEVVDKGASAQSFIERMTNFDKNLPNEKVLPKHSLLYEYFTVYNELTKVKYVTEGMRKPAFLSGEQKKAIVDLLFKTNRKVTVKQLKEDYFKKIECFDSVEISGVEDRFNASLGTYHDLLKIIKDKDFLDNEENEDILEDIVLTLTLFEDREMIEERLKTYAHLFDDKVMKQLKRRRYTGWGRLSRKLINGIRDKQSGKTILDFLKSDGFANRNFMQLIHDDSLTFKEDIQKAQVSGQGDSLHEHIANLAGSPAIKKGILQTVKVVDELVKVMGRHKPENIVIEMARENQTTQKGQKNSRERMKRIEEGIKELGSQILKEHPVENTQLQNEKLYLYYLQNGRDMYVDQELDINRLSDYDVDHIVPQSFLKDDSIDNKVLTRSDKARGKSDNVPSEEVVKKMKNYWRQLLNAKLITQRKFDNLTKAERGGLSELDKAGFIKRQLVETRQITKHVAQILDSRMNTKYDENDKLIREVKVITLKSKLVSDFRKDFQFYKVREINNYHHAHDAYLNAVVGTALIKKYPKLESEFVYGDYKVYDVRKMIAKSEQEIGKATAKYFFYSNIMNFFKTEITLANGEIRKRPLIETNGETGEIVWDKGRDFATVRKVLSMPQVNIVKKTEVQTGGFSKESILPKRNSDKLIARKKDWDPKKYGGFDSPTVAYSVLVVAKVEKGKSKKLKSVKELLGITIMERSSFEKNPIDFLEAKGYKEVKKDLIIKLPKYSLFELENGRKRMLASAGELQKGNELALPSKYVNFLYLASHYEKLKGSPEDNEQKQLFVEQHKHYLDEIIEQISEFSKRVILADANLDKVLSAYNKHRDKPIREQAENIIHLFTLTNLGAPAAFKYFDTTIDRKRYTSTKEVLDATLIHQSITGLYETRIDLSQLGGDGGEAAAKGGGGSEAAAKGGVPWLTQQPLQLTILVPLQEYQDRILNKTALPEEQKQQLKALFTKYDNLWQHWENQVGHRKIRPHNIATGDYPPRPQKQYPINPKAKPSIQIVIDDLLKQGVLTPQNSTMNTPVYPVPKPDGRWRMVLDYREVNKTIPLTAAQNQHSAGILATIVRQKYKTTLDLANGFWAHPITPDSYWLTAFTWQGKQYCWTRLPQGFLNSPALFNADAVDLLKEVPNVQVYVDDIYLSHDNPHEHIQQLEKVFQILLQAGYVVSLKKSEIGQRTVEFLGFNITKEGRGLTDTFKTKLLNVTPPKDLKQLQSILGLLNFARNFIPNFAELVQTLYNLIASSPGKYIEWTEDNTKQLNKVIEALNTASNLEERLPDQRLVIKVNTSPSAGYVRYYNESGKKPIMYLNYVFSKAELKFSMLEKLLTTMHKALIKAMDLAMGQEILVYSPIVSMTKIQKTPLPERKALPIRWITWMTYLEDPRIQFHYDKTLPELKHIPDVYTSSIPPLKHPSQYEGVFCTDGSAIKSPDPTKSNNAGMGIVHAIYNPEYKILNQWSIPLGHHTAQMAEIAAVEFACKKALKVPGPVLVITDSFYVAESANKELPYWKSNGFVNNKKEPLKHISKWKSIAECLSIKPDITIQHEKGHQPINTSIHTEGNALADKLATQGSYVVNAGKRTADGSEFEKRTADGSEFESPKKKAKVE

SEQ ID NO: 702 - protein, 2091 aa, synthetic construct
MPAAKRVKLDGGDKKYSIGLDIGTNSVGWAVITDEYKVPSKKFKVLGNTDRHSIKKNLIGALLFDSGETAEATRLKRTARRRYTRRKNRICYLQEIFSNEMAKVDDSFFHRLEESFLVEEDKKHERHPIFGNIVDEVAYHEKYPTIYHLRKKLVDSTDKADLRLIYLALAHMIKFRGHFLIEGDLNPDNSDVDKLFIQLVQTYNQLFEENPINASGVDAKAILSARLSKSRRLENLIAQLPGEKKNGLFGNLIALSLGLTPNFKSNFDLAEDAKLQLSKDTYDDDLDNLLAQIGDQYADLFLAAKNLSDAILLSDILRVNTEITKAPLSASMIKRYDEHHQDLTLLKALVRQQLPEKYKEIFFDQSKNGYAGYIDGGASQEEFYKFIKPILEKMDGTEELLVKLNREDLLRKQRTFDNGSIPHQIHLGELHAILRRQEDFYPFLKDNREKIEKILTFRIPYYVGPLARGNSRFAWMTRKSEETITPWNFEEVVDKGASAQSFIERMTNFDKNLPNEKVLPKHSLLYEYFTVYNELTKVKYVTEGMRKPAFLSGEQKKAIVDLLFKTNRKVTVKQLKEDYFKKIECFDSVEISGVEDRFNASLGTYHDLLKIIKDKDFLDNEENEDILEDIVLTLTLFEDREMIEERLKTYAHLFDDKVMKQLKRRRYTGWGRLSRKLINGIRDKQSGKTILDFLKSDGFANRNFMQLIHDDSLTFKEDIQKAQVSGQGDSLHEHIANLAGSPAIKKGILQTVKVVDELVKVMGRHKPENIVIEMARENQTTQKGQKNSRERMKRIEEGIKELGSQILKEHPVENTQLQNEKLYLYYLQNGRDMYVDQELDINRLSDYDVDHIVPQSFLKDDSIDNKVLTRSDKARGKSDNVPSEEVVKKMKNYWRQLLNAKLITQRKFDNLTKAERGGLSELDKAGFIKRQLVETRQITKHVAQILDSRMNTKYDENDKLIREVKVITLKSKLVSDFRKDFQFYKVREINNYHHAHDAYLNAVVGTALIKKYPKLESEFVYGDYKVYDVRKMIAKSEQEIGKATAKYFFYSNIMNFFKTEITLANGEIRKRPLIETNGETGEIVWDKGRDFATVRKVLSMPQVNIVKKTEVQTGGFSKESILPKRNSDKLIARKKDWDPKKYGGFDSPTVAYSVLVVAKVEKGKSKKLKSVKELLGITIMERSSFEKNPIDFLEAKGYKEVKKDLIIKLPKYSLFELENGRKRMLASAGELQKGNELALPSKYVNFLYLASHYEKLKGSPEDNEQKQLFVEQHKHYLDEIIEQISEFSKRVILADANLDKVLSAYNKHRDKPIREQAENIIHLFTLTNLGAPAAFKYFDTTIDRKRYTSTKEVLDATLIHQSITGLYETRIDLSQLGGDGGGGSGGSGGSGGSGGSGGVPWLTQQPLQLTILVPLQEYQDRILNKTALPEEQKQQLKALFTKYDNLWQHWENQVGHRKIRPHNIATGDYPPRPQKQYPINPKAKPSIQIVIDDLLKQGVLTPQNSTMNTPVYPVPKPDGRWRMVLDYREVNKTIPLTAAQNQHSAGILATIVRQKYKTTLDLANGFWAHPITPDSYWLTAFTWQGKQYCWTRLPQGFLNSPALFNADAVDLLKEVPNVQVYVDDIYLSHDNPHEHIQQLEKVFQILLQAGYVVSLKKSEIGQRTVEFLGFNITKEGRGLTDTFKTKLLNVTPPKDLKQLQSILGLLNFARNFIPNFAELVQTLYNLIASSPGKYIEWTEDNTKQLNKVIEALNTASNLEERLPDQRLVIKVNTSPSAGYVRYYNESGKKPIMYLNYVFSKAELKFSMLEKLLTTMHKALIKAMDLAMGQEILVYSPIVSMTKIQKTPLPERKALPIRWITWMTYLEDPRIQFHYDKTLPELKHIPDVYTSSIPPLKHPSQYEGVFCTDGSAIKSPDPTKSNNAGMGIVHAIYNPEYKILNQWSIPLGHHTAQMAEIAAVEFACKKALKVPGPVLVITDSFYVAESANKELPYWKSNGFVNNKKEPLKHISKWKSIAECLSIKPDITIQHEKGHQPINTSIHTEGNALADKLATQGSYVVNAGKRTADGSEFEKRTADGSEFESPKKKAKVE

SEQ ID NO: 703 - protein, 2082 aa, synthetic construct
MPAAKRVKLDGGDKKYSIGLDIGTNSVGWAVITDEYKVPSKKFKVLGNTDRHSIKKNLIGALLFDSGETAEATRLKRTARRRYTRRKNRICYLQEIFSNEMAKVDDSFFHRLEESFLVEEDKKHERHPIFGNIVDEVAYHEKYPTIYHLRKKLVDSTDKADLRLIYLALAHMIKFRGHFLIEGDLNPDNSDVDKLFIQLVQTYNQLFEENPINASGVDAKAILSARLSKSRRLENLIAQLPGEKKNGLFGNLIALSLGLTPNFKSNFDLAEDAKLQLSKDTYDDDLDNLLAQIGDQYADLFLAAKNLSDAILLSDILRVNTEITKAPLSASMIKRYDEHHQDLTLLKALVRQQLPEKYKEIFFDQSKNGYAGYIDGGASQEEFYKFIKPILEKMDGTEELLVKLNREDLLRKQRTFDNGSIPHQIHLGELHAILRRQEDFYPFLKDNREKIEKILTFRIPYYVGPLARGNSRFAWMTRKSEETITPWNFEEVVDKGASAQSFIERMTNFDKNLPNEKVLPKHSLLYEYFTVYNELTKVKYVTEGMRKPAFLSGEQKKAIVDLLFKTNRKVTVKQLKEDYFKKIECFDSVEISGVEDRFNASLGTYHDLLKIIKDKDFLDNEENEDILEDIVLTLTLFEDREMIEERLKTYAHLFDDKVMKQLKRRRYTGWGRLSRKLINGIRDKQSGKTILDFLKSDGFANRNFMQLIHDDSLTFKEDIQKAQVSGQGDSLHEHIANLAGSPAIKKGILQTVKVVDELVKVMGRHKPENIVIEMARENQTTQKGQKNSRERMKRIEEGIKELGSQILKEHPVENTQLQNEKLYLYYLQNGRDMYVDQELDINRLSDYDVDHIVPQSFLKDDSIDNKVLTRSDKARGKSDNVPSEEVVKKMKNYWRQLLNAKLITQRKFDNLTKAERGGLSELDKAGFIKRQLVETRQITKHVAQILDSRMNTKYDENDKLIREVKVITLKSKLVSDFRKDFQFYKVREINNYHHAHDAYLNAVVGTALIKKYPKLESEFVYGDYKVYDVRKMIAKSEQEIGKATAKYFFYSNIMNFFKTEITLANGEIRKRPLIETNGETGEIVWDKGRDFATVRKVLSMPQVNIVKKTEVQTGGFSKESILPKRNSDKLIARKKDWDPKKYGGFDSPTVAYSVLVVAKVEKGKSKKLKSVKELLGITIMERSSFEKNPIDFLEAKGYKEVKKDLIIKLPKYSLFELENGRKRMLASAGELQKGNELALPSKYVNFLYLASHYEKLKGSPEDNEQKQLFVEQHKHYLDEIIEQISEFSKRVILADANLDKVLSAYNKHRDKPIREQAENIIHLFTLTNLGAPAAFKYFDTTIDRKRYTSTKEVLDATLIHQSITGLYETRIDLSQLGGDGGGSSGGSGGVPWLTQQPLQLTILVPLQEYQDRILNKTALPEEQKQQLKALFTKYDNLWQHWENQVGHRKIRPHNIATGDYPPRPQKQYPINPKAKPSIQIVIDDLLKQGVLTPQNSTMNTPVYPVPKPDGRWRMVLDYREVNKTIPLTAAQNQHSAGILATIVRQKYKTTLDLANGFWAHPITPDSYWLTAFTWQGKQYCWTRLPQGFLNSPALFNADAVDLLKEVPNVQVYVDDIYLSHDNPHEHIQQLEKVFQILLQAGYVVSLKKSEIGQRTVEFLGFNITKEGRGLTDTFKTKLLNVTPPKDLKQLQSILGLLNFARNFIPNFAELVQTLYNLIASSPGKYIEWTEDNTKQLNKVIEALNTASNLEERLPDQRLVIKVNTSPSAGYVRYYNESGKKPIMYLNYVFSKAELKFSMLEKLLTTMHKALIKAMDLAMGQEILVYSPIVSMTKIQKTPLPERKALPIRWITWMTYLEDPRIQFHYDKTLPELKHIPDVYTSSIPPLKHPSQYEGVFCTDGSAIKSPDPTKSNNAGMGIVHAIYNPEYKILNQWSIPLGHHTAQMAEIAAVEFACKKALKVPGPVLVITDSFYVAESANKELPYWKSNGFVNNKKEPLKHISKWKSIAECLSIKPDITIQHEKGHQPINTSIHTEGNALADKLATQGSYVVNAGKRTADGSEFEKRTADGSEFESPKKKAKVE

SEQ ID NO: 704 - protein, 2092 aa, synthetic construct
MPAAKRVKLDGGDKKYSIGLDIGTNSVGWAVITDEYKVPSKKFKVLGNTDRHSIKKNLIGALLFDSGETAEATRLKRTARRRYTRRKNRICYLQEIFSNEMAKVDDSFFHRLEESFLVEEDKKHERHPIFGNIVDEVAYHEKYPTIYHLRKKLVDSTDKADLRLIYLALAHMIKFRGHFLIEGDLNPDNSDVDKLFIQLVQTYNQLFEENPINASGVDAKAILSARLSKSRRLENLIAQLPGEKKNGLFGNLIALSLGLTPNFKSNFDLAEDAKLQLSKDTYDDDLDNLLAQIGDQYADLFLAAKNLSDAILLSDILRVNTEITKAPLSASMIKRYDEHHQDLTLLKALVRQQLPEKYKEIFFDQSKNGYAGYIDGGASQEEFYKFIKPILEKMDGTEELLVKLNREDLLRKQRTFDNGSIPHQIHLGELHAILRRQEDFYPFLKDNREKIEKILTFRIPYYVGPLARGNSRFAWMTRKSEETITPWNFEEVVDKGASAQSFIERMTNFDKNLPNEKVLPKHSLLYEYFTVYNELTKVKYVTEGMRKPAFLSGEQKKAIVDLLFKTNRKVTVKQLKEDYFKKIECFDSVEISGVEDRFNASLGTYHDLLKIIKDKDFLDNEENEDILEDIVLTLTLFEDREMIEERLKTYAHLFDDKVMKQLKRRRYTGWGRLSRKLINGIRDKQSGKTILDFLKSDGFANRNFMQLIHDDSLTFKEDIQKAQVSGQGDSLHEHIANLAGSPAIKKGILQTVKVVDELVKVMGRHKPENIVIEMARENQTTQKGQKNSRERMKRIEEGIKELGSQILKEHPVENTQLQNEKLYLYYLQNGRDMYVDQELDINRLSDYDVDHIVPQSFLKDDSIDNKVLTRSDKARGKSDNVPSEEVVKKMKNYWRQLLNAKLITQRKFDNLTKAERGGLSELDKAGFIKRQLVETRQITKHVAQILDSRMNTKYDENDKLIREVKVITLKSKLVSDFRKDFQFYKVREINNYHHAHDAYLNAVVGTALIKKYPKLESEFVYGDYKVYDVRKMIAKSEQEIGKATAKYFFYSNIMNFFKTEITLANGEIRKRPLIETNGETGEIVWDKGRDFATVRKVLSMPQVNIVKKTEVQTGGFSKESILPKRNSDKLIARKKDWDPKKYGGFDSPTVAYSVLVVAKVEKGKSKKLKSVKELLGITIMERSSFEKNPIDFLEAKGYKEVKKDLIIKLPKYSLFELENGRKRMLASAGELQKGNELALPSKYVNFLYLASHYEKLKGSPEDNEQKQLFVEQHKHYLDEIIEQISEFSKRVILADANLDKVLSAYNKHRDKPIREQAENIIHLFTLTNLGAPAAFKYFDTTIDRKRYTSTKEVLDATLIHQSITGLYETRIDLSQLGGDGGSGSETPGTSESATPESGGVPWLTQQPLQLTILVPLQEYQDRILNKTALPEEQKQQLKALFTKYDNLWQHWENQVGHRKIRPHNIATGDYPPRPQKQYPINPKAKPSIQIVIDDLLKQGVLTPQNSTMNTPVYPVPKPDGRWRMVLDYREVNKTIPLTAAQNQHSAGILATIVRQKYKTTLDLANGFWAHPITPDSYWLTAFTWQGKQYCWTRLPQGFLNSPALFNADAVDLLKEVPNVQVYVDDIYLSHDNPHEHIQQLEKVFQILLQAGYVVSLKKSEIGQRTVEFLGFNITKEGRGLTDTFKTKLLNVTPPKDLKQLQSILGKLNFARNFIPNFAELVQTLYNLIASSPGKYIEWTEDNTKQLNKVIEALNTASNLEERLPDQRLVIKVNTSPSAGYVRYYNESGKKPIMYLNYVFSKAELKFSMLEKLLTTMHKALIKAMDLAMGQEILVYSPIVSMTKIQKTPLPERKALPIRWITWMTYLEDPRIQFHYDKTLPELKHIPDVYTSSIPPLKHPSQYEGVFCTDGSAIKSPDPTKSNNAGMGIVHAIYNPEYKILNQWSIPLGHHTAQMAEIAAVEFACKKALKVPGPVLVITDSFYVAESANKELPYWKSNGFVNNKKEPLKHISKWKSIAECLSIKPDITIQHEKGHQPINTSIHTEGNALADKLATQGSYVVNAGKRTADGSEFEKRTADGSEFESPKKKAKVE

SEQ ID NO: 705 - protein, 2087 aa, synthetic construct
MPAAKRVKLDGGDKKYSIGLDIGTNSVGWAVITDEYKVPSKKFKVLGNTDRHSIKKNLIGALLFDSGETAEATRLKRTARRRYTRRKNRICYLQEIFSNEMAKVDDSFFHRLEESFLVEEDKKHERHPIFGNIVDEVAYHEKYPTIYHLRKKLVDSTDKADLRLIYLALAHMIKFRGHFLIEGDLNPDNSDVDKLFIQLVQTYNQLFEENPINASGVDAKAILSARLSKSRRLENLIAQLPGEKKNGLFGNLIALSLGLTPNFKSNFDLAEDAKLQLSKDTYDDDLDNLLAQIGDQYADLFLAAKNLSDAILLSDILRVNTEITKAPLSASMIKRYDEHHQDLTLLKALVRQQLPEKYKEIFFDQSKNGYAGYIDGGASQEEFYKFIKPILEKMDGTEELLVKLNREDLLRKQRTFDNGSIPHQIHLGELHAILRRQEDFYPFLKDNREKIEKILTFRIPYYVGPLARGNSRFAWMTRKSEETITPWNFEEVVDKGASAQSFIERMTNFDKNLPNEKVLPKHSLLYEYFTVYNELTKVKYVTEGMRKPAFLSGEQKKAIVDLLFKTNRKVTVKQLKEDYFKKIECFDSVEISGVEDRFNASLGTYHDLLKIIKDKDFLDNEENEDILEDIVLTLTLFEDREMIEERLKTYAHLFDDKVMKQLKRRRYTGWGRLSRKLINGIRDKQSGKTILDFLKSDGFANRNFMQLIHDDSLTFKEDIQKAQVSGQGDSLHEHIANLAGSPAIKKGILQTVKVVDELVKVMGRHKPENIVIEMARENQTTQKGQKNSRERMKRIEEGIKELGSQILKEHPVENTQLQNEKLYLYYLQNGRDMYVDQELDINRLSDYDVDHIVPQSFLKDDSIDNKVLTRSDKARGKSDNVPSEEVVKKMKNYWRQLLNAKLITQRKFDNLTKAERGGLSELDKAGFIKRQLVETRQITKHVAQILDSRMNTKYDENDKLIREVKVITLKSKLVSDFRKDFQFYKVREINNYHHAHDAYLNAVVGTALIKKYPKLESEFVYGDYKVYDVRKMIAKSEQEIGKATAKYFFYSNIMNFFKTEITLANGEIRKRPLIETNGETGEIVWDKGRDFATVRKVLSMPQVNIVKKTEVQTGGFSKESILPKRNSDKLIARKKDWDPKKYGGFDSPTVAYSVLVVAKVEKGKSKKLKSVKELLGITIMERSSFEKNPIDFLEAKGYKEVKKDLIIKLPKYSLFELENGRKRMLASAGELQKGNELALPSKYVNFLYLASHYEKLKGSPEDNEQKQLFVEQHKHYLDEIIEQISEFSKRVILADANLDKVLSAYNKHRDKPIREQAENIIHLFTLTNLGAPAAFKYFDTTIDRKRYTSTKEVLDATLIHQSITGLYETRIDLSQLGGDGGPAPAPAPAPAPGGVPWLTQQPLQLTILVPLQEYQDRILNKTALPEEQKQQLKALFTKYDNLWQHWENQVGHRKIRPHNIATGDYPPRPQKQYPINPKAKPSIQIVIDDLLKQGVLTPQNSTMNTPVYPVPKPDGRWRMVLDYREVNKTIPLTAAQNQHSAGILATIVRQKYKTTLDLANGFWAHPITPDSYWLTAFTWQGKQYCWTRLPQGFLNSPALFNADAVDLLKEVPNVQVYVDDIYLSHDNPHEHIQQLEKVFQILLQAGYVVSLKKSEIGQRTVEFLGFNITKEGRGLTDTFKTKLLNVTPPKDLKQLQSILGKLNFARNFIPNFAELVQTLYNLIASSPGKYIEWTEDNTKQLNKVIEALNTASNLEERLPDQRLVIKVNTSPSAGYVRYYNESGKKPIMYLNYVFSKAELKFSMLEKLLTTMHKALIKAMDLAMGQEILVYSPIVSMTKIQKTPLPERKALPIRWITWMTYLEDPRIQFHYDKTLPELKHIPDVYTSSIPPLKHPSQYEGVFCTDGSAIKSPDPTKSNNAGMGIVHAIYNPEYKILNQWSIPLGHHTAQMAEIAAVEFACKKALKVPGPVLVITDSFYVAESANKELPYWKSNGFVNNKKEPLKHISKWKSIAECLSIKPDITIQHEKGHQPINTSIHTEGNALADKLATQGSYVVNAGKRTADGSEFEKRTADGSEFESPKKKAKVE

SEQ ID NO: 706 - protein, 2085 aa, synthetic construct
MPAAKRVKLDGGDKKYSIGLDIGTNSVGWAVITDEYKVPSKKFKVLGNTDRHSIKKNLIGALLFDSGETAEATRLKRTARRRYTRRKNRICYLQEIFSNEMAKVDDSFFHRLEESFLVEEDKKHERHPIFGNIVDEVAYHEKYPTIYHLRKKLVDSTDKADLRLIYLALAHMIKFRGHFLIEGDLNPDNSDVDKLFIQLVQTYNQLFEENPINASGVDAKAILSARLSKSRRLENLIAQLPGEKKNGLFGNLIALSLGLTPNFKSNFDLAEDAKLQLSKDTYDDDLDNLLAQIGDQYADLFLAAKNLSDAILLSDILRVNTEITKAPLSASMIKRYDEHHQDLTLLKALVRQQLPEKYKEIFFDQSKNGYAGYIDGGASQEEFYKFIKPILEKMDGTEELLVKLNREDLLRKQRTFDNGSIPHQIHLGELHAILRRQEDFYPFLKDNREKIEKILTFRIPYYVGPLARGNSRFAWMTRKSEETITPWNFEEVVDKGASAQSFIERMTNFDKNLPNEKVLPKHSLLYEYFTVYNELTKVKYVTEGMRKPAFLSGEQKKAIVDLLFKTNRKVTVKQLKEDYFKKIECFDSVEISGVEDRFNASLGTYHDLLKIIKDKDFLDNEENEDILEDIVLTLTLFEDREMIEERLKTYAHLFDDKVMKQLKRRRYTGWGRLSRKLINGIRDKQSGKTILDFLKSDGFANRNFMQLIHDDSLTFKEDIQKAQVSGQGDSLHEHIANLAGSPAIKKGILQTVKVVDELVKVMGRHKPENIVIEMARENQTTQKGQKNSRERMKRIEEGIKELGSQILKEHPVENTQLQNEKLYLYYLQNGRDMYVDQELDINRLSDYDVDHIVPQSFLKDDSIDNKVLTRSDKARGKSDNVPSEEVVKKMKNYWRQLLNAKLITQRKFDNLTKAERGGLSELDKAGFIKRQLVETRQITKHVAQILDSRMNTKYDENDKLIREVKVITLKSKLVSDFRKDFQFYKVREINNYHHAHDAYLNAVVGTALIKKYPKLESEFVYGDYKVYDVRKMIAKSEQEIGKATAKYFFYSNIMNFFKTEITLANGEIRKRPLIETNGETGEIVWDKGRDFATVRKVLSMPQVNIVKKTEVQTGGFSKESILPKRNSDKLIARKKDWDPKKYGGFDSPTVAYSVLVVAKVEKGKSKKLKSVKELLGITIMERSSFEKNPIDFLEAKGYKEVKKDLIIKLPKYSLFELENGRKRMLASAGELQKGNELALPSKYVNFLYLASHYEKLKGSPEDNEQKQLFVEQHKHYLDEIIEQISEFSKRVILADANLDKVLSAYNKHRDKPIREQAENIIHLFTLTNLGAPAAFKYFDTTIDRKRYTSTKEVLDATLIHQSITGLYETRIDLSQLGGDGGPAPGGGGSSGGVPWLTQQPLQLTILVPLQEYQDRILNKTALPEEQKQQLKALFTKYDNLWQHWENQVGHRKIRPHNIATGDYPPRPQKQYPINPKAKPSIQIVIDDLLKQGVLTPQNSTMNTPVYPVPKPDGRWRMVLDYREVNKTIPLTAAQNQHSAGILATIVRQKYKTTLDLANGFWAHPITPDSYWLTAFTWQGKQYCWTRLPQGFLNSPALFNADAVDLLKEVPNVQVYVDDIYLSHDNPHEHIQQLEKVFQILLQAGYVVSLKKSEIGQRTVEFLGFNITKEGRGLTDTFKTKLLNVTPPKDLKQLQSILGKLNFARNFIPNFAELVQTLYNLIASSPGKYIEWTEDNTKQLNKVIEALNTASNLEERLPDQRLVIKVNTSPSAGYVRYYNESGKKPIMYLNYVFSKAELKFSMLEKLLTTMHKALIKAMDLAMGQEILVYSPIVSMTKIQKTPLPERKALPIRWITWMTYLEDPRIQFHYDKTLPELKHIPDVYTSSIPPLKHPSQYEGVFCTDGSAIKSPDPTKSNNAGMGIVHAIYNPEYKILNQWSIPLGHHTAQMAEIAAVEFACKKALKVPGPVLVITDSFYVAESANKELPYWKSNGFVNNKKEPLKHISKWKSIAECLSIKPDITIQHEKGHQPINTSIHTEGNALADKLATQGSYVVNAGKRTADGSEFEKRTADGSEFESPKKKAKVE

SEQ ID NO: 707 - protein, 2168 aa, synthetic construct
MPAAKRVKLDGGDKKYSIGLDIGTNSVGWAVITDEYKVPSKKFKVLGNTDRHSIKKNLIGALLFDSGETAEATRLKRTARRRYTRRKNRICYLQEIFSNEMAKVDDSFFHRLEESFLVEEDKKHERHPIFGNIVDEVAYHEKYPTIYHLRKKLVDSTDKADLRLIYLALAHMIKFRGHFLIEGDLNPDNSDVDKLFIQLVQTYNQLFEENPINASGVDAKAILSARLSKSRRLENLIAQLPGEKKNGLFGNLIALSLGLTPNFKSNFDLAEDAKLQLSKDTYDDDLDNLLAQIGDQYADLFLAAKNLSDAILLSDILRVNTEITKAPLSASMIKRYDEHHQDLTLLKALVRQQLPEKYKEIFFDQSKNGYAGYIDGGASQEEFYKFIKPILEKMDGTEELLVKLNREDLLRKQRTFDNGSIPHQIHLGELHAILRRQEDFYPFLKDNREKIEKILTFRIPYYVGPLARGNSRFAWMTRKSEETITPWNFEEVVDKGASAQSFIERMTNFDKNLPNEKVLPKHSLLYEYFTVYNELTKVKYVTEGMRKPAFLSGEQKKAIVDLLFKTNRKVTVKQLKEDYFKKIECFDSVEISGVEDRFNASLGTYHDLLKIIKDKDFLDNEENEDILEDIVLTLTLFEDREMIEERLKTYAHLFDDKVMKQLKRRRYTGWGRLSRKLINGIRDKQSGKTILDFLKSDGFANRNFMQLIHDDSLTFKEDIQKAQVSGQGDSLHEHIANLAGSPAIKKGILQTVKVVDELVKVMGRHKPENIVIEMARENQTTQKGQKNSRERMKRIEEGIKELGSQILKEHPVENTQLQNEKLYLYYLQNGRDMYVDQELDINRLSDYDVDHIVPQSFLKDDSIDNKVLTRSDKARGKSDNVPSEEVVKKMKNYWRQLLNAKLITQRKFDNLTKAERGGLSELDKAGFIKRQLVETRQITKHVAQILDSRMNTKYDENDKLIREVKVITLKSKLVSDFRKDFQFYKVREINNYHHAHDAYLNAVVGTALIKKYPKLESEFVYGDYKVYDVRKMIAKSEQEIGKATAKYFFYSNIMNFFKTEITLANGEIRKRPLIETNGETGEIVWDKGRDFATVRKVLSMPQVNIVKKTEVQTGGFSKESILPKRNSDKLIARKKDWDPKKYGGFDSPTVAYSVLVVAKVEKGKSKKLKSVKELLGITIMERSSFEKNPIDFLEAKGYKEVKKDLIIKLPKYSLFELENGRKRMLASAGELQKGNELALPSKYVNFLYLASHYEKLKGSPEDNEQKQLFVEQHKHYLDEIIEQISEFSKRVILADANLDKVLSAYNKHRDKPIREQAENIIHLFTLTNLGAPAAFKYFDTTIDRKRYTSTKEVLDATLIHQSITGLYETRIDLSQLGGDGGGSSGGMNPLQLLQPLPAEVKGTKLLAHWNSGATITCIPESFLEDEQPIKQTLIKTIHGEKQQNVYYLTFKVKGRKVEAEVIASPYEYILLSPTDVPWLTQQPLQLTILVPLQEYQDRILNKTALPEEQKQQLKALFTKYDNLWQHWENQVGHRKIRPHNIATGDYPPRPQKQYPINPKAKPSIQIVIDDLLKQGVLTPQNSTMNTPVYPVPKPDGRWRMVLDYREVNKTIPLTAAQNQHSAGILATIVRQKYKTTLDLANGFWAHPITPDSYWLTAFTWQGKQYCWTRLPQGFLNSPALFNADAVDLLKEVPNVQVYVDDIYLSHDNPHEHIQQLEKVFQILLQAGYVVSLKKSEIGQRTVEFLGFNITKEGRGLTDTFKTKLLNVTPPKDLKQLQSILGLLNFARNFIPNFAELVQTLYNLIASSPGKYIEWTEDNTKQLNKVIEALNTASNLEERLPDQRLVIKVNTSPSAGYVRYYNESGKKPIMYLNYVFSKAELKFSMLEKLLTTMHKALIKAMDLAMGQEILVYSPIVSMTKIQKTPLPERKALPIRWITWMTYLEDPRIQFHYDKTLPELKHIPDVYTSSIPPLKHPSQYEGVFCTDGSAIKSPDPTKSNNAGMGIVHAIYNPEYKILNQWSIPLGHHTAQMAEIAAVEFACKKALKVPGPVLVITDSFYVAESANKELPYWKSNGFVNNKKEPLKHISKWKSIAECLSIKPDITIQHEKGHQPINTSIHTEGNALADKLATQGSYVVNAGKRTADGSEFEKRTADGSEFESPKKKAKVE

SEQ ID NO: 708 - protein, 2174 aa, synthetic construct
MPAAKRVKLDGGDKKYSIGLDIGTNSVGWAVITDEYKVPSKKFKVLGNTDRHSIKKNLIGALLFDSGETAEATRLKRTARRRYTRRKNRICYLQEIFSNEMAKVDDSFFHRLEESFLVEEDKKHERHPIFGNIVDEVAYHEKYPTIYHLRKKLVDSTDKADLRLIYLALAHMIKFRGHFLIEGDLNPDNSDVDKLFIQLVQTYNQLFEENPINASGVDAKAILSARLSKSRRLENLIAQLPGEKKNGLFGNLIALSLGLTPNFKSNFDLAEDAKLQLSKDTYDDDLDNLLAQIGDQYADLFLAAKNLSDAILLSDILRVNTEITKAPLSASMIKRYDEHHQDLTLLKALVRQQLPEKYKEIFFDQSKNGYAGYIDGGASQEEFYKFIKPILEKMDGTEELLVKLNREDLLRKQRTFDNGSIPHQIHLGELHAILRRQEDFYPFLKDNREKIEKILTFRIPYYVGPLARGNSRFAWMTRKSEETITPWNFEEVVDKGASAQSFIERMTNFDKNLPNEKVLPKHSLLYEYFTVYNELTKVKYVTEGMRKPAFLSGEQKKAIVDLLFKTNRKVTVKQLKEDYFKKIECFDSVEISGVEDRFNASLGTYHDLLKIIKDKDFLDNEENEDILEDIVLTLTLFEDREMIEERLKTYAHLFDDKVMKQLKRRRYTGWGRLSRKLINGIRDKQSGKTILDFLKSDGFANRNFMQLIHDDSLTFKEDIQKAQVSGQGDSLHEHIANLAGSPAIKKGILQTVKVVDELVKVMGRHKPENIVIEMARENQTTQKGQKNSRERMKRIEEGIKELGSQILKEHPVENTQLQNEKLYLYYLQNGRDMYVDQELDINRLSDYDVDHIVPQSFLKDDSIDNKVLTRSDKARGKSDNVPSEEVVKKMKNYWRQLLNAKLITQRKFDNLTKAERGGLSELDKAGFIKRQLVETRQITKHVAQILDSRMNTKYDENDKLIREVKVITLKSKLVSDFRKDFQFYKVREINNYHHAHDAYLNAVVGTALIKKYPKLESEFVYGDYKVYDVRKMIAKSEQEIGKATAKYFFYSNIMNFFKTEITLANGEIRKRPLIETNGETGEIVWDKGRDFATVRKVLSMPQVNIVKKTEVQTGGFSKESILPKRNSDKLIARKKDWDPKKYGGFDSPTVAYSVLVVAKVEKGKSKKLKSVKELLGITIMERSSFEKNPIDFLEAKGYKEVKKDLIIKLPKYSLFELENGRKRMLASAGELQKGNELALPSKYVNFLYLASHYEKLKGSPEDNEQKQLFVEQHKHYLDEIIEQISEFSKRVILADANLDKVLSAYNKHRDKPIREQAENIIHLFTLTNLGAPAAFKYFDTTIDRKRYTSTKEVLDATLIHQSITGLYETRIDLSQLGGDGGGGGPAPGSSGGMNPLQLLQPLPAEVKGTKLLAHWNSGATITCIPESFLEDEQPIKQTLIKTIHGEKQQNVYYLTFKVKGRKVEAEVIASPYEYILLSPTDVPWLTQQPLQLTILVPLQEYQDRILNKTALPEEQKQQLKALFTKYDNLWQHWENQVGHRKIRPHNIATGDYPPRPQKQYPINPKAKPSIQIVIDDLLKQGVLTPQNSTMNTPVYPVPKPDGRWRMVLDYREVNKTIPLTAAQNQHSAGILATIVRQKYKTTLDLANGFWAHPITPDSYWLTAFTWQGKQYCWTRLPQGFLNSPALFNADAVDLLKEVPNVQVYVDDIYLSHDNPHEHIQQLEKVFQILLQAGYVVSLKKSEIGQRTVEFLGFNITKEGRGLTDTFKTKLLNVTPPKDLKQLQSILGLLNFARNFIPNFAELVQTLYNLIASSPGKYIEWTEDNTKQLNKVIEALNTASNLEERLPDQRLVIKVNTSPSAGYVRYYNESGKKPIMYLNYVFSKAELKFSMLEKLLTTMHKALIKAMDLAMGQEILVYSPIVSMTKIQKTPLPERKALPIRWITWMTYLEDPRIQFHYDKTLPELKHIPDVYTSSIPPLKHPSQYEGVFCTDGSAIKSPDPTKSNNAGMGIVHAIYNPEYKILNQWSIPLGHHTAQMAEIAAVEFACKKALKVPGPVLVITDSFYVAESANKELPYWKSNGFVNNKKEPLKHISKWKSIAECLSIKPDITIQHEKGHQPINTSIHTEGNALADKLATQGSYVVNAGKRTADGSEFEKRTADGSEFESPKKKAKVE

SEQ ID NO: 709 - protein, 2176 aa, synthetic construct
MPAAKRVKLDGGDKKYSIGLDIGTNSVGWAVITDEYKVPSKKFKVLGNTDRHSIKKNLIGALLFDSGETAEATRLKRTARRRYTRRKNRICYLQEIFSNEMAKVDDSFFHRLEESFLVEEDKKHERHPIFGNIVDEVAYHEKYPTIYHLRKKLVDSTDKADLRLIYLALAHMIKFRGHFLIEGDLNPDNSDVDKLFIQLVQTYNQLFEENPINASGVDAKAILSARLSKSRRLENLIAQLPGEKKNGLFGNLIALSLGLTPNFKSNFDLAEDAKLQLSKDTYDDDLDNLLAQIGDQYADLFLAAKNLSDAILLSDILRVNTEITKAPLSASMIKRYDEHHQDLTLLKALVRQQLPEKYKEIFFDQSKNGYAGYIDGGASQEEFYKFIKPILEKMDGTEELLVKLNREDLLRKQRTFDNGSIPHQIHLGELHAILRRQEDFYPFLKDNREKIEKILTFRIPYYVGPLARGNSRFAWMTRKSEETITPWNFEEVVDKGASAQSFIERMTNFDKNLPNEKVLPKHSLLYEYFTVYNELTKVKYVTEGMRKPAFLSGEQKKAIVDLLFKTNRKVTVKQLKEDYFKKIECFDSVEISGVEDRFNASLGTYHDLLKIIKDKDFLDNEENEDILEDIVLTLTLFEDREMIEERLKTYAHLFDDKVMKQLKRRRYTGWGRLSRKLINGIRDKQSGKTILDFLKSDGFANRNFMQLIHDDSLTFKEDIQKAQVSGQGDSLHEHIANLAGSPAIKKGILQTVKVVDELVKVMGRHKPENIVIEMARENQTTQKGQKNSRERMKRIEEGIKELGSQILKEHPVENTQLQNEKLYLYYLQNGRDMYVDQELDINRLSDYDVDHIVPQSFLKDDSIDNKVLTRSDKARGKSDNVPSEEVVKKMKNYWRQLLNAKLITQRKFDNLTKAERGGLSELDKAGFIKRQLVETRQITKHVAQILDSRMNTKYDENDKLIREVKVITLKSKLVSDFRKDFQFYKVREINNYHHAHDAYLNAVVGTALIKKYPKLESEFVYGDYKVYDVRKMIAKSEQEIGKATAKYFFYSNIMNFFKTEITLANGEIRKRPLIETNGETGEIVWDKGRDFATVRKVLSMPQVNIVKKTEVQTGGFSKESILPKRNSDKLIARKKDWDPKKYGGFDSPTVAYSVLVVAKVEKGKSKKLKSVKELLGITIMERSSFEKNPIDFLEAKGYKEVKKDLIIKLPKYSLFELENGRKRMLASAGELQKGNELALPSKYVNFLYLASHYEKLKGSPEDNEQKQLFVEQHKHYLDEIIEQISEFSKRVILADANLDKVLSAYNKHRDKPIREQAENIIHLFTLTNLGAPAAFKYFDTTIDRKRYTSTKEVLDATLIHQSITGLYETRIDLSQLGGDGGPAPEAAAKGSSGGMNPLQLLQPLPAEVKGTKLLAHWNSGATITCIPESFLEDEQPIKQTLIKTIHGEKQQNVYYLTFKVKGRKVEAEVIASPYEYILLSPTDVPWLTQQPLQLTILVPLQEYQDRILNKTALPEEQKQQLKALFTKYDNLWQHWENQVGHRKIRPHNIATGDYPPRPQKQYPINPKAKPSIQIVIDDLLKQGVLTPQNSTMNTPVYPVPKPDGRWRMVLDYREVNKTIPLTAAQNQHSAGILATIVRQKYKTTLDLANGFWAHPITPDSYWLTAFTWQGKQYCWTRLPQGFLNSPALFNADAVDLLKEVPNVQVYVDDIYLSHDNPHEHIQQLEKVFQILLQAGYVVSLKKSEIGQRTVEFLGFNITKEGRGLTDTFKTKLLNVTPPKDLKQLQSILGLLNFARNFIPNFAELVQTLYNLIASSPGKYIEWTEDNTKQLNKVIEALNTASNLEERLPDQRLVIKVNTSPSAGYVRYYNESGKKPIMYLNYVFSKAELKFSMLEKLLTTMHKALIKAMDLAMGQEILVYSPIVSMTKIQKTPLPERKALPIRWITWMTYLEDPRIQFHYDKTLPELKHIPDVYTSSIPPLKHPSQYEGVFCTDGSAIKSPDPTKSNNAGMGIVHAIYNPEYKILNQWSIPLGHHTAQMAEIAAVEFACKKALKVPGPVLVITDSFYVAESANKELPYWKSNGFVNNKKEPLKHISKWKSIAECLSIKPDITIQHEKGHQPINTSIHTEGNALADKLATQGSYVVNAGKRTADGSEFEKRTADGSEFESPKKKAKVE

SEQ ID NO: 710 - protein, 2171 aa, synthetic construct
MPAAKRVKLDGGDKKYSIGLDIGTNSVGWAVITDEYKVPSKKFKVLGNTDRHSIKKNLIGALLFDSGETAEATRLKRTARRRYTRRKNRICYLQEIFSNEMAKVDDSFFHRLEESFLVEEDKKHERHPIFGNIVDEVAYHEKYPTIYHLRKKLVDSTDKADLRLIYLALAHMIKFRGHFLIEGDLNPDNSDVDKLFIQLVQTYNQLFEENPINASGVDAKAILSARLSKSRRLENLIAQLPGEKKNGLFGNLIALSLGLTPNFKSNFDLAEDAKLQLSKDTYDDDLDNLLAQIGDQYADLFLAAKNLSDAILLSDILRVNTEITKAPLSASMIKRYDEHHQDLTLLKALVRQQLPEKYKEIFFDQSKNGYAGYIDGGASQEEFYKFIKPILEKMDGTEELLVKLNREDLLRKQRTFDNGSIPHQIHLGELHAILRRQEDFYPFLKDNREKIEKILTFRIPYYVGPLARGNSRFAWMTRKSEETITPWNFEEVVDKGASAQSFIERMTNFDKNLPNEKVLPKHSLLYEYFTVYNELTKVKYVTEGMRKPAFLSGEQKKAIVDLLFKTNRKVTVKQLKEDYFKKIECFDSVEISGVEDRFNASLGTYHDLLKIIKDKDFLDNEENEDILEDIVLTLTLFEDREMIEERLKTYAHLFDDKVMKQLKRRRYTGWGRLSRKLINGIRDKQSGKTILDFLKSDGFANRNFMQLIHDDSLTFKEDIQKAQVSGQGDSLHEHIANLAGSPAIKKGILQTVKVVDELVKVMGRHKPENIVIEMARENQTTQKGQKNSRERMKRIEEGIKELGSQILKEHPVENTQLQNEKLYLYYLQNGRDMYVDQELDINRLSDYDVDHIVPQSFLKDDSIDNKVLTRSDKARGKSDNVPSEEVVKKMKNYWRQLLNAKLITQRKFDNLTKAERGGLSELDKAGFIKRQLVETRQITKHVAQILDSRMNTKYDENDKLIREVKVITLKSKLVSDFRKDFQFYKVREINNYHHAHDAYLNAVVGTALIKKYPKLESEFVYGDYKVYDVRKMIAKSEQEIGKATAKYFFYSNIMNFFKTEITLANGEIRKRPLIETNGETGEIVWDKGRDFATVRKVLSMPQVNIVKKTEVQTGGFSKESILPKRNSDKLIARKKDWDPKKYGGFDSPTVAYSVLVVAKVEKGKSKKLKSVKELLGITIMERSSFEKNPIDFLEAKGYKEVKKDLIIKLPKYSLFELENGRKRMLASAGELQKGNELALPSKYVNFLYLASHYEKLKGSPEDNEQKQLFVEQHKHYLDEIIEQISEFSKRVILADANLDKVLSAYNKHRDKPIREQAENIIHLFTLTNLGAPAAFKYFDTTIDRKRYTSTKEVLDATLIHQSITGLYETRIDLSQLGGDGGGGGGSSGGMNPLQLLQPLPAEVKGTKLLAHWNSGATITCIPESFLEDEQPIKQTLIKTIHGEKQQNVYYLTFKVKGRKVEAEVIASPYEYILLSPTDVPWLTQQPLQLTILVPLQEYQDRILNKTALPEEQKQQLKALFTKYDNLWQHWENQVGHRKIRPHNIATGDYPPRPQKQYPINPKAKPSIQIVIDDLLKQGVLTPQNSTMNTPVYPVPKPDGRWRMVLDYREVNKTIPLTAAQNQHSAGILATIVRQKYKTTLDLANGFWAHPITPDSYWLTAFTWQGKQYCWTRLPQGFLNSPALFNADAVDLLKEVPNVQVYVDDIYLSHDNPHEHIQQLEKVFQILLQAGYVVSLKKSEIGQRTVEFLGFNITKEGRGLTDTFKTKLLNVTPPKDLKQLQSILGLLNFARNFIPNFAELVQTLYNLIASSPGKYIEWTEDNTKQLNKVIEALNTASNLEERLPDQRLVIKVNTSPSAGYVRYYNESGKKPIMYLNYVFSKAELKFSMLEKLLTTMHKALIKAMDLAMGQEILVYSPIVSMTKIQKTPLPERKALPIRWITWMTYLEDPRIQFHYDKTLPELKHIPDVYTSSIPPLKHPSQYEGVFCTDGSAIKSPDPTKSNNAGMGIVHAIYNPEYKILNQWSIPLGHHTAQMAEIAAVEFACKKALKVPGPVLVITDSFYVAESANKELPYWKSNGFVNNKKEPLKHISKWKSIAECLSIKPDITIQHEKGHQPINTSIHTEGNALADKLATQGSYVVNAGKRTADGSEFEKRTADGSEFESPKKKAKVE

SEQ ID NO: 711 - protein, 2174 aa, synthetic construct
MPAAKRVKLDGGDKKYSIGLDIGTNSVGWAVITDEYKVPSKKFKVLGNTDRHSIKKNLIGALLFDSGETAEATRLKRTARRRYTRRKNRICYLQEIFSNEMAKVDDSFFHRLEESFLVEEDKKHERHPIFGNIVDEVAYHEKYPTIYHLRKKLVDSTDKADLRLIYLALAHMIKFRGHFLIEGDLNPDNSDVDKLFIQLVQTYNQLFEENPINASGVDAKAILSARLSKSRRLENLIAQLPGEKKNGLFGNLIALSLGLTPNFKSNFDLAEDAKLQLSKDTYDDDLDNLLAQIGDQYADLFLAAKNLSDAILLSDILRVNTEITKAPLSASMIKRYDEHHQDLTLLKALVRQQLPEKYKEIFFDQSKNGYAGYIDGGASQEEFYKFIKPILEKMDGTEELLVKLNREDLLRKQRTFDNGSIPHQIHLGELHAILRRQEDFYPFLKDNREKIEKILTFRIPYYVGPLARGNSRFAWMTRKSEETITPWNFEEVVDKGASAQSFIERMTNFDKNLPNEKVLPKHSLLYEYFTVYNELTKVKYVTEGMRKPAFLSGEQKKAIVDLLFKTNRKVTVKQLKEDYFKKIECFDSVEISGVEDRFNASLGTYHDLLKIIKDKDFLDNEENEDILEDIVLTLTLFEDREMIEERLKTYAHLFDDKVMKQLKRRRYTGWGRLSRKLINGIRDKQSGKTILDFLKSDGFANRNFMQLIHDDSLTFKEDIQKAQVSGQGDSLHEHIANLAGSPAIKKGILQTVKVVDELVKVMGRHKPENIVIEMARENQTTQKGQKNSRERMKRIEEGIKELGSQILKEHPVENTQLQNEKLYLYYLQNGRDMYVDQELDINRLSDYDVDHIVPQSFLKDDSIDNKVLTRSDKARGKSDNVPSEEVVKKMKNYWRQLLNAKLITQRKFDNLTKAERGGLSELDKAGFIKRQLVETRQITKHVAQILDSRMNTKYDENDKLIREVKVITLKSKLVSDFRKDFQFYKVREINNYHHAHDAYLNAVVGTALIKKYPKLESEFVYGDYKVYDVRKMIAKSEQEIGKATAKYFFYSNIMNFFKTEITLANGEIRKRPLIETNGETGEIVWDKGRDFATVRKVLSMPQVNIVKKTEVQTGGFSKESILPKRNSDKLIARKKDWDPKKYGGFDSPTVAYSVLVVAKVEKGKSKKLKSVKELLGITIMERSSFEKNPIDFLEAKGYKEVKKDLIIKLPKYSLFELENGRKRMLASAGELQKGNELALPSKYVNFLYLASHYEKLKGSPEDNEQKQLFVEQHKHYLDEIIEQISEFSKRVILADANLDKVLSAYNKHRDKPIREQAENIIHLFTLTNLGAPAAFKYFDTTIDRKRYTSTKEVLDATLIHQSITGLYETRIDLSQLGGDGGGSSGGGGGSGGMNPLQLLQPLPAEVKGTKLLAHWNSGATITCIPESFLEDEQPIKQTLIKTIHGEKQQNVYYLTFKVKGRKVEAEVIASPYEYILLSPTDVPWLTQQPLQLTILVPLQEYQDRILNKTALPEEQKQQLKALFTKYDNLWQHWENQVGHRKIRPHNIATGDYPPRPQKQYPINPKAKPSIQIVIDDLLKQGVLTPQNSTMNTPVYPVPKPDGRWRMVLDYREVNKTIPLTAAQNQHSAGILATIVRQKYKTTLDLANGFWAHPITPDSYWLTAFTWQGKQYCWTRLPQGFLNSPALFNADAVDLLKEVPNVQVYVDDIYLSHDNPHEHIQQLEKVFQILLQAGYVVSLKKSEIGQRTVEFLGFNITKEGRGLTDTFKTKLLNVTPPKDLKQLQSILGLLNFARNFIPNFAELVQTLYNLIASSPGKYIEWTEDNTKQLNKVIEALNTASNLEERLPDQRLVIKVNTSPSAGYVRYYNESGKKPIMYLNYVFSKAELKFSMLEKLLTTMHKALIKAMDLAMGQEILVYSPIVSMTKIQKTPLPERKALPIRWITWMTYLEDPRIQFHYDKTLPELKHIPDVYTSSIPPLKHPSQYEGVFCTDGSAIKSPDPTKSNNAGMGIVHAIYNPEYKILNQWSIPLGHHTAQMAEIAAVEFACKKALKVPGPVLVITDSFYVAESANKELPYWKSNGFVNNKKEPLKHISKWKSIAECLSIKPDITIQHEKGHQPINTSIHTEGNALADKLATQGSYVVNAGKRTADGSEFEKRTADGSEFESPKKKAKVE

SEQ ID NO: 712 - protein, 2176 aa, synthetic construct
MPAAKRVKLDGGDKKYSIGLDIGTNSVGWAVITDEYKVPSKKFKVLGNTDRHSIKKNLIGALLFDSGETAEATRLKRTARRRYTRRKNRICYLQEIFSNEMAKVDDSFFHRLEESFLVEEDKKHERHPIFGNIVDEVAYHEKYPTIYHLRKKLVDSTDKADLRLIYLALAHMIKFRGHFLIEGDLNPDNSDVDKLFIQLVQTYNQLFEENPINASGVDAKAILSARLSKSRRLENLIAQLPGEKKNGLFGNLIALSLGLTPNFKSNFDLAEDAKLQLSKDTYDDDLDNLLAQIGDQYADLFLAAKNLSDAILLSDILRVNTEITKAPLSASMIKRYDEHHQDLTLLKALVRQQLPEKYKEIFFDQSKNGYAGYIDGGASQEEFYKFIKPILEKMDGTEELLVKLNREDLLRKQRTFDNGSIPHQIHLGELHAILRRQEDFYPFLKDNREKIEKILTFRIPYYVGPLARGNSRFAWMTRKSEETITPWNFEEVVDKGASAQSFIERMTNFDKNLPNEKVLPKHSLLYEYFTVYNELTKVKYVTEGMRKPAFLSGEQKKAIVDLLFKTNRKVTVKQLKEDYFKKIECFDSVEISGVEDRFNASLGTYHDLLKIIKDKDFLDNEENEDILEDIVLTLTLFEDREMIEERLKTYAHLFDDKVMKQLKRRRYTGWGRLSRKLINGIRDKQSGKTILDFLKSDGFANRNFMQLIHDDSLTFKEDIQKAQVSGQGDSLHEHIANLAGSPAIKKGILQTVKVVDELVKVMGRHKPENIVIEMARENQTTQKGQKNSRERMKRIEEGIKELGSQILKEHPVENTQLQNEKLYLYYLQNGRDMYVDQELDINRLSDYDVDHIVPQSFLKDDSIDNKVLTRSDKARGKSDNVPSEEVVKKMKNYWRQLLNAKLITQRKFDNLTKAERGGLSELDKAGFIKRQLVETRQITKHVAQILDSRMNTKYDENDKLIREVKVITLKSKLVSDFRKDFQFYKVREINNYHHAHDAYLNAVVGTALIKKYPKLESEFVYGDYKVYDVRKMIAKSEQEIGKATAKYFFYSNIMNFFKTEITLANGEIRKRPLIETNGETGEIVWDKGRDFATVRKVLSMPQVNIVKKTEVQTGGFSKESILPKRNSDKLIARKKDWDPKKYGGFDSPTVAYSVLVVAKVEKGKSKKLKSVKELLGITIMERSSFEKNPIDFLEAKGYKEVKKDLIIKLPKYSLFELENGRKRMLASAGELQKGNELALPSKYVNFLYLASHYEKLKGSPEDNEQKQLFVEQHKHYLDEIIEQISEFSKRVILADANLDKVLSAYNKHRDKPIREQAENIIHLFTLTNLGAPAAFKYFDTTIDRKRYTSTKEVLDATLIHQSITGLYETRIDLSQLGGDGGGSSGGSEAAAKGGMNPLQLLQPLPAEVKGTKLLAHWNSGATITCIPESFLEDEQPIKQTLIKTIHGEKQQNVYYLTFKVKGRKVEAEVIASPYEYILLSPTDVPWLTQQPLQLTILVPLQEYQDRILNKTALPEEQKQQLKALFTKYDNLWQHWENQVGHRKIRPHNIATGDYPPRPQKQYPINPKAKPSIQIVIDDLLKQGVLTPQNSTMNTPVYPVPKPDGRWRMVLDYREVNKTIPLTAAQNQHSAGILATIVRQKYKTTLDLANGFWAHPITPDSYWLTAFTWQGKQYCWTRLPQGFLNSPALFNADAVDLLKEVPNVQVYVDDIYLSHDNPHEHIQQLEKVFQILLQAGYVVSLKKSEIGQRTVEFLGFNITKEGRGLTDTFKTKLLNVTPPKDLKQLQSILGLLNFARNFIPNFAELVQTLYNLIASSPGKYIEWTEDNTKQLNKVIEALNTASNLEERLPDQRLVIKVNTSPSAGYVRYYNESGKKPIMYLNYVFSKAELKFSMLEKLLTTMHKALIKAMDLAMGQEILVYSPIVSMTKIQKTPLPERKALPIRWITWMTYLEDPRIQFHYDKTLPELKHIPDVYTSSIPPLKHPSQYEGVFCTDGSAIKSPDPTKSNNAGMGIVHAIYNPEYKILNQWSIPLGHHTAQMAEIAAVEFACKKALKVPGPVLVITDSFYVAESANKELPYWKSNGFVNNKKEPLKHISKWKSIAECLSIKPDITIQHEKGHQPINTSIHTEGNALADKLATQGSYVVNAGKRTADGSEFEKRTADGSEFESPKKKAKVE

SEQ ID NO: 713 - protein, 2181 aa, synthetic construct
MPAAKRVKLDGGDKKYSIGLDIGTNSVGWAVITDEYKVPSKKFKVLGNTDRHSIKKNLIGALLFDSGETAEATRLKRTARRRYTRRKNRICYLQEIFSNEMAKVDDSFFHRLEESFLVEEDKKHERHPIFGNIVDEVAYHEKYPTIYHLRKKLVDSTDKADLRLIYLALAHMIKFRGHFLIEGDLNPDNSDVDKLFIQLVQTYNQLFEENPINASGVDAKAILSARLSKSRRLENLIAQLPGEKKNGLFGNLIALSLGLTPNFKSNFDLAEDAKLQLSKDTYDDDLDNLLAQIGDQYADLFLAAKNLSDAILLSDILRVNTEITKAPLSASMIKRYDEHHQDLTLLKALVRQQLPEKYKEIFFDQSKNGYAGYIDGGASQEEFYKFIKPILEKMDGTEELLVKLNREDLLRKQRTFDNGSIPHQIHLGELHAILRRQEDFYPFLKDNREKIEKILTFRIPYYVGPLARGNSRFAWMTRKSEETITPWNFEEVVDKGASAQSFIERMTNFDKNLPNEKVLPKHSLLYEYFTVYNELTKVKYVTEGMRKPAFLSGEQKKAIVDLLFKTNRKVTVKQLKEDYFKKIECFDSVEISGVEDRFNASLGTYHDLLKIIKDKDFLDNEENEDILEDIVLTLTLFEDREMIEERLKTYAHLFDDKVMKQLKRRRYTGWGRLSRKLINGIRDKQSGKTILDFLKSDGFANRNFMQLIHDDSLTFKEDIQKAQVSGQGDSLHEHIANLAGSPAIKKGILQTVKVVDELVKVMGRHKPENIVIEMARENQTTQKGQKNSRERMKRIEEGIKELGSQILKEHPVENTQLQNEKLYLYYLQNGRDMYVDQELDINRLSDYDVDHIVPQSFLKDDSIDNKVLTRSDKARGKSDNVPSEEVVKKMKNYWRQLLNAKLITQRKFDNLTKAERGGLSELDKAGFIKRQLVETRQITKHVAQILDSRMNTKYDENDKLIREVKVITLKSKLVSDFRKDFQFYKVREINNYHHAHDAYLNAVVGTALIKKYPKLESEFVYGDYKVYDVRKMIAKSEQEIGKATAKYFFYSNIMNFFKTEITLANGEIRKRPLIETNGETGEIVWDKGRDFATVRKVLSMPQVNIVKKTEVQTGGFSKESILPKRNSDKLIARKKDWDPKKYGGFDSPTVAYSVLVVAKVEKGKSKKLKSVKELLGITIMERSSFEKNPIDFLEAKGYKEVKKDLIIKLPKYSLFELENGRKRMLASAGELQKGNELALPSKYVNFLYLASHYEKLKGSPEDNEQKQLFVEQHKHYLDEIIEQISEFSKRVILADANLDKVLSAYNKHRDKPIREQAENIIHLFTLTNLGAPAAFKYFDTTIDRKRYTSTKEVLDATLIHQSITGLYETRIDLSQLGGDGGSGSETPGTSESATPESGGMNPLQLLQPLPAEVKGTKLLAHWNSGATITCIPESFLEDEQPIKQTLIKTIHGEKQQNVYYLTFKVKGRKVEAEVIASPYEYILLSPTDVPWLTQQPLQLTILVPLQEYQDRILNKTALPEEQKQQLKALFTKYDNLWQHWENQVGHRKIRPHNIATGDYPPRPQKQYPINPKAKPSIQIVIDDLLKQGVLTPQNSTMNTPVYPVPKPDGRWRMVLDYREVNKTIPLTAAQNQHSAGILATIVRQKYKTTLDLANGFWAHPITPDSYWLTAFTWQGKQYCWTRLPQGFLNSPALFNADAVDLLKEVPNVQVYVDDIYLSHDNPHEHIQQLEKVFQILLQAGYVVSLKKSEIGQRTVEFLGFNITKEGRGLTDTFKTKLLNVTPPKDLKQLQSILGLLNFARNFIPNFAELVQTLYNLIASSPGKYIEWTEDNTKQLNKVIEALNTASNLEERLPDQRLVIKVNTSPSAGYVRYYNESGKKPIMYLNYVFSKAELKFSMLEKLLTTMHKALIKAMDLAMGQEILVYSPIVSMTKIQKTPLPERKALPIRWITWMTYLEDPRIQFHYDKTLPELKHIPDVYTSSIPPLKHPSQYEGVFCTDGSAIKSPDPTKSNNAGMGIVHAIYNPEYKILNQWSIPLGHHTAQMAEIAAVEFACKKALKVPGPVLVITDSFYVAESANKELPYWKSNGFVNNKKEPLKHISKWKSIAECLSIKPDITIQHEKGHQPINTSIHTEGNALADKLATQGSYVVNAGKRTADGSEFEKRTADGSEFESPKKKAKVE

SEQ ID NO: 714 - protein, 2176 aa, synthetic construct
MPAAKRVKLDGGDKKYSIGLDIGTNSVGWAVITDEYKVPSKKFKVLGNTDRHSIKKNLIGALLFDSGETAEATRLKRTARRRYTRRKNRICYLQEIFSNEMAKVDDSFFHRLEESFLVEEDKKHERHPIFGNIVDEVAYHEKYPTIYHLRKKLVDSTDKADLRLIYLALAHMIKFRGHFLIEGDLNPDNSDVDKLFIQLVQTYNQLFEENPINASGVDAKAILSARLSKSRRLENLIAQLPGEKKNGLFGNLIALSLGLTPNFKSNFDLAEDAKLQLSKDTYDDDLDNLLAQIGDQYADLFLAAKNLSDAILLSDILRVNTEITKAPLSASMIKRYDEHHQDLTLLKALVRQQLPEKYKEIFFDQSKNGYAGYIDGGASQEEFYKFIKPILEKMDGTEELLVKLNREDLLRKQRTFDNGSIPHQIHLGELHAILRRQEDFYPFLKDNREKIEKILTFRIPYYVGPLARGNSRFAWMTRKSEETITPWNFEEVVDKGASAQSFIERMTNFDKNLPNEKVLPKHSLLYEYFTVYNELTKVKYVTEGMRKPAFLSGEQKKAIVDLLFKTNRKVTVKQLKEDYFKKIECFDSVEISGVEDRFNASLGTYHDLLKIIKDKDFLDNEENEDILEDIVLTLTLFEDREMIEERLKTYAHLFDDKVMKQLKRRRYTGWGRLSRKLINGIRDKQSGKTILDFLKSDGFANRNFMQLIHDDSLTFKEDIQKAQVSGQGDSLHEHIANLAGSPAIKKGILQTVKVVDELVKVMGRHKPENIVIEMARENQTTQKGQKNSRERMKRIEEGIKELGSQILKEHPVENTQLQNEKLYLYYLQNGRDMYVDQELDINRLSDYDVDHIVPQSFLKDDSIDNKVLTRSDKARGKSDNVPSEEVVKKMKNYWRQLLNAKLITQRKFDNLTKAERGGLSELDKAGFIKRQLVETRQITKHVAQILDSRMNTKYDENDKLIREVKVITLKSKLVSDFRKDFQFYKVREINNYHHAHDAYLNAVVGTALIKKYPKLESEFVYGDYKVYDVRKMIAKSEQEIGKATAKYFFYSNIMNFFKTEITLANGEIRKRPLIETNGETGEIVWDKGRDFATVRKVLSMPQVNIVKKTEVQTGGFSKESILPKRNSDKLIARKKDWDPKKYGGFDSPTVAYSVLVVAKVEKGKSKKLKSVKELLGITIMERSSFEKNPIDFLEAKGYKEVKKDLIIKLPKYSLFELENGRKRMLASAGELQKGNELALPSKYVNFLYLASHYEKLKGSPEDNEQKQLFVEQHKHYLDEIIEQISEFSKRVILADANLDKVLSAYNKHRDKPIREQAENIIHLFTLTNLGAPAAFKYFDTTIDRKRYTSTKEVLDATLIHQSITGLYETRIDLSQLGGDGGGGSEAAAKPAPGGMNPLQLLQPLPAEVKGTKLLAHWNSGATITCIPESFLEDEQPIKQTLIKTIHGEKQQNVYYLTFKVKGRKVEAEVIASPYEYILLSPTDVPWLTQQPLQLTILVPLQEYQDRILNKTALPEEQKQQLKALFTKYDNLWQHWENQVGHRKIRPHNIATGDYPPRPQKQYPINPKAKPSIQIVIDDLLKQGVLTPQNSTMNTPVYPVPKPDGRWRMVLDYREVNKTIPLTAAQNQHSAGILATIVRQKYKTTLDLANGFWAHPITPDSYWLTAFTWQGKQYCWTRLPQGFLNSPALFNADAVDLLKEVPNVQVYVDDIYLSHDNPHEHIQQLEKVFQILLQAGYVVSLKKSEIGQRTVEFLGFNITKEGRGLTDTFKTKLLNVTPPKDLKQLQSILGLLNFARNFIPNFAELVQTLYNLIASSPGKYIEWTEDNTKQLNKVIEALNTASNLEERLPDQRLVIKVNTSPSAGYVRYYNESGKKPIMYLNYVFSKAELKFSMLEKLLTTMHKALIKAMDLAMGQEILVYSPIVSMTKIQKTPLPERKALPIRWITWMTYLEDPRIQFHYDKTLPELKHIPDVYTSSIPPLKHPSQYEGVFCTDGSAIKSPDPTKSNNAGMGIVHAIYNPEYKILNQWSIPLGHHTAQMAEIAAVEFACKKALKVPGPVLVITDSFYVAESANKELPYWKSNGFVNNKKEPLKHISKWKSIAECLSIKPDITIQHEKGHQPINTSIHTEGNALADKLATQGSYVVNAGKRTADGSEFEKRTADGSEFESPKKKAKVE

SEQ ID NO: 715 - protein, 2208 aa, synthetic construct
MPAAKRVKLDGGDKKYSIGLDIGTNSVGWAVITDEYKVPSKKFKVLGNTDRHSIKKNLIGALLFDSGETAEATRLKRTARRRYTRRKNRICYLQEIFSNEMAKVDDSFFHRLEESFLVEEDKKHERHPIFGNIVDEVAYHEKYPTIYHLRKKLVDSTDKADLRLIYLALAHMIKFRGHFLIEGDLNPDNSDVDKLFIQLVQTYNQLFEENPINASGVDAKAILSARLSKSRRLENLIAQLPGEKKNGLFGNLIALSLGLTPNFKSNFDLAEDAKLQLSKDTYDDDLDNLLAQIGDQYADLFLAAKNLSDAILLSDILRVNTEITKAPLSASMIKRYDEHHQDLTLLKALVRQQLPEKYKEIFFDQSKNGYAGYIDGGASQEEFYKFIKPILEKMDGTEELLVKLNREDLLRKQRTFDNGSIPHQIHLGELHAILRRQEDFYPFLKDNREKIEKILTFRIPYYVGPLARGNSRFAWMTRKSEETITPWNFEEVVDKGASAQSFIERMTNFDKNLPNEKVLPKHSLLYEYFTVYNELTKVKYVTEGMRKPAFLSGEQKKAIVDLLFKTNRKVTVKQLKEDYFKKIECFDSVEISGVEDRFNASLGTYHDLLKIIKDKDFLDNEENEDILEDIVLTLTLFEDREMIEERLKTYAHLFDDKVMKQLKRRRYTGWGRLSRKLINGIRDKQSGKTILDFLKSDGFANRNFMQLIHDDSLTFKEDIQKAQVSGQGDSLHEHIANLAGSPAIKKGILQTVKVVDELVKVMGRHKPENIVIEMARENQTTQKGQKNSRERMKRIEEGIKELGSQILKEHPVENTQLQNEKLYLYYLQNGRDMYVDQELDINRLSDYDVDHIVPQSFLKDDSIDNKVLTRSDKARGKSDNVPSEEVVKKMKNYWRQLLNAKLITQRKFDNLTKAERGGLSELDKAGFIKRQLVETRQITKHVAQILDSRMNTKYDENDKLIREVKVITLKSKLVSDFRKDFQFYKVREINNYHHAHDAYLNAVVGTALIKKYPKLESEFVYGDYKVYDVRKMIAKSEQEIGKATAKYFFYSNIMNFFKTEITLANGEIRKRPLIETNGETGEIVWDKGRDFATVRKVLSMPQVNIVKKTEVQTGGFSKESILPKRNSDKLIARKKDWDPKKYGGFDSPTVAYSVLVVAKVEKGKSKKLKSVKELLGITIMERSSFEKNPIDFLEAKGYKEVKKDLIIKLPKYSLFELENGRKRMLASAGELQKGNELALPSKYVNFLYLASHYEKLKGSPEDNEQKQLFVEQHKHYLDEIIEQISEFSKRVILADANLDKVLSAYNKHRDKPIREQAENIIHLFTLTNLGAPAAFKYFDTTIDRKRYTSTKEVLDATLIHQSITGLYETRIDLSQLGGDGGAEAAAKEAAAKEAAAKEAAAKALEAEAAAKEAAAKEAAAKEAAAKAGGMDLLKPLTVERKGVKIKGYWNSQADITCVPKDLLQGEEPVRQQNVTTIHGTQEGDVYYVNLKIDGRRINTEVIGTTLDYAIITPGDVPWILKKPLELTIKLDLEEQQGTLLNNSILSKKGKEELKQLFEKYSALWQSWENQVGHRRIRPHKIATGTVKPTPQKQYHINPKAKPDIQIVINDLLKQGVLIQKESTMNTPVYPVPKPNGRWRMVLDYRAVNKVTPLIAVQNQHSYGILGSLFKGRYKTTIDLSNGFWAHPIVPEDYWITAFTWQGKQYCWTVLPQGFLNSPGLFTGDVVDLLQGIPNVEVYVDDVYISHDSEKEHLEYLDILFNRLKEAGYIISLKKSNIANSIVDFLGFQITNEGRGLTDTFKEKLENITAPTTLKQLQSILGLLNFARNFIPDFTELIAPLYALIPKSTKNYVPWQIEHSTTLETLITKLNGAEYLQGRKGDKTLIMKVNASYTTGYIRYYNEGEKKPISYVSIVFSKTELKFTELEKLLTTVHKGLLKALDLSMGQNIHVYSPIVSMQNIQKTPQTAKKALASRWLSWLSYLEDPRIRFFYDPQMPALKDLPAVDTGKDNKKHPSNFQHIFYTDGSAITSPTKEGHLNAGMGIVYFINKDGNLQKQQEWSISLGNHTAQFAEIAAFEFALKKCLPLGGNILVVTDSNYVAKAYNEELDVWASNGFVNNRKKPLKHISKWKSVADLKRLRPDVVVTHEPGHQKLDSSPHAYGNNLADQLATQASFKVHAGKRTADGSEFEKRTADGSEFESPKKKAKVE

SEQ ID NO: 716 - protein, 2192 aa, synthetic construct
MPAAKRVKLDGGDKKYSIGLDIGTNSVGWAVITDEYKVPSKKFKVLGNTDRHSIKKNLIGALLFDSGETAEATRLKRTARRRYTRRKNRICYLQEIFSNEMAKVDDSFFHRLEESFLVEEDKKHERHPIFGNIVDEVAYHEKYPTIYHLRKKLVDSTDKADLRLIYLALAHMIKFRGHFLIEGDLNPDNSDVDKLFIQLVQTYNQLFEENPINASGVDAKAILSARLSKSRRLENLIAQLPGEKKNGLFGNLIALSLGLTPNFKSNFDLAEDAKLQLSKDTYDDDLDNLLAQIGDQYADLFLAAKNLSDAILLSDILRVNTEITKAPLSASMIKRYDEHHQDLTLLKALVRQQLPEKYKEIFFDQSKNGYAGYIDGGASQEEFYKFIKPILEKMDGTEELLVKLNREDLLRKQRTFDNGSIPHQIHLGELHAILRRQEDFYPFLKDNREKIEKILTFRIPYYVGPLARGNSRFAWMTRKSEETITPWNFEEVVDKGASAQSFIERMTNFDKNLPNEKVLPKHSLLYEYFTVYNELTKVKYVTEGMRKPAFLSGEQKKAIVDLLFKTNRKVTVKQLKEDYFKKIECFDSVEISGVEDRFNASLGTYHDLLKIIKDKDFLDNEENEDILEDIVLTLTLFEDREMIEERLKTYAHLFDDKVMKQLKRRRYTGWGRLSRKLINGIRDKQSGKTILDFLKSDGFANRNFMQLIHDDSLTFKEDIQKAQVSGQGDSLHEHIANLAGSPAIKKGILQTVKVVDELVKVMGRHKPENIVIEMARENQTTQKGQKNSRERMKRIEEGIKELGSQILKEHPVENTQLQNEKLYLYYLQNGRDMYVDQELDINRLSDYDVDHIVPQSFLKDDSIDNKVLTRSDKARGKSDNVPSEEVVKKMKNYWRQLLNAKLITQRKFDNLTKAERGGLSELDKAGFIKRQLVETRQITKHVAQILDSRMNTKYDENDKLIREVKVITLKSKLVSDFRKDFQFYKVREINNYHHAHDAYLNAVVGTALIKKYPKLESEFVYGDYKVYDVRKMIAKSEQEIGKATAKYFFYSNIMNFFKTEITLANGEIRKRPLIETNGETGEIVWDKGRDFATVRKVLSMPQVNIVKKTEVQTGGFSKESILPKRNSDKLIARKKDWDPKKYGGFDSPTVAYSVLVVAKVEKGKSKKLKSVKELLGITIMERSSFEKNPIDFLEAKGYKEVKKDLIIKLPKYSLFELENGRKRMLASAGELQKGNELALPSKYVNFLYLASHYEKLKGSPEDNEQKQLFVEQHKHYLDEIIEQISEFSKRVILADANLDKVLSAYNKHRDKPIREQAENIIHLFTLTNLGAPAAFKYFDTTIDRKRYTSTKEVLDATLIHQSITGLYETRIDLSQLGGDGGGGGGSGGGGSGGGGSGGGGSGGGGSGGGGSGGMDLLKPLTVERKGVKIKGYWNSQADITCVPKDLLQGEEPVRQQNVTTIHGTQEGDVYYVNLKIDGRRINTEVIGTTLDYAIITPGDVPWILKKPLELTIKLDLEEQQGTLLNNSILSKKGKEELKQLFEKYSALWQSWENQVGHRRIRPHKIATGTVKPTPQKQYHINPKAKPDIQIVINDLLKQGVLIQKESTMNTPVYPVPKPNGRWRMVLDYRAVNKVTPLIAVQNQHSYGILGSLFKGRYKTTIDLSNGFWAHPIVPEDYWITAFTWQGKQYCWTVLPQGFLNSPGLFTGDVVDLLQGIPNVEVYVDDVYISHDSEKEHLEYLDILFNRLKEAGYIISLKKSNIANSIVDFLGFQITNEGRGLTDTFKEKLENITAPTTLKQLQSILGLLNFARNFIPDFTELIAPLYALIPKSTKNYVPWQIEHSTTLETLITKLNGAEYLQGRKGDKTLIMKVNASYTTGYIRYYNEGEKKPISYVSIVFSKTELKFTELEKLLTTVHKGLLKALDLSMGQNIHVYSPIVSMQNIQKTPQTAKKALASRWLSWLSYLEDPRIRFFYDPQMPALKDLPAVDTGKDNKKHPSNFQHIFYTDGSAITSPTKEGHLNAGMGIVYFINKDGNLQKQQEWSISLGNHTAQFAEIAAFEFALKKCLPLGGNILVVTDSNYVAKAYNEELDVWASNGFVNNRKKPLKHISKWKSVADLKRLRPDVVVTHEPGHQKLDSSPHAYGNNLADQLATQASFKVHAGKRTADGSEFEKRTADGSEFESPKKKAKVE

SEQ ID NO: 717 - protein, 2171 aa, synthetic construct
MPAAKRVKLDGGDKKYSIGLDIGTNSVGWAVITDEYKVPSKKFKVLGNTDRHSIKKNLIGALLFDSGETAEATRLKRTARRRYTRRKNRICYLQEIFSNEMAKVDDSFFHRLEESFLVEEDKKHERHPIFGNIVDEVAYHEKYPTIYHLRKKLVDSTDKADLRLIYLALAHMIKFRGHFLIEGDLNPDNSDVDKLFIQLVQTYNQLFEENPINASGVDAKAILSARLSKSRRLENLIAQLPGEKKNGLFGNLIALSLGLTPNFKSNFDLAEDAKLQLSKDTYDDDLDNLLAQIGDQYADLFLAAKNLSDAILLSDILRVNTEITKAPLSASMIKRYDEHHQDLTLLKALVRQQLPEKYKEIFFDQSKNGYAGYIDGGASQEEFYKFIKPILEKMDGTEELLVKLNREDLLRKQRTFDNGSIPHQIHLGELHAILRRQEDFYPFLKDNREKIEKILTFRIPYYVGPLARGNSRFAWMTRKSEETITPWNFEEVVDKGASAQSFIERMTNFDKNLPNEKVLPKHSLLYEYFTVYNELTKVKYVTEGMRKPAFLSGEQKKAIVDLLFKTNRKVTVKQLKEDYFKKIECFDSVEISGVEDRFNASLGTYHDLLKIIKDKDFLDNEENEDILEDIVLTLTLFEDREMIEERLKTYAHLFDDKVMKQLKRRRYTGWGRLSRKLINGIRDKQSGKTILDFLKSDGFANRNFMQLIHDDSLTFKEDIQKAQVSGQGDSLHEHIANLAGSPAIKKGILQTVKVVDELVKVMGRHKPENIVIEMARENQTTQKGQKNSRERMKRIEEGIKELGSQILKEHPVENTQLQNEKLYLYYLQNGRDMYVDQELDINRLSDYDVDHIVPQSFLKDDSIDNKVLTRSDKARGKSDNVPSEEVVKKMKNYWRQLLNAKLITQRKFDNLTKAERGGLSELDKAGFIKRQLVETRQITKHVAQILDSRMNTKYDENDKLIREVKVITLKSKLVSDFRKDFQFYKVREINNYHHAHDAYLNAVVGTALIKKYPKLESEFVYGDYKVYDVRKMIAKSEQEIGKATAKYFFYSNIMNFFKTEITLANGEIRKRPLIETNGETGEIVWDKGRDFATVRKVLSMPQVNIVKKTEVQTGGFSKESILPKRNSDKLIARKKDWDPKKYGGFDSPTVAYSVLVVAKVEKGKSKKLKSVKELLGITIMERSSFEKNPIDFLEAKGYKEVKKDLIIKLPKYSLFELENGRKRMLASAGELQKGNELALPSKYVNFLYLASHYEKLKGSPEDNEQKQLFVEQHKHYLDEIIEQISEFSKRVILADANLDKVLSAYNKHRDKPIREQAENIIHLFTLTNLGAPAAFKYFDTTIDRKRYTSTKEVLDATLIHQSITGLYETRIDLSQLGGDGGGSSGGSPAPGGMDLLKPLTVERKGVKIKGYWNSQADITCVPKDLLQGEEPVRQQNVTTIHGTQEGDVYYVNLKIDGRRINTEVIGTTLDYAIITPGDVPWILKKPLELTIKLDLEEQQGTLLNNSILSKKGKEELKQLFEKYSALWQSWENQVGHRRIRPHKIATGTVKPTPQKQYHINPKAKPDIQIVINDLLKQGVLIQKESTMNTPVYPVPKPNGRWRMVLDYRAVNKVTPLIAVQNQHSYGILGSLFKGRYKTTIDLSNGFWAHPIVPEDYWITAFTWQGKQYCWTVLPQGFLNSPGLFTGDVVDLLQGIPNVEVYVDDVYISHDSEKEHLEYLDILFNRLKEAGYIISLKKSNIANSIVDFLGFQITNEGRGLTDTFKEKLENITAPTTLKQLQSILGLLNFARNFIPDFTELIAPLYALIPKSTKNYVPWQIEHSTTLETLITKLNGAEYLQGRKGDKTLIMKVNASYTTGYIRYYNEGEKKPISYVSIVFSKTELKFTELEKLLTTVHKGLLKALDLSMGQNIHVYSPIVSMQNIQKTPQTAKKALASRWLSWLSYLEDPRIRFFYDPQMPALKDLPAVDTGKDNKKHPSNFQHIFYTDGSAITSPTKEGHLNAGMGIVYFINKDGNLQKQQEWSISLGNHTAQFAEIAAFEFALKKCLPLGGNILVVTDSNYVAKAYNEELDVWASNGFVNNRKKPLKHISKWKSVADLKRLRPDVVVTHEPGHQKLDSSPHAYGNNLADQLATQASFKVHAGKRTADGSEFEKRTADGSEFESPKKKAKVE

SEQ ID NO: 718 - protein, 2177 aa, synthetic construct
MPAAKRVKLDGGDKKYSIGLDIGTNSVGWAVITDEYKVPSKKFKVLGNTDRHSIKKNLIGALLFDSGETAEATRLKRTARRRYTRRKNRICYLQEIFSNEMAKVDDSFFHRLEESFLVEEDKKHERHPIFGNIVDEVAYHEKYPTIYHLRKKLVDSTDKADLRLIYLALAHMIKFRGHFLIEGDLNPDNSDVDKLFIQLVQTYNQLFEENPINASGVDAKAILSARLSKSRRLENLIAQLPGEKKNGLFGNLIALSLGLTPNFKSNFDLAEDAKLQLSKDTYDDDLDNLLAQIGDQYADLFLAAKNLSDAILLSDILRVNTEITKAPLSASMIKRYDEHHQDLTLLKALVRQQLPEKYKEIFFDQSKNGYAGYIDGGASQEEFYKFIKPILEKMDGTEELLVKLNREDLLRKQRTFDNGSIPHQIHLGELHAILRRQEDFYPFLKDNREKIEKILTFRIPYYVGPLARGNSRFAWMTRKSEETITPWNFEEVVDKGASAQSFIERMTNFDKNLPNEKVLPKHSLLYEYFTVYNELTKVKYVTEGMRKPAFLSGEQKKAIVDLLFKTNRKVTVKQLKEDYFKKIECFDSVEISGVEDRFNASLGTYHDLLKIIKDKDFLDNEENEDILEDIVLTLTLFEDREMIEERLKTYAHLFDDKVMKQLKRRRYTGWGRLSRKLINGIRDKQSGKTILDFLKSDGFANRNFMQLIHDDSLTFKEDIQKAQVSGQGDSLHEHIANLAGSPAIKKGILQTVKVVDELVKVMGRHKPENIVIEMARENQTTQKGQKNSRERMKRIEEGIKELGSQILKEHPVENTQLQNEKLYLYYLQNGRDMYVDQELDINRLSDYDVDHIVPQSFLKDDSIDNKVLTRSDKARGKSDNVPSEEVVKKMKNYWRQLLNAKLITQRKFDNLTKAERGGLSELDKAGFIKRQLVETRQITKHVAQILDSRMNTKYDENDKLIREVKVITLKSKLVSDFRKDFQFYKVREINNYHHAHDAYLNAVVGTALIKKYPKLESEFVYGDYKVYDVRKMIAKSEQEIGKATAKYFFYSNIMNFFKTEITLANGEIRKRPLIETNGETGEIVWDKGRDFATVRKVLSMPQVNIVKKTEVQTGGFSKESILPKRNSDKLIARKKDWDPKKYGGFDSPTVAYSVLVVAKVEKGKSKKLKSVKELLGITIMERSSFEKNPIDFLEAKGYKEVKKDLIIKLPKYSLFELENGRKRMLASAGELQKGNELALPSKYVNFLYLASHYEKLKGSPEDNEQKQLFVEQHKHYLDEIIEQISEFSKRVILADANLDKVLSAYNKHRDKPIREQAENIIHLFTLTNLGAPAAFKYFDTTIDRKRYTSTKEVLDATLIHQSITGLYETRIDLSQLGGDGGEAAAKEAAAKEAAAKGGMDLLKPLTVERKGVKIKGYWNSQADITCVPKDLLQGEEPVRQQNVTTIHGTQEGDVYYVNLKIDGRRINTEVIGTTLDYAIITPGDVPWILKKPLELTIKLDLEEQQGTLLNNSILSKKGKEELKQLFEKYSALWQSWENQVGHRRIRPHKIATGTVKPTPQKQYHINPKAKPDIQIVINDLLKQGVLIQKESTMNTPVYPVPKPNGRWRMVLDYRAVNKVTPLIAVQNQHSYGILGSLFKGRYKTTIDLSNGFWAHPIVPEDYWITAFTWQGKQYCWTVLPQGFLNSPGLFTGDVVDLLQGIPNVEVYVDDVYISHDSEKEHLEYLDILFNRLKEAGYIISLKKSNIANSIVDFLGFQITNEGRGLTDTFKEKLENITAPTTLKQLQSILGLLNFARNFIPDFTELIAPLYALIPKSTKNYVPWQIEHSTTLETLITKLNGAEYLQGRKGDKTLIMKVNASYTTGYIRYYNEGEKKPISYVSIVFSKTELKFTELEKLLTTVHKGLLKALDLSMGQNIHVYSPIVSMQNIQKTPQTAKKALASRWLSWLSYLEDPRIRFFYDPQMPALKDLPAVDTGKDNKKHPSNFQHIFYTDGSAITSPTKEGHLNAGMGIVYFINKDGNLQKQQEWSISLGNHTAQFAEIAAFEFALKKCLPLGGNILVVTDSNYVAKAYNEELDVWASNGFVNNRKKPLKHISKWKSVADLKRLRPDVVVTHEPGHQKLDSSPHAYGNNLADQLATQASFKVHAGKRTADGSEFEKRTADGSEFESPKKKAKVE

SEQ ID NO: 719 - protein, 2177 aa, synthetic construct
MPAAKRVKLDGGDKKYSIGLDIGTNSVGWAVITDEYKVPSKKFKVLGNTDRHSIKKNLIGALLFDSGETAEATRLKRTARRRYTRRKNRICYLQEIFSNEMAKVDDSFFHRLEESFLVEEDKKHERHPIFGNIVDEVAYHEKYPTIYHLRKKLVDSTDKADLRLIYLALAHMIKFRGHFLIEGDLNPDNSDVDKLFIQLVQTYNQLFEENPINASGVDAKAILSARLSKSRRLENLIAQLPGEKKNGLFGNLIALSLGLTPNFKSNFDLAEDAKLQLSKDTYDDDLDNLLAQIGDQYADLFLAAKNLSDAILLSDILRVNTEITKAPLSASMIKRYDEHHQDLTLLKALVRQQLPEKYKEIFFDQSKNGYAGYIDGGASQEEFYKFIKPILEKMDGTEELLVKLNREDLLRKQRTFDNGSIPHQIHLGELHAILRRQEDFYPFLKDNREKIEKILTFRIPYYVGPLARGNSRFAWMTRKSEETITPWNFEEVVDKGASAQSFIERMTNFDKNLPNEKVLPKHSLLYEYFTVYNELTKVKYVTEGMRKPAFLSGEQKKAIVDLLFKTNRKVTVKQLKEDYFKKIECFDSVEISGVEDRFNASLGTYHDLLKIIKDKDFLDNEENEDILEDIVLTLTLFEDREMIEERLKTYAHLFDDKVMKQLKRRRYTGWGRLSRKLINGIRDKQSGKTILDFLKSDGFANRNFMQLIHDDSLTFKEDIQKAQVSGQGDSLHEHIANLAGSPAIKKGILQTVKVVDELVKVMGRHKPENIVIEMARENQTTQKGQKNSRERMKRIEEGIKELGSQILKEHPVENTQLQNEKLYLYYLQNGRDMYVDQELDINRLSDYDVDHIVPQSFLKDDSIDNKVLTRSDKARGKSDNVPSEEVVKKMKNYWRQLLNAKLITQRKFDNLTKAERGGLSELDKAGFIKRQLVETRQITKHVAQILDSRMNTKYDENDKLIREVKVITLKSKLVSDFRKDFQFYKVREINNYHHAHDAYLNAVVGTALIKKYPKLESEFVYGDYKVYDVRKMIAKSEQEIGKATAKYFFYSNIMNFFKTEITLANGEIRKRPLIETNGETGEIVWDKGRDFATVRKVLSMPQVNIVKKTEVQTGGFSKESILPKRNSDKLIARKKDWDPKKYGGFDSPTVAYSVLVVAKVEKGKSKKLKSVKELLGITIMERSSFEKNPIDFLEAKGYKEVKKDLIIKLPKYSLFELENGRKRMLASAGELQKGNELALPSKYVNFLYLASHYEKLKGSPEDNEQKQLFVEQHKHYLDEIIEQISEFSKRVILADANLDKVLSAYNKHRDKPIREQAENIIHLFTLTNLGAPAAFKYFDTTIDRKRYTSTKEVLDATLIHQSITGLYETRIDLSQLGGDGGGSSGSSGSSGSSGSSGGMDLLKPLTVERKGVKIKGYWNSQADITCVPKDLLQGEEPVRQQNVTTIHGTQEGDVYYVNLKIDGRRINTEVIGTTLDYAIITPGDVPWILKKPLELTIKLDLEEQQGTLLNNSILSKKGKEELKQLFEKYSALWQSWENQVGHRRIRPHKIATGTVKPTPQKQYHINPKAKPDIQIVINDLLKQGVLIQKESTMNTPVYPVPKPNGRWRMVLDYRAVNKVTPLIAVQNQHSYGILGSLFKGRYKTTIDLSNGFWAHPIVPEDYWITAFTWQGKQYCWTVLPQGFLNSPGLFTGDVVDLLQGIPNVEVYVDDVYISHDSEKEHLEYLDILFNRLKEAGYIISLKKSNIANSIVDFLGFQITNEGRGLTDTFKEKLENITAPTTLKQLQSILGLLNFARNFIPDFTELIAPLYALIPKSTKNYVPWQIEHSTTLETLITKLNGAEYLQGRKGDKTLIMKVNASYTTGYIRYYNEGEKKPISYVSIVFSKTELKFTELEKLLTTVHKGLLKALDLSMGQNIHVYSPIVSMQNIQKTPQTAKKALASRWLSWLSYLEDPRIRFFYDPQMPALKDLPAVDTGKDNKKHPSNFQHIFYTDGSAITSPTKEGHLNAGMGIVYFINKDGNLQKQQEWSISLGNHTAQFAEIAAFEFALKKCLPLGGNILVVTDSNYVAKAYNEELDVWASNGFVNNRKKPLKHISKWKSVADLKRLRPDVVVTHEPGHQKLDSSPHAYGNNLADQLATQASFKVHAGKRTADGSEFEKRTADGSEFESPKKKAKVE

SEQ ID NO: 720 - protein, 2171 aa, synthetic construct
MPAAKRVKLDGGDKKYSIGLDIGTNSVGWAVITDEYKVPSKKFKVLGNTDRHSIKKNLIGALLFDSGETAEATRLKRTARRRYTRRKNRICYLQEIFSNEMAKVDDSFFHRLEESFLVEEDKKHERHPIFGNIVDEVAYHEKYPTIYHLRKKLVDSTDKADLRLIYLALAHMIKFRGHFLIEGDLNPDNSDVDKLFIQLVQTYNQLFEENPINASGVDAKAILSARLSKSRRLENLIAQLPGEKKNGLFGNLIALSLGLTPNFKSNFDLAEDAKLQLSKDTYDDDLDNLLAQIGDQYADLFLAAKNLSDAILLSDILRVNTEITKAPLSASMIKRYDEHHQDLTLLKALVRQQLPEKYKEIFFDQSKNGYAGYIDGGASQEEFYKFIKPILEKMDGTEELLVKLNREDLLRKQRTFDNGSIPHQIHLGELHAILRRQEDFYPFLKDNREKIEKILTFRIPYYVGPLARGNSRFAWMTRKSEETITPWNFEEVVDKGASAQSFIERMTNFDKNLPNEKVLPKHSLLYEYFTVYNELTKVKYVTEGMRKPAFLSGEQKKAIVDLLFKTNRKVTVKQLKEDYFKKIECFDSVEISGVEDRFNASLGTYHDLLKIIKDKDFLDNEENEDILEDIVLTLTLFEDREMIEERLKTYAHLFDDKVMKQLKRRRYTGWGRLSRKLINGIRDKQSGKTILDFLKSDGFANRNFMQLIHDDSLTFKEDIQKAQVSGQGDSLHEHIANLAGSPAIKKGILQTVKVVDELVKVMGRHKPENIVIEMARENQTTQKGQKNSRERMKRIEEGIKELGSQILKEHPVENTQLQNEKLYLYYLQNGRDMYVDQELDINRLSDYDVDHIVPQSFLKDDSIDNKVLTRSDKARGKSDNVPSEEVVKKMKNYWRQLLNAKLITQRKFDNLTKAERGGLSELDKAGFIKRQLVETRQITKHVAQILDSRMNTKYDENDKLIREVKVITLKSKLVSDFRKDFQFYKVREINNYHHAHDAYLNAVVGTALIKKYPKLESEFVYGDYKVYDVRKMIAKSEQEIGKATAKYFFYSNIMNFFKTEITLANGEIRKRPLIETNGETGEIVWDKGRDFATVRKVLSMPQVNIVKKTEVQTGGFSKESILPKRNSDKLIARKKDWDPKKYGGFDSPTVAYSVLVVAKVEKGKSKKLKSVKELLGITIMERSSFEKNPIDFLEAKGYKEVKKDLIIKLPKYSLFELENGRKRMLASAGELQKGNELALPSKYVNFLYLASHYEKLKGSPEDNEQKQLFVEQHKHYLDEIIEQISEFSKRVILADANLDKVLSAYNKHRDKPIREQAENIIHLFTLTNLGAPAAFKYFDTTIDRKRYTSTKEVLDATLIHQSITGLYETRIDLSQLGGDGGGGGGSSPAPGGMDLLKPLTVERKGVKIKGYWNSQADITCVPKDLLQGEEPVRQQNVTTIHGTQEGDVYYVNLKIDGRRINTEVIGTTLDYAIITPGDVPWILKKPLELTIKLDLEEQQGTLLNNSILSKKGKEELKQLFEKYSALWQSWENQVGHRRIRPHKIATGTVKPTPQKQYHINPKAKPDIQIVINDLLKQGVLIQKESTMNTPVYPVPKPNGRWRMVLDYRAVNKVTPLIAVQNQHSYGILGSLFKGRYKTTIDLSNGFWAHPIVPEDYWITAFTWQGKQYCWTVLPQGFLNSPGLFTGDVVDLLQGIPNVEVYVDDVYISHDSEKEHLEYLDILFNRLKEAGYIISLKKSNIANSIVDFLGFQITNEGRGLTDTFKEKLENITAPTTLKQLQSILGLLNFARNFIPDFTELIAPLYALIPKSTKNYVPWQIEHSTTLETLITKLNGAEYLQGRKGDKTLIMKVNASYTTGYIRYYNEGEKKPISYVSIVFSKTELKFTELEKLLTTVHKGLLKALDLSMGQNIHVYSPIVSMQNIQKTPQTAKKALASRWLSWLSYLEDPRIRFFYDPQMPALKDLPAVDTGKDNKKHPSNFQHIFYTDGSAITSPTKEGHLNAGMGIVYFINKDGNLQKQQEWSISLGNHTAQFAEIAAFEFALKKCLPLGGNILVVTDSNYVAKAYNEELDVWASNGFVNNRKKPLKHISKWKSVADLKRLRPDVVVTHEPGHQKLDSSPHAYGNNLADQLATQASFKVHAGKRTADGSEFEKRTADGSEFESPKKKAKVE

SEQ ID NO: 721 - protein, 2173 aa, synthetic construct
MPAAKRVKLDGGDKKYSIGLDIGTNSVGWAVITDEYKVPSKKFKVLGNTDRHSIKKNLIGALLFDSGETAEATRLKRTARRRYTRRKNRICYLQEIFSNEMAKVDDSFFHRLEESFLVEEDKKHERHPIFGNIVDEVAYHEKYPTIYHLRKKLVDSTDKADLRLIYLALAHMIKFRGHFLIEGDLNPDNSDVDKLFIQLVQTYNQLFEENPINASGVDAKAILSARLSKSRRLENLIAQLPGEKKNGLFGNLIALSLGLTPNFKSNFDLAEDAKLQLSKDTYDDDLDNLLAQIGDQYADLFLAAKNLSDAILLSDILRVNTEITKAPLSASMIKRYDEHHQDLTLLKALVRQQLPEKYKEIFFDQSKNGYAGYIDGGASQEEFYKFIKPILEKMDGTEELLVKLNREDLLRKQRTFDNGSIPHQIHLGELHAILRRQEDFYPFLKDNREKIEKILTFRIPYYVGPLARGNSRFAWMTRKSEETITPWNFEEVVDKGASAQSFIERMTNFDKNLPNEKVLPKHSLLYEYFTVYNELTKVKYVTEGMRKPAFLSGEQKKAIVDLLFKTNRKVTVKQLKEDYFKKIECFDSVEISGVEDRFNASLGTYHDLLKIIKDKDFLDNEENEDILEDIVLTLTLFEDREMIEERLKTYAHLFDDKVMKQLKRRRYTGWGRLSRKLINGIRDKQSGKTILDFLKSDGFANRNFMQLIHDDSLTFKEDIQKAQVSGQGDSLHEHIANLAGSPAIKKGILQTVKVVDELVKVMGRHKPENIVIEMARENQTTQKGQKNSRERMKRIEEGIKELGSQILKEHPVENTQLQNEKLYLYYLQNGRDMYVDQELDINRLSDYDVDHIVPQSFLKDDSIDNKVLTRSDKARGKSDNVPSEEVVKKMKNYWRQLLNAKLITQRKFDNLTKAERGGLSELDKAGFIKRQLVETRQITKHVAQILDSRMNTKYDENDKLIREVKVITLKSKLVSDFRKDFQFYKVREINNYHHAHDAYLNAVVGTALIKKYPKLESEFVYGDYKVYDVRKMIAKSEQEIGKATAKYFFYSNIMNFFKTEITLANGEIRKRPLIETNGETGEIVWDKGRDFATVRKVLSMPQVNIVKKTEVQTGGFSKESILPKRNSDKLIARKKDWDPKKYGGFDSPTVAYSVLVVAKVEKGKSKKLKSVKELLGITIMERSSFEKNPIDFLEAKGYKEVKKDLIIKLPKYSLFELENGRKRMLASAGELQKGNELALPSKYVNFLYLASHYEKLKGSPEDNEQKQLFVEQHKHYLDEIIEQISEFSKRVILADANLDKVLSAYNKHRDKPIREQAENIIHLFTLTNLGAPAAFKYFDTTIDRKRYTSTKEVLDATLIHQSITGLYETRIDLSQLGGDGGEAAAKGSSPAPGGMDLLKPLTVERKGVKIKGYWNSQADITCVPKDLLQGEEPVRQQNVTTIHGTQEGDVYYVNLKIDGRRINTEVIGTTLDYAIITPGDVPWILKKPLELTIKLDLEEQQGTLLNNSILSKKGKEELKQLFEKYSALWQSWENQVGHRRIRPHKIATGTVKPTPQKQYHINPKAKPDIQIVINDLLKQGVLIQKESTMNTPVYPVPKPNGRWRMVLDYRAVNKVTPLIAVQNQHSYGILGSLFKGRYKTTIDLSNGFWAHPIVPEDYWITAFTWQGKQYCWTVLPQGFLNSPGLFTGDVVDLLQGIPNVEVYVDDVYISHDSEKEHLEYLDILFNRLKEAGYIISLKKSNIANSIVDFLGFQITNEGRGLTDTFKEKLENITAPTTLKQLQSILGLLNFARNFIPDFTELIAPLYALIPKSTKNYVPWQIEHSTTLETLITKLNGAEYLQGRKGDKTLIMKVNASYTTGYIRYYNEGEKKPISYVSIVFSKTELKFTELEKLLTTVHKGLLKALDLSMGQNIHVYSPIVSMQNIQKTPQTAKKALASRWLSWLSYLEDPRIRFFYDPQMPALKDLPAVDTGKDNKKHPSNFQHIFYTDGSAITSPTKEGHLNAGMGIVYFINKDGNLQKQQEWSISLGNHTAQFAEIAAFEFALKKCLPLGGNILVVTDSNYVAKAYNEELDVWASNGFVNNRKKPLKHISKWKSVADLKRLRPDVVVTHEPGHQKLDSSPHAYGNNLADQLATQASFKVHAGKRTADGSEFEKRTADGSEFESPKKKAKVE

SEQ ID NO: 722 - protein, 2180 aa, synthetic construct
MPAAKRVKLDGGDKKYSIGLDIGTNSVGWAVITDEYKVPSKKFKVLGNTDRHSIKKNLIGALLFDSGETAEATRLKRTARRRYTRRKNRICYLQEIFSNEMAKVDDSFFHRLEESFLVEEDKKHERHPIFGNIVDEVAYHEKYPTIYHLRKKLVDSTDKADLRLIYLALAHMIKFRGHFLIEGDLNPDNSDVDKLFIQLVQTYNQLFEENPINASGVDAKAILSARLSKSRRLENLIAQLPGEKKNGLFGNLIALSLGLTPNFKSNFDLAEDAKLQLSKDTYDDDLDNLLAQIGDQYADLFLAAKNLSDAILLSDILRVNTEITKAPLSASMIKRYDEHHQDLTLLKALVRQQLPEKYKEIFFDQSKNGYAGYIDGGASQEEFYKFIKPILEKMDGTEELLVKLNREDLLRKQRTFDNGSIPHQIHLGELHAILRRQEDFYPFLKDNREKIEKILTFRIPYYVGPLARGNSRFAWMTRKSEETITPWNFEEVVDKGASAQSFIERMTNFDKNLPNEKVLPKHSLLYEYFTVYNELTKVKYVTEGMRKPAFLSGEQKKAIVDLLFKTNRKVTVKQLKEDYFKKIECFDSVEISGVEDRFNASLGTYHDLLKIIKDKDFLDNEENEDILEDIVLTLTLFEDREMIEERLKTYAHLFDDKVMKQLKRRRYTGWGRLSRKLINGIRDKQSGKTILDFLKSDGFANRNFMQLIHDDSLTFKEDIQKAQVSGQGDSLHEHIANLAGSPAIKKGILQTVKVVDELVKVMGRHKPENIVIEMARENQTTQKGQKNSRERMKRIEEGIKELGSQILKEHPVENTQLQNEKLYLYYLQNGRDMYVDQELDINRLSDYDVDHIVPQSFLKDDSIDNKVLTRSDKARGKSDNVPSEEVVKKMKNYWRQLLNAKLITQRKFDNLTKAERGGLSELDKAGFIKRQLVETRQITKHVAQILDSRMNTKYDENDKLIREVKVITLKSKLVSDFRKDFQFYKVREINNYHHAHDAYLNAVVGTALIKKYPKLESEFVYGDYKVYDVRKMIAKSEQEIGKATAKYFFYSNIMNFFKTEITLANGEIRKRPLIETNGETGEIVWDKGRDFATVRKVLSMPQVNIVKKTEVQTGGFSKESILPKRNSDKLIARKKDWDPKKYGGFDSPTVAYSVLVVAKVEKGKSKKLKSVKELLGITIMERSSFEKNPIDFLEAKGYKEVKKDLIIKLPKYSLFELENGRKRMLASAGELQKGNELALPSKYVNFLYLASHYEKLKGSPEDNEQKQLFVEQHKHYLDEIIEQISEFSKRVILADANLDKVLSAYNKHRDKPIREQAENIIHLFTLTNLGAPAAFKYFDTTIDRKRYTSTKEVLDATLIHQSITGLYETRIDLSQLGGDGGGSSGSSGSSGSSGSSGSSGGMDLLKPLTVERKGVKIKGYWNSQADITCVPKDLLQGEEPVRQQNVTTIHGTQEGDVYYVNLKIDGRRINTEVIGTTLDYAIITPGDVPWILKKPLELTIKLDLEEQQGTLLNNSILSKKGKEELKQLFEKYSALWQSWENQVGHRRIRPHKIATGTVKPTPQKQYHINPKAKPDIQIVINDLLKQGVLIQKESTMNTPVYPVPKPNGRWRMVLDYRAVNKVTPLIAVQNQHSYGILGSLFKGRYKTTIDLSNGFWAHPIVPEDYWITAFTWQGKQYCWTVLPQGFLNSPGLFTGDVVDLLQGIPNVEVYVDDVYISHDSEKEHLEYLDILFNRLKEAGYIISLKKSNIANSIVDFLGFQITNEGRGLTDTFKEKLENITAPTTLKQLQSILGLLNFARNFIPDFTELIAPLYALIPKSTKNYVPWQIEHSTTLETLITKLNGAEYLQGRKGDKTLIMKVNASYTTGYIRYYNEGEKKPISYVSIVFSKTELKFTELEKLLTTVHKGLLKALDLSMGQNIHVYSPIVSMQNIQKTPQTAKKALASRWLSWLSYLEDPRIRFFYDPQMPALKDLPAVDTGKDNKKHPSNFQHIFYTDGSAITSPTKEGHLNAGMGIVYFINKDGNLQKQQEWSISLGNHTAQFAEIAAFEFALKKCLPLGGNILVVTDSNYVAKAYNEELDVWASNGFVNNRKKPLKHISKWKSVADLKRLRPDVVVTHEPGHQKLDSSPHAYGNNLADQLATQASFKVHAGKRTADGSEFEKRTADGSEFESPKKKAKVE

SEQ ID NO: 723 - protein, 2171 aa, synthetic construct
MPAAKRVKLDGGDKKYSIGLDIGTNSVGWAVITDEYKVPSKKFKVLGNTDRHSIKKNLIGALLFDSGETAEATRLKRTARRRYTRRKNRICYLQEIFSNEMAKVDDSFFHRLEESFLVEEDKKHERHPIFGNIVDEVAYHEKYPTIYHLRKKLVDSTDKADLRLIYLALAHMIKFRGHFLIEGDLNPDNSDVDKLFIQLVQTYNQLFEENPINASGVDAKAILSARLSKSRRLENLIAQLPGEKKNGLFGNLIALSLGLTPNFKSNFDLAEDAKLQLSKDTYDDDLDNLLAQIGDQYADLFLAAKNLSDAILLSDILRVNTEITKAPLSASMIKRYDEHHQDLTLLKALVRQQLPEKYKEIFFDQSKNGYAGYIDGGASQEEFYKFIKPILEKMDGTEELLVKLNREDLLRKQRTFDNGSIPHQIHLGELHAILRRQEDFYPFLKDNREKIEKILTFRIPYYVGPLARGNSRFAWMTRKSEETITPWNFEEVVDKGASAQSFIERMTNFDKNLPNEKVLPKHSLLYEYFTVYNELTKVKYVTEGMRKPAFLSGEQKKAIVDLLFKTNRKVTVKQLKEDYFKKIECFDSVEISGVEDRFNASLGTYHDLLKIIKDKDFLDNEENEDILEDIVLTLTLFEDREMIEERLKTYAHLFDDKVMKQLKRRRYTGWGRLSRKLINGIRDKQSGKTILDFLKSDGFANRNFMQLIHDDSLTFKEDIQKAQVSGQGDSLHEHIANLAGSPAIKKGILQTVKVVDELVKVMGRHKPENIVIEMARENQTTQKGQKNSRERMKRIEEGIKELGSQILKEHPVENTQLQNEKLYLYYLQNGRDMYVDQELDINRLSDYDVDHIVPQSFLKDDSIDNKVLTRSDKARGKSDNVPSEEVVKKMKNYWRQLLNAKLITQRKFDNLTKAERGGLSELDKAGFIKRQLVETRQITKHVAQILDSRMNTKYDENDKLIREVKVITLKSKLVSDFRKDFQFYKVREINNYHHAHDAYLNAVVGTALIKKYPKLESEFVYGDYKVYDVRKMIAKSEQEIGKATAKYFFYSNIMNFFKTEITLANGEIRKRPLIETNGETGEIVWDKGRDFATVRKVLSMPQVNIVKKTEVQTGGFSKESILPKRNSDKLIARKKDWDPKKYGGFDSPTVAYSVLVVAKVEKGKSKKLKSVKELLGITIMERSSFEKNPIDFLEAKGYKEVKKDLIIKLPKYSLFELENGRKRMLASAGELQKGNELALPSKYVNFLYLASHYEKLKGSPEDNEQKQLFVEQHKHYLDEIIEQISEFSKRVILADANLDKVLSAYNKHRDKPIREQAENIIHLFTLTNLGAPAAFKYFDTTIDRKRYTSTKEVLDATLIHQSITGLYETRIDLSQLGGDGGPAPAPAPAPGGMDLLKPLTVERKGVKIKGYWNSQADITCVPKDLLQGEEPVRQQNVTTIHGTQEGDVYYVNLKIDGRRINTEVIGTTLDYAIITPGDVPWILKKPLELTIKLDLEEQQGTLLNNSILSKKGKEELKQLFEKYSALWQSWENQVGHRRIRPHKIATGTVKPTPQKQYHINPKAKPDIQIVINDLLKQGVLIQKESTMNTPVYPVPKPNGRWRMVLDYRAVNKVTPLIAVQNQHSYGILGSLFKGRYKTTIDLSNGFWAHPIVPEDYWITAFTWQGKQYCWTVLPQGFLNSPGLFTGDVVDLLQGIPNVEVYVDDVYISHDSEKEHLEYLDILFNRLKEAGYIISLKKSNIANSIVDFLGFQITNEGRGLTDTFKEKLENITAPTTLKQLQSILGLLNFARNFIPDFTELIAPLYALIPKSTKNYVPWQIEHSTTLETLITKLNGAEYLQGRKGDKTLIMKVNASYTTGYIRYYNEGEKKPISYVSIVFSKTELKFTELEKLLTTVHKGLLKALDLSMGQNIHVYSPIVSMQNIQKTPQTAKKALASRWLSWLSYLEDPRIRFFYDPQMPALKDLPAVDTGKDNKKHPSNFQHIFYTDGSAITSPTKEGHLNAGMGIVYFINKDGNLQKQQEWSISLGNHTAQFAEIAAFEFALKKCLPLGGNILVVTDSNYVAKAYNEELDVWASNGFVNNRKKPLKHISKWKSVADLKRLRPDVVVTHEPGHQKLDSSPHAYGNNLADQLATQASFKVHAGKRTADGSEFEKRTADGSEFESPKKKAKVE

SEQ ID NO: 724 - protein, 2170 aa, synthetic construct
MPAAKRVKLDGGDKKYSIGLDIGTNSVGWAVITDEYKVPSKKFKVLGNTDRHSIKKNLIGALLFDSGETAEATRLKRTARRRYTRRKNRICYLQEIFSNEMAKVDDSFFHRLEESFLVEEDKKHERHPIFGNIVDEVAYHEKYPTIYHLRKKLVDSTDKADLRLIYLALAHMIKFRGHFLIEGDLNPDNSDVDKLFIQLVQTYNQLFEENPINASGVDAKAILSARLSKSRRLENLIAQLPGEKKNGLFGNLIALSLGLTPNFKSNFDLAEDAKLQLSKDTYDDDLDNLLAQIGDQYADLFLAAKNLSDAILLSDILRVNTEITKAPLSASMIKRYDEHHQDLTLLKALVRQQLPEKYKEIFFDQSKNGYAGYIDGGASQEEFYKFIKPILEKMDGTEELLVKLNREDLLRKQRTFDNGSIPHQIHLGELHAILRRQEDFYPFLKDNREKIEKILTFRIPYYVGPLARGNSRFAWMTRKSEETITPWNFEEVVDKGASAQSFIERMTNFDKNLPNEKVLPKHSLLYEYFTVYNELTKVKYVTEGMRKPAFLSGEQKKAIVDLLFKTNRKVTVKQLKEDYFKKIECFDSVEISGVEDRFNASLGTYHDLLKIIKDKDFLDNEENEDILEDIVLTLTLFEDREMIEERLKTYAHLFDDKVMKQLKRRRYTGWGRLSRKLINGIRDKQSGKTILDFLKSDGFANRNFMQLIHDDSLTFKEDIQKAQVSGQGDSLHEHIANLAGSPAIKKGILQTVKVVDELVKVMGRHKPENIVIEMARENQTTQKGQKNSRERMKRIEEGIKELGSQILKEHPVENTQLQNEKLYLYYLQNGRDMYVDQELDINRLSDYDVDHIVPQSFLKDDSIDNKVLTRSDKARGKSDNVPSEEVVKKMKNYWRQLLNAKLITQRKFDNLTKAERGGLSELDKAGFIKRQLVETRQITKHVAQILDSRMNTKYDENDKLIREVKVITLKSKLVSDFRKDFQFYKVREINNYHHAHDAYLNAVVGTALIKKYPKLESEFVYGDYKVYDVRKMIAKSEQEIGKATAKYFFYSNIMNFFKTEITLANGEIRKRPLIETNGETGEIVWDKGRDFATVRKVLSMPQVNIVKKTEVQTGGFSKESILPKRNSDKLIARKKDWDPKKYGGFDSPTVAYSVLVVAKVEKGKSKKLKSVKELLGITIMERSSFEKNPIDFLEAKGYKEVKKDLIIKLPKYSLFELENGRKRMLASAGELQKGNELALPSKYVNFLYLASHYEKLKGSPEDNEQKQLFVEQHKHYLDEIIEQISEFSKRVILADANLDKVLSAYNKHRDKPIREQAENIIHLFTLTNLGAPAAFKYFDTTIDRKRYTSTKEVLDATLIHQSITGLYETRIDLSQLGGDGGGSSEAAAKGGMDLLKPLTVERKGVKIKGYWNSQADITCVPKDLLQGEEPVRQQNVTTIHGTQEGDVYYVNLKIDGRRINTEVIGTTLDYAIITPGDVPWILKKPLELTIKLDLEEQQGTLLNNSILSKKGKEELKQLFEKYSALWQSWENQVGHRRIRPHKIATGTVKPTPQKQYHINPKAKPDIQIVINDLLKQGVLIQKESTMNTPVYPVPKPNGRWRMVLDYRAVNKVTPLIAVQNQHSYGILGSLFKGRYKTTIDLSNGFWAHPIVPEDYWITAFTWQGKQYCWTVLPQGFLNSPGLFTGDVVDLLQGIPNVEVYVDDVYISHDSEKEHLEYLDILFNRLKEAGYIISLKKSNIANSIVDFLGFQITNEGRGLTDTFKEKLENITAPTTLKQLQSILGLLNFARNFIPDFTELIAPLYALIPKSTKNYVPWQIEHSTTLETLITKLNGAEYLQGRKGDKTLIMKVNASYTTGYIRYYNEGEKKPISYVSIVFSKTELKFTELEKLLTTVHKGLLKALDLSMGQNIHVYSPIVSMQNIQKTPQTAKKALASRWLSWLSYLEDPRIRFFYDPQMPALKDLPAVDTGKDNKKHPSNFQHIFYTDGSAITSPTKEGHLNAGMGIVYFINKDGNLQKQQEWSISLGNHTAQFAEIAAFEFALKKCLPLGGNILVVTDSNYVAKAYNEELDVWASNGFVNNRKKPLKHISKWKSVADLKRLRPDVVVTHEPGHQKLDSSPHAYGNNLADQLATQASFKVHAGKRTADGSEFEKRTADGSEFESPKKKAKVE

SEQ ID NO: 725 - protein, 2165 aa, synthetic construct
MPAAKRVKLDGGDKKYSIGLDIGTNSVGWAVITDEYKVPSKKFKVLGNTDRHSIKKNLIGALLFDSGETAEATRLKRTARRRYTRRKNRICYLQEIFSNEMAKVDDSFFHRLEESFLVEEDKKHERHPIFGNIVDEVAYHEKYPTIYHLRKKLVDSTDKADLRLIYLALAHMIKFRGHFLIEGDLNPDNSDVDKLFIQLVQTYNQLFEENPINASGVDAKAILSARLSKSRRLENLIAQLPGEKKNGLFGNLIALSLGLTPNFKSNFDLAEDAKLQLSKDTYDDDLDNLLAQIGDQYADLFLAAKNLSDAILLSDILRVNTEITKAPLSASMIKRYDEHHQDLTLLKALVRQQLPEKYKEIFFDQSKNGYAGYIDGGASQEEFYKFIKPILEKMDGTEELLVKLNREDLLRKQRTFDNGSIPHQIHLGELHAILRRQEDFYPFLKDNREKIEKILTFRIPYYVGPLARGNSRFAWMTRKSEETITPWNFEEVVDKGASAQSFIERMTNFDKNLPNEKVLPKHSLLYEYFTVYNELTKVKYVTEGMRKPAFLSGEQKKAIVDLLFKTNRKVTVKQLKEDYFKKIECFDSVEISGVEDRFNASLGTYHDLLKIIKDKDFLDNEENEDILEDIVLTLTLFEDREMIEERLKTYAHLFDDKVMKQLKRRRYTGWGRLSRKLINGIRDKQSGKTILDFLKSDGFANRNFMQLIHDDSLTFKEDIQKAQVSGQGDSLHEHIANLAGSPAIKKGILQTVKVVDELVKVMGRHKPENIVIEMARENQTTQKGQKNSRERMKRIEEGIKELGSQILKEHPVENTQLQNEKLYLYYLQNGRDMYVDQELDINRLSDYDVDHIVPQSFLKDDSIDNKVLTRSDKARGKSDNVPSEEVVKKMKNYWRQLLNAKLITQRKFDNLTKAERGGLSELDKAGFIKRQLVETRQITKHVAQILDSRMNTKYDENDKLIREVKVITLKSKLVSDFRKDFQFYKVREINNYHHAHDAYLNAVVGTALIKKYPKLESEFVYGDYKVYDVRKMIAKSEQEIGKATAKYFFYSNIMNFFKTEITLANGEIRKRPLIETNGETGEIVWDKGRDFATVRKVLSMPQVNIVKKTEVQTGGFSKESILPKRNSDKLIARKKDWDPKKYGGFDSPTVAYSVLVVAKVEKGKSKKLKSVKELLGITIMERSSFEKNPIDFLEAKGYKEVKKDLIIKLPKYSLFELENGRKRMLASAGELQKGNELALPSKYVNFLYLASHYEKLKGSPEDNEQKQLFVEQHKHYLDEIIEQISEFSKRVILADANLDKVLSAYNKHRDKPIREQAENIIHLFTLTNLGAPAAFKYFDTTIDRKRYTSTKEVLDATLIHQSITGLYETRIDLSQLGGDGGGSSGGMDLLKPLTVERKGVKIKGYWNSQADITCVPKDLLQGEEPVRQQNVTTIHGTQEGDVYYVNLKIDGRRINTEVIGTTLDYAIITPGDVPWILKKPLELTIKLDLEEQQGTLLNNSILSKKGKEELKQLFEKYSALWQSWENQVGHRRIRPHKIATGTVKPTPQKQYHINPKAKPDIQIVINDLLKQGVLIQKESTMNTPVYPVPKPNGRWRMVLDYRAVNKVTPLIAVQNQHSYGILGSLFKGRYKTTIDLSNGFWAHPIVPEDYWITAFTWQGKQYCWTVLPQGFLNSPGLFTGDVVDLLQGIPNVEVYVDDVYISHDSEKEHLEYLDILFNRLKEAGYIISLKKSNIANSIVDFLGFQITNEGRGLTDTFKEKLENITAPTTLKQLQSILGLLNFARNFIPDFTELIAPLYALIPKSTKNYVPWQIEHSTTLETLITKLNGAEYLQGRKGDKTLIMKVNASYTTGYIRYYNEGEKKPISYVSIVFSKTELKFTELEKLLTTVHKGLLKALDLSMGQNIHVYSPIVSMQNIQKTPQTAKKALASRWLSWLSYLEDPRIRFFYDPQMPALKDLPAVDTGKDNKKHPSNFQHIFYTDGSAITSPTKEGHLNAGMGIVYFINKDGNLQKQQEWSISLGNHTAQFAEIAAFEFALKKCLPLGGNILVVTDSNYVAKAYNEELDVWASNGFVNNRKKPLKHISKWKSVADLKRLRPDVVVTHEPGHQKLDSSPHAYGNNLADQLATQASFKVHAGKRTADGSEFEKRTADGSEFESPKKKAKVE

SEQ ID NO: 726 - protein, 2173 aa, synthetic construct
MPAAKRVKLDGGDKKYSIGLDIGTNSVGWAVITDEYKVPSKKFKVLGNTDRHSIKKNLIGALLFDSGETAEATRLKRTARRRYTRRKNRICYLQEIFSNEMAKVDDSFFHRLEESFLVEEDKKHERHPIFGNIVDEVAYHEKYPTIYHLRKKLVDSTDKADLRLIYLALAHMIKFRGHFLIEGDLNPDNSDVDKLFIQLVQTYNQLFEENPINASGVDAKAILSARLSKSRRLENLIAQLPGEKKNGLFGNLIALSLGLTPNFKSNFDLAEDAKLQLSKDTYDDDLDNLLAQIGDQYADLFLAAKNLSDAILLSDILRVNTEITKAPLSASMIKRYDEHHQDLTLLKALVRQQLPEKYKEIFFDQSKNGYAGYIDGGASQEEFYKFIKPILEKMDGTEELLVKLNREDLLRKQRTFDNGSIPHQIHLGELHAILRRQEDFYPFLKDNREKIEKILTFRIPYYVGPLARGNSRFAWMTRKSEETITPWNFEEVVDKGASAQSFIERMTNFDKNLPNEKVLPKHSLLYEYFTVYNELTKVKYVTEGMRKPAFLSGEQKKAIVDLLFKTNRKVTVKQLKEDYFKKIECFDSVEISGVEDRFNASLGTYHDLLKIIKDKDFLDNEENEDILEDIVLTLTLFEDREMIEERLKTYAHLFDDKVMKQLKRRRYTGWGRLSRKLINGIRDKQSGKTILDFLKSDGFANRNFMQLIHDDSLTFKEDIQKAQVSGQGDSLHEHIANLAGSPAIKKGILQTVKVVDELVKVMGRHKPENIVIEMARENQTTQKGQKNSRERMKRIEEGIKELGSQILKEHPVENTQLQNEKLYLYYLQNGRDMYVDQELDINRLSDYDVDHIVPQSFLKDDSIDNKVLTRSDKARGKSDNVPSEEVVKKMKNYWRQLLNAKLITQRKFDNLTKAERGGLSELDKAGFIKRQLVETRQITKHVAQILDSRMNTKYDENDKLIREVKVITLKSKLVSDFRKDFQFYKVREINNYHHAHDAYLNAVVGTALIKKYPKLESEFVYGDYKVYDVRKMIAKSEQEIGKATAKYFFYSNIMNFFKTEITLANGEIRKRPLIETNGETGEIVWDKGRDFATVRKVLSMPQVNIVKKTEVQTGGFSKESILPKRNSDKLIARKKDWDPKKYGGFDSPTVAYSVLVVAKVEKGKSKKLKSVKELLGITIMERSSFEKNPIDFLEAKGYKEVKKDLIIKLPKYSLFELENGRKRMLASAGELQKGNELALPSKYVNFLYLASHYEKLKGSPEDNEQKQLFVEQHKHYLDEIIEQISEFSKRVILADANLDKVLSAYNKHRDKPIREQAENIIHLFTLTNLGAPAAFKYFDTTIDRKRYTSTKEVLDATLIHQSITGLYETRIDLSQLGGDGGEAAAKGGSGGGGGMDLLKPLTVERKGVKIKGYWNSQADITCVPKDLLQGEEPVRQQNVTTIHGTQEGDVYYVNLKIDGRRINTEVIGTTLDYAIITPGDVPWILKKPLELTIKLDLEEQQGTLLNNSILSKKGKEELKQLFEKYSALWQSWENQVGHRRIRPHKIATGTVKPTPQKQYHINPKAKPDIQIVINDLLKQGVLIQKESTMNTPVYPVPKPNGRWRMVLDYRAVNKVTPLIAVQNQHSYGILGSLFKGRYKTTIDLSNGFWAHPIVPEDYWITAFTWQGKQYCWTVLPQGFLNSPGLFTGDVVDLLQGIPNVEVYVDDVYISHDSEKEHLEYLDILFNRLKEAGYIISLKKSNIANSIVDFLGFQITNEGRGLTDTFKEKLENITAPTTLKQLQSILGLLNFARNFIPDFTELIAPLYALIPKSTKNYVPWQIEHSTTLETLITKLNGAEYLQGRKGDKTLIMKVNASYTTGYIRYYNEGEKKPISYVSIVFSKTELKFTELEKLLTTVHKGLLKALDLSMGQNIHVYSPIVSMQNIQKTPQTAKKALASRWLSWLSYLEDPRIRFFYDPQMPALKDLPAVDTGKDNKKHPSNFQHIFYTDGSAITSPTKEGHLNAGMGIVYFINKDGNLQKQQEWSISLGNHTAQFAEIAAFEFALKKCLPLGGNILVVTDSNYVAKAYNEELDVWASNGFVNNRKKPLKHISKWKSVADLKRLRPDVVVTHEPGHQKLDSSPHAYGNNLADQLATQASFKVHAGKRTADGSEFEKRTADGSEFESPKKKAKVE

SEQ ID NO: 727 - protein, 2173 aa, synthetic construct
MPAAKRVKLDGGDKKYSIGLDIGTNSVGWAVITDEYKVPSKKFKVLGNTDRHSIKKNLIGALLFDSGETAEATRLKRTARRRYTRRKNRICYLQEIFSNEMAKVDDSFFHRLEESFLVEEDKKHERHPIFGNIVDEVAYHEKYPTIYHLRKKLVDSTDKADLRLIYLALAHMIKFRGHFLIEGDLNPDNSDVDKLFIQLVQTYNQLFEENPINASGVDAKAILSARLSKSRRLENLIAQLPGEKKNGLFGNLIALSLGLTPNFKSNFDLAEDAKLQLSKDTYDDDLDNLLAQIGDQYADLFLAAKNLSDAILLSDILRVNTEITKAPLSASMIKRYDEHHQDLTLLKALVRQQLPEKYKEIFFDQSKNGYAGYIDGGASQEEFYKFIKPILEKMDGTEELLVKLNREDLLRKQRTFDNGSIPHQIHLGELHAILRRQEDFYPFLKDNREKIEKILTFRIPYYVGPLARGNSRFAWMTRKSEETITPWNFEEVVDKGASAQSFIERMTNFDKNLPNEKVLPKHSLLYEYFTVYNELTKVKYVTEGMRKPAFLSGEQKKAIVDLLFKTNRKVTVKQLKEDYFKKIECFDSVEISGVEDRFNASLGTYHDLLKIIKDKDFLDNEENEDILEDIVLTLTLFEDREMIEERLKTYAHLFDDKVMKQLKRRRYTGWGRLSRKLINGIRDKQSGKTILDFLKSDGFANRNFMQLIHDDSLTFKEDIQKAQVSGQGDSLHEHIANLAGSPAIKKGILQTVKVVDELVKVMGRHKPENIVIEMARENQTTQKGQKNSRERMKRIEEGIKELGSQILKEHPVENTQLQNEKLYLYYLQNGRDMYVDQELDINRLSDYDVDHIVPQSFLKDDSIDNKVLTRSDKARGKSDNVPSEEVVKKMKNYWRQLLNAKLITQRKFDNLTKAERGGLSELDKAGFIKRQLVETRQITKHVAQILDSRMNTKYDENDKLIREVKVITLKSKLVSDFRKDFQFYKVREINNYHHAHDAYLNAVVGTALIKKYPKLESEFVYGDYKVYDVRKMIAKSEQEIGKATAKYFFYSNIMNFFKTEITLANGEIRKRPLIETNGETGEIVWDKGRDFATVRKVLSMPQVNIVKKTEVQTGGFSKESILPKRNSDKLIARKKDWDPKKYGGFDSPTVAYSVLVVAKVEKGKSKKLKSVKELLGITIMERSSFEKNPIDFLEAKGYKEVKKDLIIKLPKYSLFELENGRKRMLASAGELQKGNELALPSKYVNFLYLASHYEKLKGSPEDNEQKQLFVEQHKHYLDEIIEQISEFSKRVILADANLDKVLSAYNKHRDKPIREQAENIIHLFTLTNLGAPAAFKYFDTTIDRKRYTSTKEVLDATLIHQSITGLYETRIDLSQLGGDGGGSSEAAAKPAPGGMDLLKPLTVERKGVKIKGYWNSQADITCVPKDLLQGEEPVRQQNVTTIHGTQEGDVYYVNLKIDGRRINTEVIGTTLDYAIITPGDVPWILKKPLELTIKLDLEEQQGTLLNNSILSKKGKEELKQLFEKYSALWQSWENQVGHRRIRPHKIATGTVKPTPQKQYHINPKAKPDIQIVINDLLKQGVLIQKESTMNTPVYPVPKPNGRWRMVLDYRAVNKVTPLIAVQNQHSYGILGSLFKGRYKTTIDLSNGFWAHPIVPEDYWITAFTWQGKQYCWTVLPQGFLNSPGLFTGDVVDLLQGIPNVEVYVDDVYISHDSEKEHLEYLDILFNRLKEAGYIISLKKSNIANSIVDFLGFQITNEGRGLTDTFKEKLENITAPTTLKQLQSILGLLNFARNFIPDFTELIAPLYALIPKSTKNYVPWQIEHSTTLETLITKLNGAEYLQGRKGDKTLIMKVNASYTTGYIRYYNEGEKKPISYVSIVFSKTELKFTELEKLLTTVHKGLLKALDLSMGQNIHVYSPIVSMQNIQKTPQTAKKALASRWLSWLSYLEDPRIRFFYDPQMPALKDLPAVDTGKDNKKHPSNFQHIFYTDGSAITSPTKEGHLNAGMGIVYFINKDGNLQKQQEWSISLGNHTAQFAEIAAFEFALKKCLPLGGNILVVTDSNYVAKAYNEELDVWASNGFVNNRKKPLKHISKWKSVADLKRLRPDVVVTHEPGHQKLDSSPHAYGNNLADQLATQASFKVHAGKRTADGSEFEKRTADGSEFESPKKKAKVE

SEQ ID NO: 728 - protein, 2173 aa, synthetic construct
MPAAKRVKLDGGDKKYSIGLDIGTNSVGWAVITDEYKVPSKKFKVLGNTDRHSIKKNLIGALLFDSGETAEATRLKRTARRRYTRRKNRICYLQEIFSNEMAKVDDSFFHRLEESFLVEEDKKHERHPIFGNIVDEVAYHEKYPTIYHLRKKLVDSTDKADLRLIYLALAHMIKFRGHFLIEGDLNPDNSDVDKLFIQLVQTYNQLFEENPINASGVDAKAILSARLSKSRRLENLIAQLPGEKKNGLFGNLIALSLGLTPNFKSNFDLAEDAKLQLSKDTYDDDLDNLLAQIGDQYADLFLAAKNLSDAILLSDILRVNTEITKAPLSASMIKRYDEHHQDLTLLKALVRQQLPEKYKEIFFDQSKNGYAGYIDGGASQEEFYKFIKPILEKMDGTEELLVKLNREDLLRKQRTFDNGSIPHQIHLGELHAILRRQEDFYPFLKDNREKIEKILTFRIPYYVGPLARGNSRFAWMTRKSEETITPWNFEEVVDKGASAQSFIERMTNFDKNLPNEKVLPKHSLLYEYFTVYNELTKVKYVTEGMRKPAFLSGEQKKAIVDLLFKTNRKVTVKQLKEDYFKKIECFDSVEISGVEDRFNASLGTYHDLLKIIKDKDFLDNEENEDILEDIVLTLTLFEDREMIEERLKTYAHLFDDKVMKQLKRRRYTGWGRLSRKLINGIRDKQSGKTILDFLKSDGFANRNFMQLIHDDSLTFKEDIQKAQVSGQGDSLHEHIANLAGSPAIKKGILQTVKVVDELVKVMGRHKPENIVIEMARENQTTQKGQKNSRERMKRIEEGIKELGSQILKEHPVENTQLQNEKLYLYYLQNGRDMYVDQELDINRLSDYDVDHIVPQSFLKDDSIDNKVLTRSDKARGKSDNVPSEEVVKKMKNYWRQLLNAKLITQRKFDNLTKAERGGLSELDKAGFIKRQLVETRQITKHVAQILDSRMNTKYDENDKLIREVKVITLKSKLVSDFRKDFQFYKVREINNYHHAHDAYLNAVVGTALIKKYPKLESEFVYGDYKVYDVRKMIAKSEQEIGKATAKYFFYSNIMNFFKTEITLANGEIRKRPLIETNGETGEIVWDKGRDFATVRKVLSMPQVNIVKKTEVQTGGFSKESILPKRNSDKLIARKKDWDPKKYGGFDSPTVAYSVLVVAKVEKGKSKKLKSVKELLGITIMERSSFEKNPIDFLEAKGYKEVKKDLIIKLPKYSLFELENGRKRMLASAGELQKGNELALPSKYVNFLYLASHYEKLKGSPEDNEQKQLFVEQHKHYLDEIIEQISEFSKRVILADANLDKVLSAYNKHRDKPIREQAENIIHLFTLTNLGAPAAFKYFDTTIDRKRYTSTKEVLDATLIHQSITGLYETRIDLSQLGGDGGGSSGGGEAAAKGGMDLLKPLTVERKGVKIKGYWNSQADITCVPKDLLQGEEPVRQQNVTTIHGTQEGDVYYVNLKIDGRRINTEVIGTTLDYAIITPGDVPWILKKPLELTIKLDLEEQQGTLLNNSILSKKGKEELKQLFEKYSALWQSWENQVGHRRIRPHKIATGTVKPTPQKQYHINPKAKPDIQIVINDLLKQGVLIQKESTMNTPVYPVPKPNGRWRMVLDYRAVNKVTPLIAVQNQHSYGILGSLFKGRYKTTIDLSNGFWAHPIVPEDYWITAFTWQGKQYCWTVLPQGFLNSPGLFTGDVVDLLQGIPNVEVYVDDVYISHDSEKEHLEYLDILFNRLKEAGYIISLKKSNIANSIVDFLGFQITNEGRGLTDTFKEKLENITAPTTLKQLQSILGLLNFARNFIPDFTELIAPLYALIPKSTKNYVPWQIEHSTTLETLITKLNGAEYLQGRKGDKTLIMKVNASYTTGYIRYYNEGEKKPISYVSIVFSKTELKFTELEKLLTTVHKGLLKALDLSMGQNIHVYSPIVSMQNIQKTPQTAKKALASRWLSWLSYLEDPRIRFFYDPQMPALKDLPAVDTGKDNKKHPSNFQHIFYTDGSAITSPTKEGHLNAGMGIVYFINKDGNLQKQQEWSISLGNHTAQFAEIAAFEFALKKCLPLGGNILVVTDSNYVAKAYNEELDVWASNGFVNNRKKPLKHISKWKSVADLKRLRPDVVVTHEPGHQKLDSSPHAYGNNLADQLATQASFKVHAGKRTADGSEFEKRTADGSEFESPKKKAKVE

SEQ ID NO: 729 - protein, 2171 aa, synthetic construct
MPAAKRVKLDGGDKKYSIGLDIGTNSVGWAVITDEYKVPSKKFKVLGNTDRHSIKKNLIGALLFDSGETAEATRLKRTARRRYTRRKNRICYLQEIFSNEMAKVDDSFFHRLEESFLVEEDKKHERHPIFGNIVDEVAYHEKYPTIYHLRKKLVDSTDKADLRLIYLALAHMIKFRGHFLIEGDLNPDNSDVDKLFIQLVQTYNQLFEENPINASGVDAKAILSARLSKSRRLENLIAQLPGEKKNGLFGNLIALSLGLTPNFKSNFDLAEDAKLQLSKDTYDDDLDNLLAQIGDQYADLFLAAKNLSDAILLSDILRVNTEITKAPLSASMIKRYDEHHQDLTLLKALVRQQLPEKYKEIFFDQSKNGYAGYIDGGASQEEFYKFIKPILEKMDGTEELLVKLNREDLLRKQRTFDNGSIPHQIHLGELHAILRRQEDFYPFLKDNREKIEKILTFRIPYYVGPLARGNSRFAWMTRKSEETITPWNFEEVVDKGASAQSFIERMTNFDKNLPNEKVLPKHSLLYEYFTVYNELTKVKYVTEGMRKPAFLSGEQKKAIVDLLFKTNRKVTVKQLKEDYFKKIECFDSVEISGVEDRFNASLGTYHDLLKIIKDKDFLDNEENEDILEDIVLTLTLFEDREMIEERLKTYAHLFDDKVMKQLKRRRYTGWGRLSRKLINGIRDKQSGKTILDFLKSDGFANRNFMQLIHDDSLTFKEDIQKAQVSGQGDSLHEHIANLAGSPAIKKGILQTVKVVDELVKVMGRHKPENIVIEMARENQTTQKGQKNSRERMKRIEEGIKELGSQILKEHPVENTQLQNEKLYLYYLQNGRDMYVDQELDINRLSDYDVDHIVPQSFLKDDSIDNKVLTRSDKARGKSDNVPSEEVVKKMKNYWRQLLNAKLITQRKFDNLTKAERGGLSELDKAGFIKRQLVETRQITKHVAQILDSRMNTKYDENDKLIREVKVITLKSKLVSDFRKDFQFYKVREINNYHHAHDAYLNAVVGTALIKKYPKLESEFVYGDYKVYDVRKMIAKSEQEIGKATAKYFFYSNIMNFFKTEITLANGEIRKRPLIETNGETGEIVWDKGRDFATVRKVLSMPQVNIVKKTEVQTGGFSKESILPKRNSDKLIARKKDWDPKKYGGFDSPTVAYSVLVVAKVEKGKSKKLKSVKELLGITIMERSSFEKNPIDFLEAKGYKEVKKDLIIKLPKYSLFELENGRKRMLASAGELQKGNELALPSKYVNFLYLASHYEKLKGSPEDNEQKQLFVEQHKHYLDEIIEQISEFSKRVILADANLDKVLSAYNKHRDKPIREQAENIIHLFTLTNLGAPAAFKYFDTTIDRKRYTSTKEVLDATLIHQSITGLYETRIDLSQLGGDGGGGSGSSGGGGGMDLLKPLTVERKGVKIKGYWNSQADITCVPKDLLQGEEPVRQQNVTTIHGTQEGDVYYVNLKIDGRRINTEVIGTTLDYAIITPGDVPWILKKPLELTIKLDLEEQQGTLLNNSILSKKGKEELKQLFEKYSALWQSWENQVGHRRIRPHKIATGTVKPTPQKQYHINPKAKPDIQIVINDLLKQGVLIQKESTMNTPVYPVPKPNGRWRMVLDYRAVNKVTPLIAVQNQHSYGILGSLFKGRYKTTIDLSNGFWAHPIVPEDYWITAFTWQGKQYCWTVLPQGFLNSPGLFTGDVVDLLQGIPNVEVYVDDVYISHDSEKEHLEYLDILFNRLKEAGYIISLKKSNIANSIVDFLGFQITNEGRGLTDTFKEKLENITAPTTLKQLQSILGLLNFARNFIPDFTELIAPLYALIPKSTKNYVPWQIEHSTTLETLITKLNGAEYLQGRKGDKTLIMKVNASYTTGYIRYYNEGEKKPISYVSIVFSKTELKFTELEKLLTTVHKGLLKALDLSMGQNIHVYSPIVSMQNIQKTPQTAKKALASRWLSWLSYLEDPRIRFFYDPQMPALKDLPAVDTGKDNKKHPSNFQHIFYTDGSAITSPTKEGHLNAGMGIVYFINKDGNLQKQQEWSISLGNHTAQFAEIAAFEFALKKCLPLGGNILVVTDSNYVAKAYNEELDVWASNGFVNNRKKPLKHISKWKSVADLKRLRPDVVVTHEPGHQKLDSSPHAYGNNLADQLATQASFKVHAGKRTADGSEFEKRTADGSEFESPKKKAKVE

SEQ ID NO: 730 - protein, 2173 aa, synthetic construct
MPAAKRVKLDGGDKKYSIGLDIGTNSVGWAVITDEYKVPSKKFKVLGNTDRHSIKKNLIGALLFDSGETAEATRLKRTARRRYTRRKNRICYLQEIFSNEMAKVDDSFFHRLEESFLVEEDKKHERHPIFGNIVDEVAYHEKYPTIYHLRKKLVDSTDKADLRLIYLALAHMIKFRGHFLIEGDLNPDNSDVDKLFIQLVQTYNQLFEENPINASGVDAKAILSARLSKSRRLENLIAQLPGEKKNGLFGNLIALSLGLTPNFKSNFDLAEDAKLQLSKDTYDDDLDNLLAQIGDQYADLFLAAKNLSDAILLSDILRVNTEITKAPLSASMIKRYDEHHQDLTLLKALVRQQLPEKYKEIFFDQSKNGYAGYIDGGASQEEFYKFIKPILEKMDGTEELLVKLNREDLLRKQRTFDNGSIPHQIHLGELHAILRRQEDFYPFLKDNREKIEKILTFRIPYYVGPLARGNSRFAWMTRKSEETITPWNFEEVVDKGASAQSFIERMTNFDKNLPNEKVLPKHSLLYEYFTVYNELTKVKYVTEGMRKPAFLSGEQKKAIVDLLFKTNRKVTVKQLKEDYFKKIECFDSVEISGVEDRFNASLGTYHDLLKIIKDKDFLDNEENEDILEDIVLTLTLFEDREMIEERLKTYAHLFDDKVMKQLKRRRYTGWGRLSRKLINGIRDKQSGKTILDFLKSDGFANRNFMQLIHDDSLTFKEDIQKAQVSGQGDSLHEHIANLAGSPAIKKGILQTVKVVDELVKVMGRHKPENIVIEMARENQTTQKGQKNSRERMKRIEEGIKELGSQILKEHPVENTQLQNEKLYLYYLQNGRDMYVDQELDINRLSDYDVDHIVPQSFLKDDSIDNKVLTRSDKARGKSDNVPSEEVVKKMKNYWRQLLNAKLITQRKFDNLTKAERGGLSELDKAGFIKRQLVETRQITKHVAQILDSRMNTKYDENDKLIREVKVITLKSKLVSDFRKDFQFYKVREINNYHHAHDAYLNAVVGTALIKKYPKLESEFVYGDYKVYDVRKMIAKSEQEIGKATAKYFFYSNIMNFFKTEITLANGEIRKRPLIETNGETGEIVWDKGRDFATVRKVLSMPQVNIVKKTEVQTGGFSKESILPKRNSDKLIARKKDWDPKKYGGFDSPTVAYSVLVVAKVEKGKSKKLKSVKELLGITIMERSSFEKNPIDFLEAKGYKEVKKDLIIKLPKYSLFELENGRKRMLASAGELQKGNELALPSKYVNFLYLASHYEKLKGSPEDNEQKQLFVEQHKHYLDEIIEQISEFSKRVILADANLDKVLSAYNKHRDKPIREQAENIIHLFTLTNLGAPAAFKYFDTTIDRKRYTSTKEVLDATLIHQSITGLYETRIDLSQLGGDGGGSSGGSEAAAKGGMDLLKPLTVERKGVKIKGYWNSQADITCVPKDLLQGEEPVRQQNVTTIHGTQEGDVYYVNLKIDGRRINTEVIGTTLDYAIITPGDVPWILKKPLELTIKLDLEEQQGTLLNNSILSKKGKEELKQLFEKYSALWQSWENQVGHRRIRPHKIATGTVKPTPQKQYHINPKAKPDIQIVINDLLKQGVLIQKESTMNTPVYPVPKPNGRWRMVLDYRAVNKVTPLIAVQNQHSYGILGSLFKGRYKTTIDLSNGFWAHPIVPEDYWITAFTWQGKQYCWTVLPQGFLNSPGLFTGDVVDLLQGIPNVEVYVDDVYISHDSEKEHLEYLDILFNRLKEAGYIISLKKSNIANSIVDFLGFQITNEGRGLTDTFKEKLENITAPTTLKQLQSILGLLNFARNFIPDFTELIAPLYALIPKSTKNYVPWQIEHSTTLETLITKLNGAEYLQGRKGDKTLIMKVNASYTTGYIRYYNEGEKKPISYVSIVFSKTELKFTELEKLLTTVHKGLLKALDLSMGQNIHVYSPIVSMQNIQKTPQTAKKALASRWLSWLSYLEDPRIRFFYDPQMPALKDLPAVDTGKDNKKHPSNFQHIFYTDGSAITSPTKEGHLNAGMGIVYFINKDGNLQKQQEWSISLGNHTAQFAEIAAFEFALKKCLPLGGNILVVTDSNYVAKAYNEELDVWASNGFVNNRKKPLKHISKWKSVADLKRLRPDVVVTHEPGHQKLDSSPHAYGNNLADQLATQASFKVHAGKRTADGSEFEKRTADGSEFESPKKKAKVE

SEQ ID NO: 731 - protein, 2171 aa, synthetic construct
MPAAKRVKLDGGDKKYSIGLDIGTNSVGWAVITDEYKVPSKKFKVLGNTDRHSIKKNLIGALLFDSGETAEATRLKRTARRRYTRRKNRICYLQEIFSNEMAKVDDSFFHRLEESFLVEEDKKHERHPIFGNIVDEVAYHEKYPTIYHLRKKLVDSTDKADLRLIYLALAHMIKFRGHFLIEGDLNPDNSDVDKLFIQLVQTYNQLFEENPINASGVDAKAILSARLSKSRRLENLIAQLPGEKKNGLFGNLIALSLGLTPNFKSNFDLAEDAKLQLSKDTYDDDLDNLLAQIGDQYADLFLAAKNLSDAILLSDILRVNTEITKAPLSASMIKRYDEHHQDLTLLKALVRQQLPEKYKEIFFDQSKNGYAGYIDGGASQEEFYKFIKPILEKMDGTEELLVKLNREDLLRKQRTFDNGSIPHQIHLGELHAILRRQEDFYPFLKDNREKIEKILTFRIPYYVGPLARGNSRFAWMTRKSEETITPWNFEEVVDKGASAQSFIERMTNFDKNLPNEKVLPKHSLLYEYFTVYNELTKVKYVTEGMRKPAFLSGEQKKAIVDLLFKTNRKVTVKQLKEDYFKKIECFDSVEISGVEDRFNASLGTYHDLLKIIKDKDFLDNEENEDILEDIVLTLTLFEDREMIEERLKTYAHLFDDKVMKQLKRRRYTGWGRLSRKLINGIRDKQSGKTILDFLKSDGFANRNFMQLIHDDSLTFKEDIQKAQVSGQGDSLHEHIANLAGSPAIKKGILQTVKVVDELVKVMGRHKPENIVIEMARENQTTQKGQKNSRERMKRIEEGIKELGSQILKEHPVENTQLQNEKLYLYYLQNGRDMYVDQELDINRLSDYDVDHIVPQSFLKDDSIDNKVLTRSDKARGKSDNVPSEEVVKKMKNYWRQLLNAKLITQRKFDNLTKAERGGLSELDKAGFIKRQLVETRQITKHVAQILDSRMNTKYDENDKLIREVKVITLKSKLVSDFRKDFQFYKVREINNYHHAHDAYLNAVVGTALIKKYPKLESEFVYGDYKVYDVRKMIAKSEQEIGKATAKYFFYSNIMNFFKTEITLANGEIRKRPLIETNGETGEIVWDKGRDFATVRKVLSMPQVNIVKKTEVQTGGFSKESILPKRNSDKLIARKKDWDPKKYGGFDSPTVAYSVLVVAKVEKGKSKKLKSVKELLGITIMERSSFEKNPIDFLEAKGYKEVKKDLIIKLPKYSLFELENGRKRMLASAGELQKGNELALPSKYVNFLYLASHYEKLKGSPEDNEQKQLFVEQHKHYLDEIIEQISEFSKRVILADANLDKVLSAYNKHRDKPIREQAENIIHLFTLTNLGAPAAFKYFDTTIDRKRYTSTKEVLDATLIHQSITGLYETRIDLSQLGGDGGGGSGGGPAPGGMDLLKPLTVERKGVKIKGYWNSQADITCVPKDLLQGEEPVRQQNVTTIHGTQEGDVYYVNLKIDGRRINTEVIGTTLDYAIITPGDVPWILKKPLELTIKLDLEEQQGTLLNNSILSKKGKEELKQLFEKYSALWQSWENQVGHRRIRPHKIATGTVKPTPQKQYHINPKAKPDIQIVINDLLKQGVLIQKESTMNTPVYPVPKPNGRWRMVLDYRAVNKVTPLIAVQNQHSYGILGSLFKGRYKTTIDLSNGFWAHPIVPEDYWITAFTWQGKQYCWTVLPQGFLNSPGLFTGDVVDLLQGIPNVEVYVDDVYISHDSEKEHLEYLDILFNRLKEAGYIISLKKSNIANSIVDFLGFQITNEGRGLTDTFKEKLENITAPTTLKQLQSILGLLNFARNFIPDFTELIAPLYALIPKSTKNYVPWQIEHSTTLETLITKLNGAEYLQGRKGDKTLIMKVNASYTTGYIRYYNEGEKKPISYVSIVFSKTELKFTELEKLLTTVHKGLLKALDLSMGQNIHVYSPIVSMQNIQKTPQTAKKALASRWLSWLSYLEDPRIRFFYDPQMPALKDLPAVDTGKDNKKHPSNFQHIFYTDGSAITSPTKEGHLNAGMGIVYFINKDGNLQKQQEWSISLGNHTAQFAEIAAFEFALKKCLPLGGNILVVTDSNYVAKAYNEELDVWASNGFVNNRKKPLKHISKWKSVADLKRLRPDVVVTHEPGHQKLDSSPHAYGNNLADQLATQASFKVHAGKRTADGSEFEKRTADGSEFESPKKKAKVE

SEQ ID NO: 732 - protein, 2173 aa, synthetic construct
MPAAKRVKLDGGDKKYSIGLDIGTNSVGWAVITDEYKVPSKKFKVLGNTDRHSIKKNLIGALLFDSGETAEATRLKRTARRRYTRRKNRICYLQEIFSNEMAKVDDSFFHRLEESFLVEEDKKHERHPIFGNIVDEVAYHEKYPTIYHLRKKLVDSTDKADLRLIYLALAHMIKFRGHFLIEGDLNPDNSDVDKLFIQLVQTYNQLFEENPINASGVDAKAILSARLSKSRRLENLIAQLPGEKKNGLFGNLIALSLGLTPNFKSNFDLAEDAKLQLSKDTYDDDLDNLLAQIGDQYADLFLAAKNLSDAILLSDILRVNTEITKAPLSASMIKRYDEHHQDLTLLKALVRQQLPEKYKEIFFDQSKNGYAGYIDGGASQEEFYKFIKPILEKMDGTEELLVKLNREDLLRKQRTFDNGSIPHQIHLGELHAILRRQEDFYPFLKDNREKIEKILTFRIPYYVGPLARGNSRFAWMTRKSEETITPWNFEEVVDKGASAQSFIERMTNFDKNLPNEKVLPKHSLLYEYFTVYNELTKVKYVTEGMRKPAFLSGEQKKAIVDLLFKTNRKVTVKQLKEDYFKKIECFDSVEISGVEDRFNASLGTYHDLLKIIKDKDFLDNEENEDILEDIVLTLTLFEDREMIEERLKTYAHLFDDKVMKQLKRRRYTGWGRLSRKLINGIRDKQSGKTILDFLKSDGFANRNFMQLIHDDSLTFKEDIQKAQVSGQGDSLHEHIANLAGSPAIKKGILQTVKVVDELVKVMGRHKPENIVIEMARENQTTQKGQKNSRERMKRIEEGIKELGSQILKEHPVENTQLQNEKLYLYYLQNGRDMYVDQELDINRLSDYDVDHIVPQSFLKDDSIDNKVLTRSDKARGKSDNVPSEEVVKKMKNYWRQLLNAKLITQRKFDNLTKAERGGLSELDKAGFIKRQLVETRQITKHVAQILDSRMNTKYDENDKLIREVKVITLKSKLVSDFRKDFQFYKVREINNYHHAHDAYLNAVVGTALIKKYPKLESEFVYGDYKVYDVRKMIAKSEQEIGKATAKYFFYSNIMNFFKTEITLANGEIRKRPLIETNGETGEIVWDKGRDFATVRKVLSMPQVNIVKKTEVQTGGFSKESILPKRNSDKLIARKKDWDPKKYGGFDSPTVAYSVLVVAKVEKGKSKKLKSVKELLGITIMERSSFEKNPIDFLEAKGYKEVKKDLIIKLPKYSLFELENGRKRMLASAGELQKGNELALPSKYVNFLYLASHYEKLKGSPEDNEQKQLFVEQHKHYLDEIIEQISEFSKRVILADANLDKVLSAYNKHRDKPIREQAENIIHLFTLTNLGAPAAFKYFDTTIDRKRYTSTKEVLDATLIHQSITGLYETRIDLSQLGGDGGGGGEAAAKPAPGGMDLLKPLTVERKGVKIKGYWNSQADITCVPKDLLQGEEPVRQQNVTTIHGTQEGDVYYVNLKIDGRRINTEVIGTTLDYAIITPGDVPWILKKPLELTIKLDLEEQQGTLLNNSILSKKGKEELKQLFEKYSALWQSWENQVGHRRIRPHKIATGTVKPTPQKQYHINPKAKPDIQIVINDLLKQGVLIQKESTMNTPVYPVPKPNGRWRMVLDYRAVNKVTPLIAVQNQHSYGILGSLFKGRYKTTIDLSNGFWAHPIVPEDYWITAFTWQGKQYCWTVLPQGFLNSPGLFTGDVVDLLQGIPNVEVYVDDVYISHDSEKEHLEYLDILFNRLKEAGYIISLKKSNIANSIVDFLGFQITNEGRGLTDTFKEKLENITAPTTLKQLQSILGLLNFARNFIPDFTELIAPLYALIPKSTKNYVPWQIEHSTTLETLITKLNGAEYLQGRKGDKTLIMKVNASYTTGYIRYYNEGEKKPISYVSIVFSKTELKFTELEKLLTTVHKGLLKALDLSMGQNIHVYSPIVSMQNIQKTPQTAKKALASRWLSWLSYLEDPRIRFFYDPQMPALKDLPAVDTGKDNKKHPSNFQHIFYTDGSAITSPTKEGHLNAGMGIVYFINKDGNLQKQQEWSISLGNHTAQFAEIAAFEFALKKCLPLGGNILVVTDSNYVAKAYNEELDVWASNGFVNNRKKPLKHISKWKSVADLKRLRPDVVVTHEPGHQKLDSSPHAYGNNLADQLATQASFKVHAGKRTADGSEFEKRTADGSEFESPKKKAKVE

SEQ ID NO: 733 - protein, 2167 aa, synthetic construct
MPAAKRVKLDGGDKKYSIGLDIGTNSVGWAVITDEYKVPSKKFKVLGNTDRHSIKKNLIGALLFDSGETAEATRLKRTARRRYTRRKNRICYLQEIFSNEMAKVDDSFFHRLEESFLVEEDKKHERHPIFGNIVDEVAYHEKYPTIYHLRKKLVDSTDKADLRLIYLALAHMIKFRGHFLIEGDLNPDNSDVDKLFIQLVQTYNQLFEENPINASGVDAKAILSARLSKSRRLENLIAQLPGEKKNGLFGNLIALSLGLTPNFKSNFDLAEDAKLQLSKDTYDDDLDNLLAQIGDQYADLFLAAKNLSDAILLSDILRVNTEITKAPLSASMIKRYDEHHQDLTLLKALVRQQLPEKYKEIFFDQSKNGYAGYIDGGASQEEFYKFIKPILEKMDGTEELLVKLNREDLLRKQRTFDNGSIPHQIHLGELHAILRRQEDFYPFLKDNREKIEKILTFRIPYYVGPLARGNSRFAWMTRKSEETITPWNFEEVVDKGASAQSFIERMTNFDKNLPNEKVLPKHSLLYEYFTVYNELTKVKYVTEGMRKPAFLSGEQKKAIVDLLFKTNRKVTVKQLKEDYFKKIECFDSVEISGVEDRFNASLGTYHDLLKIIKDKDFLDNEENEDILEDIVLTLTLFEDREMIEERLKTYAHLFDDKVMKQLKRRRYTGWGRLSRKLINGIRDKQSGKTILDFLKSDGFANRNFMQLIHDDSLTFKEDIQKAQVSGQGDSLHEHIANLAGSPAIKKGILQTVKVVDELVKVMGRHKPENIVIEMARENQTTQKGQKNSRERMKRIEEGIKELGSQILKEHPVENTQLQNEKLYLYYLQNGRDMYVDQELDINRLSDYDVDHIVPQSFLKDDSIDNKVLTRSDKARGKSDNVPSEEVVKKMKNYWRQLLNAKLITQRKFDNLTKAERGGLSELDKAGFIKRQLVETRQITKHVAQILDSRMNTKYDENDKLIREVKVITLKSKLVSDFRKDFQFYKVREINNYHHAHDAYLNAVVGTALIKKYPKLESEFVYGDYKVYDVRKMIAKSEQEIGKATAKYFFYSNIMNFFKTEITLANGEIRKRPLIETNGETGEIVWDKGRDFATVRKVLSMPQVNIVKKTEVQTGGFSKESILPKRNSDKLIARKKDWDPKKYGGFDSPTVAYSVLVVAKVEKGKSKKLKSVKELLGITIMERSSFEKNPIDFLEAKGYKEVKKDLIIKLPKYSLFELENGRKRMLASAGELQKGNELALPSKYVNFLYLASHYEKLKGSPEDNEQKQLFVEQHKHYLDEIIEQISEFSKRVILADANLDKVLSAYNKHRDKPIREQAENIIHLFTLTNLGAPAAFKYFDTTIDRKRYTSTKEVLDATLIHQSITGLYETRIDLSQLGGDGGGGGGGGGMDLLKPLTVERKGVKIKGYWNSQADITCVPKDLLQGEEPVRQQNVTTIHGTQEGDVYYVNLKIDGRRINTEVIGTTLDYAIITPGDVPWILKKPLELTIKLDLEEQQGTLLNNSILSKKGKEELKQLFEKYSALWQSWENQVGHRRIRPHKIATGTVKPTPQKQYHINPKAKPDIQIVINDLLKQGVLIQKESTMNTPVYPVPKPNGRWRMVLDYRAVNKVTPLIAVQNQHSYGILGSLFKGRYKTTIDLSNGFWAHPIVPEDYWITAFTWQGKQYCWTVLPQGFLNSPGLFTGDVVDLLQGIPNVEVYVDDVYISHDSEKEHLEYLDILFNRLKEAGYIISLKKSNIANSIVDFLGFQITNEGRGLTDTFKEKLENITAPTTLKQLQSILGLLNFARNFIPDFTELIAPLYALIPKSTKNYVPWQIEHSTTLETLITKLNGAEYLQGRKGDKTLIMKVNASYTTGYIRYYNEGEKKPISYVSIVFSKTELKFTELEKLLTTVHKGLLKALDLSMGQNIHVYSPIVSMQNIQKTPQTAKKALASRWLSWLSYLEDPRIRFFYDPQMPALKDLPAVDTGKDNKKHPSNFQHIFYTDGSAITSPTKEGHLNAGMGIVYFINKDGNLQKQQEWSISLGNHTAQFAEIAAFEFALKKCLPLGGNILVVTDSNYVAKAYNEELDVWASNGFVNNRKKPLKHISKWKSVADLKRLRPDVVVTHEPGHQKLDSSPHAYGNNLADQLATQASFKVHAGKRTADGSEFEKRTADGSEFESPKKKAKVE

SEQ ID NO: 734 - protein, 2165 aa, synthetic construct
MPAAKRVKLDGGDKKYSIGLDIGTNSVGWAVITDEYKVPSKKFKVLGNTDRHSIKKNLIGALLFDSGETAEATRLKRTARRRYTRRKNRICYLQEIFSNEMAKVDDSFFHRLEESFLVEEDKKHERHPIFGNIVDEVAYHEKYPTIYHLRKKLVDSTDKADLRLIYLALAHMIKFRGHFLIEGDLNPDNSDVDKLFIQLVQTYNQLFEENPINASGVDAKAILSARLSKSRRLENLIAQLPGEKKNGLFGNLIALSLGLTPNFKSNFDLAEDAKLQLSKDTYDDDLDNLLAQIGDQYADLFLAAKNLSDAILLSDILRVNTEITKAPLSASMIKRYDEHHQDLTLLKALVRQQLPEKYKEIFFDQSKNGYAGYIDGGASQEEFYKFIKPILEKMDGTEELLVKLNREDLLRKQRTFDNGSIPHQIHLGELHAILRRQEDFYPFLKDNREKIEKILTFRIPYYVGPLARGNSRFAWMTRKSEETITPWNFEEVVDKGASAQSFIERMTNFDKNLPNEKVLPKHSLLYEYFTVYNELTKVKYVTEGMRKPAFLSGEQKKAIVDLLFKTNRKVTVKQLKEDYFKKIECFDSVEISGVEDRFNASLGTYHDLLKIIKDKDFLDNEENEDILEDIVLTLTLFEDREMIEERLKTYAHLFDDKVMKQLKRRRYTGWGRLSRKLINGIRDKQSGKTILDFLKSDGFANRNFMQLIHDDSLTFKEDIQKAQVSGQGDSLHEHIANLAGSPAIKKGILQTVKVVDELVKVMGRHKPENIVIEMARENQTTQKGQKNSRERMKRIEEGIKELGSQILKEHPVENTQLQNEKLYLYYLQNGRDMYVDQELDINRLSDYDVDHIVPQSFLKDDSIDNKVLTRSDKARGKSDNVPSEEVVKKMKNYWRQLLNAKLITQRKFDNLTKAERGGLSELDKAGFIKRQLVETRQITKHVAQILDSRMNTKYDENDKLIREVKVITLKSKLVSDFRKDFQFYKVREINNYHHAHDAYLNAVVGTALIKKYPKLESEFVYGDYKVYDVRKMIAKSEQEIGKATAKYFFYSNIMNFFKTEITLANGEIRKRPLIETNGETGEIVWDKGRDFATVRKVLSMPQVNIVKKTEVQTGGFSKESILPKRNSDKLIARKKDWDPKKYGGFDSPTVAYSVLVVAKVEKGKSKKLKSVKELLGITIMERSSFEKNPIDFLEAKGYKEVKKDLIIKLPKYSLFELENGRKRMLASAGELQKGNELALPSKYVNFLYLASHYEKLKGSPEDNEQKQLFVEQHKHYLDEIIEQISEFSKRVILADANLDKVLSAYNKHRDKPIREQAENIIHLFTLTNLGAPAAFKYFDTTIDRKRYTSTKEVLDATLIHQSITGLYETRIDLSQLGGDGGGGGGGMDLLKPLTVERKGVKIKGYWNSQADITCVPKDLLQGEEPVRQQNVTTIHGTQEGDVYYVNLKIDGRRINTEVIGTTLDYAIITPGDVPWILKKPLELTIKLDLEEQQGTLLNNSILSKKGKEELKQLFEKYSALWQSWENQVGHRRIRPHKIATGTVKPTPQKQYHINPKAKPDIQIVINDLLKQGVLIQKESTMNTPVYPVPKPNGRWRMVLDYRAVNKVTPLIAVQNQHSYGILGSLFKGRYKTTIDLSNGFWAHPIVPEDYWITAFTWQGKQYCWTVLPQGFLNSPGLFTGDVVDLLQGIPNVEVYVDDVYISHDSEKEHLEYLDILFNRLKEAGYIISLKKSNIANSIVDFLGFQITNEGRGLTDTFKEKLENITAPTTLKQLQSILGLLNFARNFIPDFTELIAPLYALIPKSTKNYVPWQIEHSTTLETLITKLNGAEYLQGRKGDKTLIMKVNASYTTGYIRYYNEGEKKPISYVSIVFSKTELKFTELEKLLTTVHKGLLKALDLSMGQNIHVYSPIVSMQNIQKTPQTAKKALASRWLSWLSYLEDPRIRFFYDPQMPALKDLPAVDTGKDNKKHPSNFQHIFYTDGSAITSPTKEGHLNAGMGIVYFINKDGNLQKQQEWSISLGNHTAQFAEIAAFEFALKKCLPLGGNILVVTDSNYVAKAYNEELDVWASNGFVNNRKKPLKHISKWKSVADLKRLRPDVVVTHEPGHQKLDSSPHAYGNNLADQLATQASFKVHAGKRTADGSEFEKRTADGSEFESPKKKAKVE

SEQ ID NO: 735 - protein, 2167 aa, synthetic construct
MPAAKRVKLDGGDKKYSIGLDIGTNSVGWAVITDEYKVPSKKFKVLGNTDRHSIKKNLIGALLFDSGETAEATRLKRTARRRYTRRKNRICYLQEIFSNEMAKVDDSFFHRLEESFLVEEDKKHERHPIFGNIVDEVAYHEKYPTIYHLRKKLVDSTDKADLRLIYLALAHMIKFRGHFLIEGDLNPDNSDVDKLFIQLVQTYNQLFEENPINASGVDAKAILSARLSKSRRLENLIAQLPGEKKNGLFGNLIALSLGLTPNFKSNFDLAEDAKLQLSKDTYDDDLDNLLAQIGDQYADLFLAAKNLSDAILLSDILRVNTEITKAPLSASMIKRYDEHHQDLTLLKALVRQQLPEKYKEIFFDQSKNGYAGYIDGGASQEEFYKFIKPILEKMDGTEELLVKLNREDLLRKQRTFDNGSIPHQIHLGELHAILRRQEDFYPFLKDNREKIEKILTFRIPYYVGPLARGNSRFAWMTRKSEETITPWNFEEVVDKGASAQSFIERMTNFDKNLPNEKVLPKHSLLYEYFTVYNELTKVKYVTEGMRKPAFLSGEQKKAIVDLLFKTNRKVTVKQLKEDYFKKIECFDSVEISGVEDRFNASLGTYHDLLKIIKDKDFLDNEENEDILEDIVLTLTLFEDREMIEERLKTYAHLFDDKVMKQLKRRRYTGWGRLSRKLINGIRDKQSGKTILDFLKSDGFANRNFMQLIHDDSLTFKEDIQKAQVSGQGDSLHEHIANLAGSPAIKKGILQTVKVVDELVKVMGRHKPENIVIEMARENQTTQKGQKNSRERMKRIEEGIKELGSQILKEHPVENTQLQNEKLYLYYLQNGRDMYVDQELDINRLSDYDVDHIVPQSFLKDDSIDNKVLTRSDKARGKSDNVPSEEVVKKMKNYWRQLLNAKLITQRKFDNLTKAERGGLSELDKAGFIKRQLVETRQITKHVAQILDSRMNTKYDENDKLIREVKVITLKSKLVSDFRKDFQFYKVREINNYHHAHDAYLNAVVGTALIKKYPKLESEFVYGDYKVYDVRKMIAKSEQEIGKATAKYFFYSNIMNFFKTEITLANGEIRKRPLIETNGETGEIVWDKGRDFATVRKVLSMPQVNIVKKTEVQTGGFSKESILPKRNSDKLIARKKDWDPKKYGGFDSPTVAYSVLVVAKVEKGKSKKLKSVKELLGITIMERSSFEKNPIDFLEAKGYKEVKKDLIIKLPKYSLFELENGRKRMLASAGELQKGNELALPSKYVNFLYLASHYEKLKGSPEDNEQKQLFVEQHKHYLDEIIEQISEFSKRVILADANLDKVLSAYNKHRDKPIREQAENIIHLFTLTNLGAPAAFKYFDTTIDRKRYTSTKEVLDATLIHQSITGLYETRIDLSQLGGDGGPAPAPGGMDLLKPLTVERKGVKIKGYWNSQADITCVPKDLLQGEEPVRQQNVTTIHGTQEGDVYYVNLKIDGRRINTEVIGTTLDYAIITPGDVPWILKKPLELTIKLDLEEQQGTLLNNSILSKKGKEELKQLFEKYSALWQSWENQVGHRRIRPHKIATGTVKPTPQKQYHINPKAKPDIQIVINDLLKQGVLIQKESTMNTPVYPVPKPNGRWRMVLDYRAVNKVTPLIAVQNQHSYGILGSLFKGRYKTTIDLSNGFWAHPIVPEDYWITAFTWQGKQYCWTVLPQGFLNSPGLFTGDVVDLLQGIPNVEVYVDDVYISHDSEKEHLEYLDILFNRLKEAGYIISLKKSNIANSIVDFLGFQITNEGRGLTDTFKEKLENITAPTTLKQLQSILGLLNFARNFIPDFTELIAPLYALIPKSTKNYVPWQIEHSTTLETLITKLNGAEYLQGRKGDKTLIMKVNASYTTGYIRYYNEGEKKPISYVSIVFSKTELKFTELEKLLTTVHKGLLKALDLSMGQNIHVYSPIVSMQNIQKTPQTAKKALASRWLSWLSYLEDPRIRFFYDPQMPALKDLPAVDTGKDNKKHPSNFQHIFYTDGSAITSPTKEGHLNAGMGIVYFINKDGNLQKQQEWSISLGNHTAQFAEIAAFEFALKKCLPLGGNILVVTDSNYVAKAYNEELDVWASNGFVNNRKKPLKHISKWKSVADLKRLRPDVVVTHEPGHQKLDSSPHAYGNNLADQLATQASFKVHAGKRTADGSEFEKRTADGSEFESPKKKAKVE

SEQ ID NO: 736 - protein, 2171 aa, synthetic construct
MPAAKRVKLDGGDKKYSIGLDIGTNSVGWAVITDEYKVPSKKFKVLGNTDRHSIKKNLIGALLFDSGETAEATRLKRTARRRYTRRKNRICYLQEIFSNEMAKVDDSFFHRLEESFLVEEDKKHERHPIFGNIVDEVAYHEKYPTIYHLRKKLVDSTDKADLRLIYLALAHMIKFRGHFLIEGDLNPDNSDVDKLFIQLVQTYNQLFEENPINASGVDAKAILSARLSKSRRLENLIAQLPGEKKNGLFGNLIALSLGLTPNFKSNFDLAEDAKLQLSKDTYDDDLDNLLAQIGDQYADLFLAAKNLSDAILLSDILRVNTEITKAPLSASMIKRYDEHHQDLTLLKALVRQQLPEKYKEIFFDQSKNGYAGYIDGGASQEEFYKFIKPILEKMDGTEELLVKLNREDLLRKQRTFDNGSIPHQIHLGELHAILRRQEDFYPFLKDNREKIEKILTFRIPYYVGPLARGNSRFAWMTRKSEETITPWNFEEVVDKGASAQSFIERMTNFDKNLPNEKVLPKHSLLYEYFTVYNELTKVKYVTEGMRKPAFLSGEQKKAIVDLLFKTNRKVTVKQLKEDYFKKIECFDSVEISGVEDRFNASLGTYHDLLKIIKDKDFLDNEENEDILEDIVLTLTLFEDREMIEERLKTYAHLFDDKVMKQLKRRRYTGWGRLSRKLINGIRDKQSGKTILDFLKSDGFANRNFMQLIHDDSLTFKEDIQKAQVSGQGDSLHEHIANLAGSPAIKKGILQTVKVVDELVKVMGRHKPENIVIEMARENQTTQKGQKNSRERMKRIEEGIKELGSQILKEHPVENTQLQNEKLYLYYLQNGRDMYVDQELDINRLSDYDVDHIVPQSFLKDDSIDNKVLTRSDKARGKSDNVPSEEVVKKMKNYWRQLLNAKLITQRKFDNLTKAERGGLSELDKAGFIKRQLVETRQITKHVAQILDSRMNTKYDENDKLIREVKVITLKSKLVSDFRKDFQFYKVREINNYHHAHDAYLNAVVGTALIKKYPKLESEFVYGDYKVYDVRKMIAKSEQEIGKATAKYFFYSNIMNFFKTEITLANGEIRKRPLIETNGETGEIVWDKGRDFATVRKVLSMPQVNIVKKTEVQTGGFSKESILPKRNSDKLIARKKDWDPKKYGGFDSPTVAYSVLVVAKVEKGKSKKLKSVKELLGITIMERSSFEKNPIDFLEAKGYKEVKKDLIIKLPKYSLFELENGRKRMLASAGELQKGNELALPSKYVNFLYLASHYEKLKGSPEDNEQKQLFVEQHKHYLDEIIEQISEFSKRVILADANLDKVLSAYNKHRDKPIREQAENIIHLFTLTNLGAPAAFKYFDTTIDRKRYTSTKEVLDATLIHQSITGLYETRIDLSQLGGDGGGSSGGGGGSGGMDLLKPLTVERKGVKIKGYWNSQADITCVPKDLLQGEEPVRQQNVTTIHGTQEGDVYYVNLKIDGRRINTEVIGTTLDYAIITPGDVPWILKKPLELTIKLDLEEQQGTLLNNSILSKKGKEELKQLFEKYSALWQSWENQVGHRRIRPHKIATGTVKPTPQKQYHINPKAKPDIQIVINDLLKQGVLIQKESTMNTPVYPVPKPNGRWRMVLDYRAVNKVTPLIAVQNQHSYGILGSLFKGRYKTTIDLSNGFWAHPIVPEDYWITAFTWQGKQYCWTVLPQGFLNSPGLFTGDVVDLLQGIPNVEVYVDDVYISHDSEKEHLEYLDILFNRLKEAGYIISLKKSNIANSIVDFLGFQITNEGRGLTDTFKEKLENITAPTTLKQLQSILGLLNFARNFIPDFTELIAPLYALIPKSTKNYVPWQIEHSTTLETLITKLNGAEYLQGRKGDKTLIMKVNASYTTGYIRYYNEGEKKPISYVSIVFSKTELKFTELEKLLTTVHKGLLKALDLSMGQNIHVYSPIVSMQNIQKTPQTAKKALASRWLSWLSYLEDPRIRFFYDPQMPALKDLPAVDTGKDNKKHPSNFQHIFYTDGSAITSPTKEGHLNAGMGIVYFINKDGNLQKQQEWSISLGNHTAQFAEIAAFEFALKKCLPLGGNILVVTDSNYVAKAYNEELDVWASNGFVNNRKKPLKHISKWKSVADLKRLRPDVVVTHEPGHQKLDSSPHAYGNNLADQLATQASFKVHAGKRTADGSEFEKRTADGSEFESPKKKAKVE

SEQ ID NO: 737 - protein, 2171 aa, synthetic construct
MPAAKRVKLDGGDKKYSIGLDIGTNSVGWAVITDEYKVPSKKFKVLGNTDRHSIKKNLIGALLFDSGETAEATRLKRTARRRYTRRKNRICYLQEIFSNEMAKVDDSFFHRLEESFLVEEDKKHERHPIFGNIVDEVAYHEKYPTIYHLRKKLVDSTDKADLRLIYLALAHMIKFRGHFLIEGDLNPDNSDVDKLFIQLVQTYNQLFEENPINASGVDAKAILSARLSKSRRLENLIAQLPGEKKNGLFGNLIALSLGLTPNFKSNFDLAEDAKLQLSKDTYDDDLDNLLAQIGDQYADLFLAAKNLSDAILLSDILRVNTEITKAPLSASMIKRYDEHHQDLTLLKALVRQQLPEKYKEIFFDQSKNGYAGYIDGGASQEEFYKFIKPILEKMDGTEELLVKLNREDLLRKQRTFDNGSIPHQIHLGELHAILRRQEDFYPFLKDNREKIEKILTFRIPYYVGPLARGNSRFAWMTRKSEETITPWNFEEVVDKGASAQSFIERMTNFDKNLPNEKVLPKHSLLYEYFTVYNELTKVKYVTEGMRKPAFLSGEQKKAIVDLLFKTNRKVTVKQLKEDYFKKIECFDSVEISGVEDRFNASLGTYHDLLKIIKDKDFLDNEENEDILEDIVLTLTLFEDREMIEERLKTYAHLFDDKVMKQLKRRRYTGWGRLSRKLINGIRDKQSGKTILDFLKSDGFANRNFMQLIHDDSLTFKEDIQKAQVSGQGDSLHEHIANLAGSPAIKKGILQTVKVVDELVKVMGRHKPENIVIEMARENQTTQKGQKNSRERMKRIEEGIKELGSQILKEHPVENTQLQNEKLYLYYLQNGRDMYVDQELDINRLSDYDVDHIVPQSFLKDDSIDNKVLTRSDKARGKSDNVPSEEVVKKMKNYWRQLLNAKLITQRKFDNLTKAERGGLSELDKAGFIKRQLVETRQITKHVAQILDSRMNTKYDENDKLIREVKVITLKSKLVSDFRKDFQFYKVREINNYHHAHDAYLNAVVGTALIKKYPKLESEFVYGDYKVYDVRKMIAKSEQEIGKATAKYFFYSNIMNFFKTEITLANGEIRKRPLIETNGETGEIVWDKGRDFATVRKVLSMPQVNIVKKTEVQTGGFSKESILPKRNSDKLIARKKDWDPKKYGGFDSPTVAYSVLVVAKVEKGKSKKLKSVKELLGITIMERSSFEKNPIDFLEAKGYKEVKKDLIIKLPKYSLFELENGRKRMLASAGELQKGNELALPSKYVNFLYLASHYEKLKGSPEDNEQKQLFVEQHKHYLDEIIEQISEFSKRVILADANLDKVLSAYNKHRDKPIREQAENIIHLFTLTNLGAPAAFKYFDTTIDRKRYTSTKEVLDATLIHQSITGLYETRIDLSQLGGDGGPAPGGSGSSGGMDLLKPLTVERKGVKIKGYWNSQADITCVPKDLLQGEEPVRQQNVTTIHGTQEGDVYYVNLKIDGRRINTEVIGTTLDYAIITPGDVPWILKKPLELTIKLDLEEQQGTLLNNSILSKKGKEELKQLFEKYSALWQSWENQVGHRRIRPHKIATGTVKPTPQKQYHINPKAKPDIQIVINDLLKQGVLIQKESTMNTPVYPVPKPNGRWRMVLDYRAVNKVTPLIAVQNQHSYGILGSLFKGRYKTTIDLSNGFWAHPIVPEDYWITAFTWQGKQYCWTVLPQGFLNSPGLFTGDVVDLLQGIPNVEVYVDDVYISHDSEKEHLEYLDILFNRLKEAGYIISLKKSNIANSIVDFLGFQITNEGRGLTDTFKEKLENITAPTTLKQLQSILGLLNFARNFIPDFTELIAPLYALIPKSTKNYVPWQIEHSTTLETLITKLNGAEYLQGRKGDKTLIMKVNASYTTGYIRYYNEGEKKPISYVSIVFSKTELKFTELEKLLTTVHKGLLKALDLSMGQNIHVYSPIVSMQNIQKTPQTAKKALASRWLSWLSYLEDPRIRFFYDPQMPALKDLPAVDTGKDNKKHPSNFQHIFYTDGSAITSPTKEGHLNAGMGIVYFINKDGNLQKQQEWSISLGNHTAQFAEIAAFEFALKKCLPLGGNILVVTDSNYVAKAYNEELDVWASNGFVNNRKKPLKHISKWKSVADLKRLRPDVVVTHEPGHQKLDSSPHAYGNNLADQLATQASFKVHAGKRTADGSEFEKRTADGSEFESPKKKAKVE

SEQ ID NO: 738 - protein, 2185 aa, synthetic construct
MPAAKRVKLDGGDKKYSIGLDIGTNSVGWAVITDEYKVPSKKFKVLGNTDRHSIKKNLIGALLFDSGETAEATRLKRTARRRYTRRKNRICYLQEIFSNEMAKVDDSFFHRLEESFLVEEDKKHERHPIFGNIVDEVAYHEKYPTIYHLRKKLVDSTDKADLRLIYLALAHMIKFRGHFLIEGDLNPDNSDVDKLFIQLVQTYNQLFEENPINASGVDAKAILSARLSKSRRLENLIAQLPGEKKNGLFGNLIALSLGLTPNFKSNFDLAEDAKLQLSKDTYDDDLDNLLAQIGDQYADLFLAAKNLSDAILLSDILRVNTEITKAPLSASMIKRYDEHHQDLTLLKALVRQQLPEKYKEIFFDQSKNGYAGYIDGGASQEEFYKFIKPILEKMDGTEELLVKLNREDLLRKQRTFDNGSIPHQIHLGELHAILRRQEDFYPFLKDNREKIEKILTFRIPYYVGPLARGNSRFAWMTRKSEETITPWNFEEVVDKGASAQSFIERMTNFDKNLPNEKVLPKHSLLYEYFTVYNELTKVKYVTEGMRKPAFLSGEQKKAIVDLLFKTNRKVTVKQLKEDYFKKIECFDSVEISGVEDRFNASLGTYHDLLKIIKDKDFLDNEENEDILEDIVLTLTLFEDREMIEERLKTYAHLFDDKVMKQLKRRRYTGWGRLSRKLINGIRDKQSGKTILDFLKSDGFANRNFMQLIHDDSLTFKEDIQKAQVSGQGDSLHEHIANLAGSPAIKKGILQTVKVVDELVKVMGRHKPENIVIEMARENQTTQKGQKNSRERMKRIEEGIKELGSQILKEHPVENTQLQNEKLYLYYLQNGRDMYVDQELDINRLSDYDVDHIVPQSFLKDDSIDNKVLTRSDKARGKSDNVPSEEVVKKMKNYWRQLLNAKLITQRKFDNLTKAERGGLSELDKAGFIKRQLVETRQITKHVAQILDSRMNTKYDENDKLIREVKVITLKSKLVSDFRKDFQFYKVREINNYHHAHDAYLNAVVGTALIKKYPKLESEFVYGDYKVYDVRKMIAKSEQEIGKATAKYFFYSNIMNFFKTEITLANGEIRKRPLIETNGETGEIVWDKGRDFATVRKVLSMPQVNIVKKTEVQTGGFSKESILPKRNSDKLIARKKDWDPKKYGGFDSPTVAYSVLVVAKVEKGKSKKLKSVKELLGITIMERSSFEKNPIDFLEAKGYKEVKKDLIIKLPKYSLFELENGRKRMLASAGELQKGNELALPSKYVNFLYLASHYEKLKGSPEDNEQKQLFVEQHKHYLDEIIEQISEFSKRVILADANLDKVLSAYNKHRDKPIREQAENIIHLFTLTNLGAPAAFKYFDTTIDRKRYTSTKEVLDATLIHQSITGLYETRIDLSQLGGDGGGGGGSGGGGSGGGGSGGGGSGGMNPLQLLQPLPAEVKGTKLLAHWNSGATITCIPESFLEDEQPIKQTLIKTIHGEKQQNVYYLTFKVKGRKVEAEVIASPYEYILLSPTDVPWLTQQPLQLTILVPLQEYQDRILNKTALPEEQKQQLKALFTKYDNLWQHWENQVGHRKIRPHNIATGDYPPRPQKQYPINPKAKPSIQIVIDDLLKQGVLTPQNSTMNTPVYPVPKPDGRWRMVLDYREVNKTIPLTAAQNQHSAGILATIVRQKYKTTLDLANGFWAHPITPDSYWLTAFTWQGKQYCWTRLPQGFLNSPALFNADAVDLLKEVPNVQVYVDDIYLSHDNPHEHIQQLEKVFQILLQAGYVVSLKKSEIGQRTVEFLGFNITKEGRGLTDTFKTKLLNVTPPKDLKQLQSILGKLNFARNFIPNFAELVQTLYNLIASSPGKYIEWTEDNTKQLNKVIEALNTASNLEERLPDQRLVIKVNTSPSAGYVRYYNESGKKPIMYLNYVFSKAELKFSMLEKLLTTMHKALIKAMDLAMGQEILVYSPIVSMTKIQKTPLPERKALPIRWITWMTYLEDPRIQFHYDKTLPELKHIPDVYTSSIPPLKHPSQYEGVFCTDGSAIKSPDPTKSNNAGMGIVHAIYNPEYKILNQWSIPLGHHTAQMAEIAAVEFACKKALKVPGPVLVITDSFYVAESANKELPYWKSNGFVNNKKEPLKHISKWKSIAECLSIKPDITIQHEKGHQPINTSIHTEGNALADKLATQGSYVVNAGKRTADGSEFEKRTADGSEFESPKKKAKVE

SEQ ID NO: 739 - protein, 2175 aa, synthetic construct
MPAAKRVKLDGGDKKYSIGLDIGTNSVGWAVITDEYKVPSKKFKVLGNTDRHSIKKNLIGALLFDSGETAEATRLKRTARRRYTRRKNRICYLQEIFSNEMAKVDDSFFHRLEESFLVEEDKKHERHPIFGNIVDEVAYHEKYPTIYHLRKKLVDSTDKADLRLIYLALAHMIKFRGHFLIEGDLNPDNSDVDKLFIQLVQTYNQLFEENPINASGVDAKAILSARLSKSRRLENLIAQLPGEKKNGLFGNLIALSLGLTPNFKSNFDLAEDAKLQLSKDTYDDDLDNLLAQIGDQYADLFLAAKNLSDAILLSDILRVNTEITKAPLSASMIKRYDEHHQDLTLLKALVRQQLPEKYKEIFFDQSKNGYAGYIDGGASQEEFYKFIKPILEKMDGTEELLVKLNREDLLRKQRTFDNGSIPHQIHLGELHAILRRQEDFYPFLKDNREKIEKILTFRIPYYVGPLARGNSRFAWMTRKSEETITPWNFEEVVDKGASAQSFIERMTNFDKNLPNEKVLPKHSLLYEYFTVYNELTKVKYVTEGMRKPAFLSGEQKKAIVDLLFKTNRKVTVKQLKEDYFKKIECFDSVEISGVEDRFNASLGTYHDLLKIIKDKDFLDNEENEDILEDIVLTLTLFEDREMIEERLKTYAHLFDDKVMKQLKRRRYTGWGRLSRKLINGIRDKQSGKTILDFLKSDGFANRNFMQLIHDDSLTFKEDIQKAQVSGQGDSLHEHIANLAGSPAIKKGILQTVKVVDELVKVMGRHKPENIVIEMARENQTTQKGQKNSRERMKRIEEGIKELGSQILKEHPVENTQLQNEKLYLYYLQNGRDMYVDQELDINRLSDYDVDHIVPQSFLKDDSIDNKVLTRSDKARGKSDNVPSEEVVKKMKNYWRQLLNAKLITQRKFDNLTKAERGGLSELDKAGFIKRQLVETRQITKHVAQILDSRMNTKYDENDKLIREVKVITLKSKLVSDFRKDFQFYKVREINNYHHAHDAYLNAVVGTALIKKYPKLESEFVYGDYKVYDVRKMIAKSEQEIGKATAKYFFYSNIMNFFKTEITLANGEIRKRPLIETNGETGEIVWDKGRDFATVRKVLSMPQVNIVKKTEVQTGGFSKESILPKRNSDKLIARKKDWDPKKYGGFDSPTVAYSVLVVAKVEKGKSKKLKSVKELLGITIMERSSFEKNPIDFLEAKGYKEVKKDLIIKLPKYSLFELENGRKRMLASAGELQKGNELALPSKYVNFLYLASHYEKLKGSPEDNEQKQLFVEQHKHYLDEIIEQISEFSKRVILADANLDKVLSAYNKHRDKPIREQAENIIHLFTLTNLGAPAAFKYFDTTIDRKRYTSTKEVLDATLIHQSITGLYETRIDLSQLGGDGGGGGGSGGGGSGGMNPLQLLQPLPAEVKGTKLLAHWNSGATITCIPESFLEDEQPIKQTLIKTIHGEKQQNVYYLTFKVKGRKVEAEVIASPYEYILLSPTDVPWLTQQPLQLTILVPLQEYQDRILNKTALPEEQKQQLKALFTKYDNLWQHWENQVGHRKIRPHNIATGDYPPRPQKQYPINPKAKPSIQIVIDDLLKQGVLTPQNSTMNTPVYPVPKPDGRWRMVLDYREVNKTIPLTAAQNQHSAGILATIVRQKYKTTLDLANGFWAHPITPDSYWLTAFTWQGKQYCWTRLPQGFLNSPALFNADAVDLLKEVPNVQVYVDDIYLSHDNPHEHIQQLEKVFQILLQAGYVVSLKKSEIGQRTVEFLGFNITKEGRGLTDTFKTKLLNVTPPKDLKQLQSILGKLNFARNFIPNFAELVQTLYNLIASSPGKYIEWTEDNTKQLNKVIEALNTASNLEERLPDQRLVIKVNTSPSAGYVRYYNESGKKPIMYLNYVFSKAELKFSMLEKLLTTMHKALIKAMDLAMGQEILVYSPIVSMTKIQKTPLPERKALPIRWITWMTYLEDPRIQFHYDKTLPELKHIPDVYTSSIPPLKHPSQYEGVFCTDGSAIKSPDPTKSNNAGMGIVHAIYNPEYKILNQWSIPLGHHTAQMAEIAAVEFACKKALKVPGPVLVITDSFYVAESANKELPYWKSNGFVNNKKEPLKHISKWKSIAECLSIKPDITIQHEKGHQPINTSIHTEGNALADKLATQGSYVVNAGKRTADGSEFEKRTADGSEFESPKKKAKVE

SEQ ID NO: 740 - protein, 2176 aa, synthetic construct
MPAAKRVKLDGGDKKYSIGLDIGTNSVGWAVITDEYKVPSKKFKVLGNTDRHSIKKNLIGALLFDSGETAEATRLKRTARRRYTRRKNRICYLQEIFSNEMAKVDDSFFHRLEESFLVEEDKKHERHPIFGNIVDEVAYHEKYPTIYHLRKKLVDSTDKADLRLIYLALAHMIKFRGHFLIEGDLNPDNSDVDKLFIQLVQTYNQLFEENPINASGVDAKAILSARLSKSRRLENLIAQLPGEKKNGLFGNLIALSLGLTPNFKSNFDLAEDAKLQLSKDTYDDDLDNLLAQIGDQYADLFLAAKNLSDAILLSDILRVNTEITKAPLSASMIKRYDEHHQDLTLLKALVRQQLPEKYKEIFFDQSKNGYAGYIDGGASQEEFYKFIKPILEKMDGTEELLVKLNREDLLRKQRTFDNGSIPHQIHLGELHAILRRQEDFYPFLKDNREKIEKILTFRIPYYVGPLARGNSRFAWMTRKSEETITPWNFEEVVDKGASAQSFIERMTNFDKNLPNEKVLPKHSLLYEYFTVYNELTKVKYVTEGMRKPAFLSGEQKKAIVDLLFKTNRKVTVKQLKEDYFKKIECFDSVEISGVEDRFNASLGTYHDLLKIIKDKDFLDNEENEDILEDIVLTLTLFEDREMIEERLKTYAHLFDDKVMKQLKRRRYTGWGRLSRKLINGIRDKQSGKTILDFLKSDGFANRNFMQLIHDDSLTFKEDIQKAQVSGQGDSLHEHIANLAGSPAIKKGILQTVKVVDELVKVMGRHKPENIVIEMARENQTTQKGQKNSRERMKRIEEGIKELGSQILKEHPVENTQLQNEKLYLYYLQNGRDMYVDQELDINRLSDYDVDHIVPQSFLKDDSIDNKVLTRSDKARGKSDNVPSEEVVKKMKNYWRQLLNAKLITQRKFDNLTKAERGGLSELDKAGFIKRQLVETRQITKHVAQILDSRMNTKYDENDKLIREVKVITLKSKLVSDFRKDFQFYKVREINNYHHAHDAYLNAVVGTALIKKYPKLESEFVYGDYKVYDVRKMIAKSEQEIGKATAKYFFYSNIMNFFKTEITLANGEIRKRPLIETNGETGEIVWDKGRDFATVRKVLSMPQVNIVKKTEVQTGGFSKESILPKRNSDKLIARKKDWDPKKYGGFDSPTVAYSVLVVAKVEKGKSKKLKSVKELLGITIMERSSFEKNPIDFLEAKGYKEVKKDLIIKLPKYSLFELENGRKRMLASAGELQKGNELALPSKYVNFLYLASHYEKLKGSPEDNEQKQLFVEQHKHYLDEIIEQISEFSKRVILADANLDKVLSAYNKHRDKPIREQAENIIHLFTLTNLGAPAAFKYFDTTIDRKRYTSTKEVLDATLIHQSITGLYETRIDLSQLGGDGGGGGEAAAKGGSGGMNPLQLLQPLPAEVKGTKLLAHWNSGATITCIPESFLEDEQPIKQTLIKTIHGEKQQNVYYLTFKVKGRKVEAEVIASPYEYILLSPTDVPWLTQQPLQLTILVPLQEYQDRILNKTALPEEQKQQLKALFTKYDNLWQHWENQVGHRKIRPHNIATGDYPPRPQKQYPINPKAKPSIQIVIDDLLKQGVLTPQNSTMNTPVYPVPKPDGRWRMVLDYREVNKTIPLTAAQNQHSAGILATIVRQKYKTTLDLANGFWAHPITPDSYWLTAFTWQGKQYCWTRLPQGFLNSPALFNADAVDLLKEVPNVQVYVDDIYLSHDNPHEHIQQLEKVFQILLQAGYVVSLKKSEIGQRTVEFLGFNITKEGRGLTDTFKTKLLNVTPPKDLKQLQSILGKLNFARNFIPNFAELVQTLYNLIASSPGKYIEWTEDNTKQLNKVIEALNTASNLEERLPDQRLVIKVNTSPSAGYVRYYNESGKKPIMYLNYVFSKAELKFSMLEKLLTTMHKALIKAMDLAMGQEILVYSPIVSMTKIQKTPLPERKALPIRWITWMTYLEDPRIQFHYDKTLPELKHIPDVYTSSIPPLKHPSQYEGVFCTDGSAIKSPDPTKSNNAGMGIVHAIYNPEYKILNQWSIPLGHHTAQMAEIAAVEFACKKALKVPGPVLVITDSFYVAESANKELPYWKSNGFVNNKKEPLKHISKWKSIAECLSIKPDITIQHEKGHQPINTSIHTEGNALADKLATQGSYVVNAGKRTADGSEFEKRTADGSEFESPKKKAKVE

SEQ ID NO: 741 - protein, 2012 aa, synthetic construct
MPAAKRVKLDGGDKKYSIGLDIGTNSVGWAVITDEYKVPSKKFKVLGNTDRHSIKKNLIGALLFDSGETAEATRLKRTARRRYTRRKNRICYLQEIFSNEMAKVDDSFFHRLEESFLVEEDKKHERHPIFGNIVDEVAYHEKYPTIYHLRKKLVDSTDKADLRLIYLALAHMIKFRGHFLIEGDLNPDNSDVDKLFIQLVQTYNQLFEENPINASGVDAKAILSARLSKSRRLENLIAQLPGEKKNGLFGNLIALSLGLTPNFKSNFDLAEDAKLQLSKDTYDDDLDNLLAQIGDQYADLFLAAKNLSDAILLSDILRVNTEITKAPLSASMIKRYDEHHQDLTLLKALVRQQLPEKYKEIFFDQSKNGYAGYIDGGASQEEFYKFIKPILEKMDGTEELLVKLNREDLLRKQRTFDNGSIPHQIHLGELHAILRRQEDFYPFLKDNREKIEKILTFRIPYYVGPLARGNSRFAWMTRKSEETITPWNFEEVVDKGASAQSFIERMTNFDKNLPNEKVLPKHSLLYEYFTVYNELTKVKYVTEGMRKPAFLSGEQKKAIVDLLFKTNRKVTVKQLKEDYFKKIECFDSVEISGVEDRFNASLGTYHDLLKIIKDKDFLDNEENEDILEDIVLTLTLFEDREMIEERLKTYAHLFDDKVMKQLKRRRYTGWGRLSRKLINGIRDKQSGKTILDFLKSDGFANRNFMQLIHDDSLTFKEDIQKAQVSGQGDSLHEHIANLAGSPAIKKGILQTVKVVDELVKVMGRHKPENIVIEMARENQTTQKGQKNSRERMKRIEEGIKELGSQILKEHPVENTQLQNEKLYLYYLQNGRDMYVDQELDINRLSDYDVDHIVPQSFLKDDSIDNKVLTRSDKARGKSDNVPSEEVVKKMKNYWRQLLNAKLITQRKFDNLTKAERGGLSELDKAGFIKRQLVETRQITKHVAQILDSRMNTKYDENDKLIREVKVITLKSKLVSDFRKDFQFYKVREINNYHHAHDAYLNAVVGTALIKKYPKLESEFVYGDYKVYDVRKMIAKSEQEIGKATAKYFFYSNIMNFFKTEITLANGEIRKRPLIETNGETGEIVWDKGRDFATVRKVLSMPQVNIVKKTEVQTGGFSKESILPKRNSDKLIARKKDWDPKKYGGFDSPTVAYSVLVVAKVEKGKSKKLKSVKELLGITIMERSSFEKNPIDFLEAKGYKEVKKDLIIKLPKYSLFELENGRKRMLASAGELQKGNELALPSKYVNFLYLASHYEKLKGSPEDNEQKQLFVEQHKHYLDEIIEQISEFSKRVILADANLDKVLSAYNKHRDKPIREQAENIIHLFTLTNLGAPAAFKYFDTTIDRKRYTSTKEVLDATLIHQSITGLYETRIDLSQLGGDGGPAPGGGGGPRSRAIDIPVPHADKISWKITDPVWVDQWPLTYEKTLAAIALVQEQLAAGHIEPTNSPWNTPIFIIKKKSGSWRLLQDLRAVNKVMVPMGALQPGLPSPVAIPLNYHKIVIDLKDCFFTIPLHPEDRPYFAFSVPQINFQSPMPRYQWKVLPQGMANSPTLCQKFVAAAIAPVRSQWPEAYILHYMDDILLACDSAEAAKACYAHIISCLTSYGLKIAPDKVQVSEPFSYLGFELHHQQVFTPRVCLKTDHLKTLNDFQKLLGDIQWLRPYLKLPTSALVPLNNILKGDPNPLSVRALTPEAKQSLALINKAIQNQSVQQISYNLPLVLLLLPTPHTPTAVFWQPNGTDPTKNGSPLLWLHLPASPSKVLLTYPSLLAMLIIKGRYTGRQLFGRDPHSIIIPYTQDQLTWLLQTSDEWAIALSSFTGDIDNHYPSDPVIQFAKLHQFIFPKITKCAPIPQATLVFTDGSSNGIAAYVIDNQPISIKSPYLSAQLVELYAILQVFTVLAHQPFNLYTDSAYIAQSVPLLETVPFIKSSTNATPLFSKLQQLILNRQHPFFIGHLRAHLNLPGPLAEGNALADAATQIFPIISDAGKRTADGSEFEKRTADGSEFESPKKKAKVE

SEQ ID NO: 742 - protein, 2012 aa, synthetic construct
MPAAKRVKLDGGDKKYSIGLDIGTNSVGWAVITDEYKVPSKKFKVLGNTDRHSIKKNLIGALLFDSGETAEATRLKRTARRRYTRRKNRICYLQEIFSNEMAKVDDSFFHRLEESFLVEEDKKHERHPIFGNIVDEVAYHEKYPTIYHLRKKLVDSTDKADLRLIYLALAHMIKFRGHFLIEGDLNPDNSDVDKLFIQLVQTYNQLFEENPINASGVDAKAILSARLSKSRRLENLIAQLPGEKKNGLFGNLIALSLGLTPNFKSNFDLAEDAKLQLSKDTYDDDLDNLLAQIGDQYADLFLAAKNLSDAILLSDILRVNTEITKAPLSASMIKRYDEHHQDLTLLKALVRQQLPEKYKEIFFDQSKNGYAGYIDGGASQEEFYKFIKPILEKMDGTEELLVKLNREDLLRKQRTFDNGSIPHQIHLGELHAILRRQEDFYPFLKDNREKIEKILTFRIPYYVGPLARGNSRFAWMTRKSEETITPWNFEEVVDKGASAQSFIERMTNFDKNLPNEKVLPKHSLLYEYFTVYNELTKVKYVTEGMRKPAFLSGEQKKAIVDLLFKTNRKVTVKQLKEDYFKKIECFDSVEISGVEDRFNASLGTYHDLLKIIKDKDFLDNEENEDILEDIVLTLTLFEDREMIEERLKTYAHLFDDKVMKQLKRRRYTGWGRLSRKLINGIRDKQSGKTILDFLKSDGFANRNFMQLIHDDSLTFKEDIQKAQVSGQGDSLHEHIANLAGSPAIKKGILQTVKVVDELVKVMGRHKPENIVIEMARENQTTQKGQKNSRERMKRIEEGIKELGSQILKEHPVENTQLQNEKLYLYYLQNGRDMYVDQELDINRLSDYDVDHIVPQSFLKDDSIDNKVLTRSDKARGKSDNVPSEEVVKKMKNYWRQLLNAKLITQRKFDNLTKAERGGLSELDKAGFIKRQLVETRQITKHVAQILDSRMNTKYDENDKLIREVKVITLKSKLVSDFRKDFQFYKVREINNYHHAHDAYLNAVVGTALIKKYPKLESEFVYGDYKVYDVRKMIAKSEQEIGKATAKYFFYSNIMNFFKTEITLANGEIRKRPLIETNGETGEIVWDKGRDFATVRKVLSMPQVNIVKKTEVQTGGFSKESILPKRNSDKLIARKKDWDPKKYGGFDSPTVAYSVLVVAKVEKGKSKKLKSVKELLGITIMERSSFEKNPIDFLEAKGYKEVKKDLIIKLPKYSLFELENGRKRMLASAGELQKGNELALPSKYVNFLYLASHYEKLKGSPEDNEQKQLFVEQHKHYLDEIIEQISEFSKRVILADANLDKVLSAYNKHRDKPIREQAENIIHLFTLTNLGAPAAFKYFDTTIDRKRYTSTKEVLDATLIHQSITGLYETRIDLSQLGGDGGGGGGGGGGPRSRAIDIPVPHADKISWKITDPVWVDQWPLTYEKTLAAIALVQEQLAAGHIEPTNSPWNTPIFIIKKKSGSWRLLQDLRAVNKVMVPMGALQPGLPSPVAIPLNYHKIVIDLKDCFFTIPLHPEDRPYFAFSVPQINFQSPMPRYQWKVLPQGMANSPTLCQKFVAAAIAPVRSQWPEAYILHYMDDILLACDSAEAAKACYAHIISCLTSYGLKIAPDKVQVSEPFSYLGFELHHQQVFTPRVCLKTDHLKTLNDFQKLLGDIQWLRPYLKLPTSALVPLNNILKPDPNPLSVRALTPEAKQSLALINKAIQNQSVQQISYNLPLVLLLLPTPHTPTAVFWQPNGTDPTKNGSPLLWLHLPASPSKVLLTYPSLLAMLIIKGRYTGRQLFGRDPHSIIIPYTQDQLTWLLQTSDEWAIALSSFTGDIDNHYPSDPVIQFAKLHQFIFPKITKCAPIPQATLVFTDGSSNGIAAYVIDNQPISIKSPYLSAQLVELYAILQVFTVLAHQPFNLYTDSAYIAQSVPLLETVPFIKSSTNATPLFSKLQQLILNRQHPFFIGHLRAHLNLPGPLAEGNALADAATQIFPIISDAGKRTADGSEFEKRTADGSEFESPKKKAKVE

SEQ ID NO: 743 - protein, 2021 aa, synthetic construct
MPAAKRVKLDGGDKKYSIGLDIGTNSVGWAVITDEYKVPSKKFKVLGNTDRHSIKKNLIGALLFDSGETAEATRLKRTARRRYTRRKNRICYLQEIFSNEMAKVDDSFFHRLEESFLVEEDKKHERHPIFGNIVDEVAYHEKYPTIYHLRKKLVDSTDKADLRLIYLALAHMIKFRGHFLIEGDLNPDNSDVDKLFIQLVQTYNQLFEENPINASGVDAKAILSARLSKSRRLENLIAQLPGEKKNGLFGNLIALSLGLTPNFKSNFDLAEDAKLQLSKDTYDDDLDNLLAQIGDQYADLFLAAKNLSDAILLSDILRVNTEITKAPLSASMIKRYDEHHQDLTLLKALVRQQLPEKYKEIFFDQSKNGYAGYIDGGASQEEFYKFIKPILEKMDGTEELLVKLNREDLLRKQRTFDNGSIPHQIHLGELHAILRRQEDFYPFLKDNREKIEKILTFRIPYYVGPLARGNSRFAWMTRKSEETITPWNFEEVVDKGASAQSFIERMTNFDKNLPNEKVLPKHSLLYEYFTVYNELTKVKYVTEGMRKPAFLSGEQKKAIVDLLFKTNRKVTVKQLKEDYFKKIECFDSVEISGVEDRFNASLGTYHDLLKIIKDKDFLDNEENEDILEDIVLTLTLFEDREMIEERLKTYAHLFDDKVMKQLKRRRYTGWGRLSRKLINGIRDKQSGKTILDFLKSDGFANRNFMQLIHDDSLTFKEDIQKAQVSGQGDSLHEHIANLAGSPAIKKGILQTVKVVDELVKVMGRHKPENIVIEMARENQTTQKGQKNSRERMKRIEEGIKELGSQILKEHPVENTQLQNEKLYLYYLQNGRDMYVDQELDINRLSDYDVDHIVPQSFLKDDSIDNKVLTRSDKARGKSDNVPSEEVVKKMKNYWRQLLNAKLITQRKFDNLTKAERGGLSELDKAGFIKRQLVETRQITKHVAQILDSRMNTKYDENDKLIREVKVITLKSKLVSDFRKDFQFYKVREINNYHHAHDAYLNAVVGTALIKKYPKLESEFVYGDYKVYDVRKMIAKSEQEIGKATAKYFFYSNIMNFFKTEITLANGEIRKRPLIETNGETGEIVWDKGRDFATVRKVLSMPQVNIVKKTEVQTGGFSKESILPKRNSDKLIARKKDWDPKKYGGFDSPTVAYSVLVVAKVEKGKSKKLKSVKELLGITIMERSSFEKNPIDFLEAKGYKEVKKDLIIKLPKYSLFELENGRKRMLASAGELQKGNELALPSKYVNFLYLASHYEKLKGSPEDNEQKQLFVEQHKHYLDEIIEQISEFSKRVILADANLDKVLSAYNKHRDKPIREQAENIIHLFTLTNLGAPAAFKYFDTTIDRKRYTSTKEVLDATLIHQSITGLYETRIDLSQLGGDGGGGSGGSGGSGGSGGSGGPRSRAIDIPVPHADKISWKITDPVWVDQWPLTYEKTLAAIALVQEQLAAGHIEPTNSPWNTPIFIIKKKSGSWRLLQDLRAVNKVMVPMGALQPGLPSPVAPPLNYHKIVIDLKDCFFTIPLHPEDRPYFAFSVPQINFQSPMPRYQWKVLPQGMANSPTLCQKFVAAAIAPVRSQWPEAYILHYMDDILLACDSAEAAKACYAHIISCLTSYGLKIAPDKVQVSEPFSYLGFELHHQQVFTPRVCLKTDHLKTLNDFQKLLGDIQWLRPYLKLPTSALVPLNNILKPDPNPLSVRALTPEAKQSLALINKAIQNQSVQQISYNLPLVLLLLPTPHTPTAVFWQPNGTDPTKNGSPLLWLHLPASPSKVLLTYPSLLAMLIIKGRYTGRQLFGRDPHSIIIPYTQDQLTWLLQTSDEWAIALSSFTGDIDNHYPSDPVIQFAKLHQFIFPKITKCAPIPQATLVFTDGSSNGIAAYVIDNQPISIKSPYLSAQLVELYAILQVFTVLAHQPFNLYTDSAYIAQSVPLLETVPFIKSSTNATPLFSKLQQLILNRQHPFFIGHLRAHLNLPGPLAEGNALADAATQIFPIISDAGKRTADGSEFEKRTADGSEFESPKKKAKVE

SEQ ID NO: 744 - protein, 2017 aa, synthetic construct
MPAAKRVKLDGGDKKYSIGLDIGTNSVGWAVITDEYKVPSKKFKVLGNTDRHSIKKNLIGALLFDSGETAEATRLKRTARRRYTRRKNRICYLQEIFSNEMAKVDDSFFHRLEESFLVEEDKKHERHPIFGNIVDEVAYHEKYPTIYHLRKKLVDSTDKADLRLIYLALAHMIKFRGHFLIEGDLNPDNSDVDKLFIQLVQTYNQLFEENPINASGVDAKAILSARLSKSRRLENLIAQLPGEKKNGLFGNLIALSLGLTPNFKSNFDLAEDAKLQLSKDTYDDDLDNLLAQIGDQYADLFLAAKNLSDAILLSDILRVNTEITKAPLSASMIKRYDEHHQDLTLLKALVRQQLPEKYKEIFFDQSKNGYAGYIDGGASQEEFYKFIKPILEKMDGTEELLVKLNREDLLRKQRTFDNGSIPHQIHLGELHAILRRQEDFYPFLKDNREKIEKILTFRIPYYVGPLARGNSRFAWMTRKSEETITPWNFEEVVDKGASAQSFIERMTNFDKNLPNEKVLPKHSLLYEYFTVYNELTKVKYVTEGMRKPAFLSGEQKKAIVDLLFKTNRKVTVKQLKEDYFKKIECFDSVEISGVEDRFNASLGTYHDLLKIIKDKDFLDNEENEDILEDIVLTLTLFEDREMIEERLKTYAHLFDDKVMKQLKRRRYTGWGRLSRKLINGIRDKQSGKTILDFLKSDGFANRNFMQLIHDDSLTFKEDIQKAQVSGQGDSLHEHIANLAGSPAIKKGILQTVKVVDELVKVMGRHKPENIVIEMARENQTTQKGQKNSRERMKRIEEGIKELGSQILKEHPVENTQLQNEKLYLYYLQNGRDMYVDQELDINRLSDYDVDHIVPQSFLKDDSIDNKVLTRSDKARGKSDNVPSEEVVKKMKNYWRQLLNAKLITQRKFDNLTKAERGGLSELDKAGFIKRQLVETRQITKHVAQILDSRMNTKYDENDKLIREVKVITLKSKLVSDFRKDFQFYKVREINNYHHAHDAYLNAVVGTALIKKYPKLESEFVYGDYKVYDVRKMIAKSEQEIGKATAKYFFYSNIMNFFKTEITLANGEIRKRPLIETNGETGEIVWDKGRDFATVRKVLSMPQVNIVKKTEVQTGGFSKESILPKRNSDKLIARKKDWDPKKYGGFDSPTVAYSVLVVAKVEKGKSKKLKSVKELLGITIMERSSFEKNPIDFLEAKGYKEVKKDLIIKLPKYSLFELENGRKRMLASAGELQKGNELALPSKYVNFLYLASHYEKLKGSPEDNEQKQLFVEQHKHYLDEIIEQISEFSKRVILADANLDKVLSAYNKHRDKPIREQAENIIHLFTLTNLGAPAAFKYFDTTIDRKRYTSTKEVLDATLIHQSITGLYETRIDLSQLGGDGGGSSPAPEAAAKGGPRSRAIDIPVPHADKISWKITDPVWVDQWPLTYEKTLAAIALVQEQLAAGHIEPTNSPWNTPIFIIKKKSGSWRLLQDLRAVNKVMVPMGALQPGLPSPVAPPLNYHKIVIDLKDCFFTIPLHPEDRPYFAFSVPQINFQSPMPRYQWKVLPQGMANSPTLCQKFVAAAIAPVRSQWPEAYILHYMDDILLACDSAEAAKACYAHIISCLTSYGLKIAPDKVQVSEPFSYLGFELHHQQVFTPRVCLKTDHLKTLNDFQKLLGDIQWLRPYLKLPTSALVPLNNILKPDPNPLSVRALTPEAKQSLALINKAIQNQSVQQISYNLPLVLLLLPTPHTPTAVFWQPNGTDPTKNGSPLLWLHLPASPSKVLLTYPSLLAMLIIKGRYTGRQLFGRDPHSIIIPYTQDQLTWLLQTSDEWAIALSSFTGDIDNHYPSDPVIQFAKLHQFIFPKITKCAPIPQATLVFTDGSSNGIAAYVIDNQPISIKSPYLSAQLVELYAILQVFTVLAHQPFNLYTDSAYIAQSVPLLETVPFIKSSTNATPLFSKLQQLILNRQHPFFIGHLRAHLNLPGPLAEGNALADAATQIFPIISDAGKRTADGSEFEKRTADGSEFESPKKKAKVE

SEQ ID NO: 745 - protein, 2032 aa, synthetic construct
MPAAKRVKLDGGDKKYSIGLDIGTNSVGWAVITDEYKVPSKKFKVLGNTDRHSIKKNLIGALLFDSGETAEATRLKRTARRRYTRRKNRICYLQEIFSNEMAKVDDSFFHRLEESFLVEEDKKHERHPIFGNIVDEVAYHEKYPTIYHLRKKLVDSTDKADLRLIYLALAHMIKFRGHFLIEGDLNPDNSDVDKLFIQLVQTYNQLFEENPINASGVDAKAILSARLSKSRRLENLIAQLPGEKKNGLFGNLIALSLGLTPNFKSNFDLAEDAKLQLSKDTYDDDLDNLLAQIGDQYADLFLAAKNLSDAILLSDILRVNTEITKAPLSASMIKRYDEHHQDLTLLKALVRQQLPEKYKEIFFDQSKNGYAGYIDGGASQEEFYKFIKPILEKMDGTEELLVKLNREDLLRKQRTFDNGSIPHQIHLGELHAILRRQEDFYPFLKDNREKIEKILTFRIPYYVGPLARGNSRFAWMTRKSEETITPWNFEEVVDKGASAQSFIERMTNFDKNLPNEKVLPKHSLLYEYFTVYNELTKVKYVTEGMRKPAFLSGEQKKAIVDLLFKTNRKVTVKQLKEDYFKKIECFDSVEISGVEDRFNASLGTYHDLLKIIKDKDFLDNEENEDILEDIVLTLTLFEDREMIEERLKTYAHLFDDKVMKQLKRRRYTGWGRLSRKLINGIRDKQSGKTILDFLKSDGFANRNFMQLIHDDSLTFKEDIQKAQVSGQGDSLHEHIANLAGSPAIKKGILQTVKVVDELVKVMGRHKPENIVIEMARENQTTQKGQKNSRERMKRIEEGIKELGSQILKEHPVENTQLQNEKLYLYYLQNGRDMYVDQELDINRLSDYDVDHIVPQSFLKDDSIDNKVLTRSDKARGKSDNVPSEEVVKKMKNYWRQLLNAKLITQRKFDNLTKAERGGLSELDKAGFIKRQLVETRQITKHVAQILDSRMNTKYDENDKLIREVKVITLKSKLVSDFRKDFQFYKVREINNYHHAHDAYLNAVVGTALIKKYPKLESEFVYGDYKVYDVRKMIAKSEQEIGKATAKYFFYSNIMNFFKTEITLANGEIRKRPLIETNGETGEIVWDKGRDFATVRKVLSMPQVNIVKKTEVQTGGFSKESILPKRNSDKLIARKKDWDPKKYGGFDSPTVAYSVLVVAKVEKGKSKKLKSVKELLGITIMERSSFEKNPIDFLEAKGYKEVKKDLIIKLPKYSLFELENGRKRMLASAGELQKGNELALPSKYVNFLYLASHYEKLKGSPEDNEQKQLFVEQHKHYLDEIIEQISEFSKRVILADANLDKVLSAYNKHRDKPIREQAENIIHLFTLTNLGAPAAFKYFDTTIDRKRYTSTKEVLDATLIHQSITGLYETRIDLSQLGGDGGSGGSSGGSSGSETPGTSESATPESSGGSSGGSSGGLATAVDILAPQRYADPITWKSDEPVWVDQWPLTQEKLAAAQQLVQEQLQAGHIIESNSPWNTPIFVIKKKSGKWRLLQDLRAVNATMVLMGALQPGLPSPVAIPQGYFKIVIDLKDCFFTIPLQPVDQKRFAFSLPSTNFKQPMKRYQWKVLPQGMANSPTLCQKYVAAAIEPVRKSWAQMYIIHYMDDILIAGKLGEQVLQCFAQLKQALTTTGLQIAPEKVQLQDPYTYLGFQINGPKITNQKAVIRRDKLQTLNDFQKLLGDINWLRPYLHLTTGDLKPLFDILKGDSNPNSPRSLSEAALASLQKVETAIAEQFVTQIDYTQPLTFLIFNTTLTPTGLFWQNNPVMWVHLPASPKKVLLPYYDAIADLIILGRDNSKKYFGLEPSTIIQPYSKSQIHWLMQNTETWPIACASYAGNIDNHYPPNKLIQFCKLHAVVFPRIISKTPLDNALLVFTDGSSTGIAAYTFEKTTVRFKTSHTSAQLVELQALIAVLSAFPHRALNVYTDSAYLAHSIPLLETVSHIKHISDTAKFFLQCQQLIYNRSIPFYLGHIRAHSGLPGPLSQGNHITDLATKVVATTLTTAGKRTADGSEFEKRTADGSEFESPKKKAKVE

SEQ ID NO: 746 - protein, 2045 aa, synthetic construct
MPAAKRVKLDGGDKKYSIGLDIGTNSVGWAVITDEYKVPSKKFKVLGNTDRHSIKKNLIGALLFDSGETAEATRLKRTARRRYTRRKNRICYLQEIFSNEMAKVDDSFFHRLEESFLVEEDKKHERHPIFGNIVDEVAYHEKYPTIYHLRKKLVDSTDKADLRLIYLALAHMIKFRGHFLIEGDLNPDNSDVDKLFIQLVQTYNQLFEENPINASGVDAKAILSARLSKSRRLENLIAQLPGEKKNGLFGNLIALSLGLTPNFKSNFDLAEDAKLQLSKDTYDDDLDNLLAQIGDQYADLFLAAKNLSDAILLSDILRVNTEITKAPLSASMIKRYDEHHQDLTLLKALVRQQLPEKYKEIFFDQSKNGYAGYIDGGASQEEFYKFIKPILEKMDGTEELLVKLNREDLLRKQRTFDNGSIPHQIHLGELHAILRRQEDFYPFLKDNREKIEKILTFRIPYYVGPLARGNSRFAWMTRKSEETITPWNFEEVVDKGASAQSFIERMTNFDKNLPNEKVLPKHSLLYEYFTVYNELTKVKYVTEGMRKPAFLSGEQKKAIVDLLFKTNRKVTVKQLKEDYFKKIECFDSVEISGVEDRFNASLGTYHDLLKIIKDKDFLDNEENEDILEDIVLTLTLFEDREMIEERLKTYAHLFDDKVMKQLKRRRYTGWGRLSRKLINGIRDKQSGKTILDFLKSDGFANRNFMQLIHDDSLTFKEDIQKAQVSGQGDSLHEHIANLAGSPAIKKGILQTVKVVDELVKVMGRHKPENIVIEMARENQTTQKGQKNSRERMKRIEEGIKELGSQILKEHPVENTQLQNEKLYLYYLQNGRDMYVDQELDINRLSDYDVDHIVPQSFLKDDSIDNKVLTRSDKARGKSDNVPSEEVVKKMKNYWRQLLNAKLITQRKFDNLTKAERGGLSELDKAGFIKRQLVETRQITKHVAQILDSRMNTKYDENDKLIREVKVITLKSKLVSDFRKDFQFYKVREINNYHHAHDAYLNAVVGTALIKKYPKLESEFVYGDYKVYDVRKMIAKSEQEIGKATAKYFFYSNIMNFFKTEITLANGEIRKRPLIETNGETGEIVWDKGRDFATVRKVLSMPQVNIVKKTEVQTGGFSKESILPKRNSDKLIARKKDWDPKKYGGFDSPTVAYSVLVVAKVEKGKSKKLKSVKELLGITIMERSSFEKNPIDFLEAKGYKEVKKDLIIKLPKYSLFELENGRKRMLASAGELQKGNELALPSKYVNFLYLASHYEKLKGSPEDNEQKQLFVEQHKHYLDEIIEQISEFSKRVILADANLDKVLSAYNKHRDKPIREQAENIIHLFTLTNLGAPAAFKYFDTTIDRKRYTSTKEVLDATLIHQSITGLYETRIDLSQLGGDGGAEAAAKEAAAKEAAAKEAAAKALEAEAAAKEAAAKEAAAKEAAAKAGGLATAVDILAPQRYADPITWKSDEPVWVDQWPLTQEKLAAAQQLVQEQLQAGHIIESNSPWNTPIFVIKKKSGKWRLLQDLRAVNATMVLMGALQPGLPSPVAIPQGYFKIVIDLKDCFFTIPLQPVDQKRFAFSLPSTNFKQPMKRYQWKVLPQGMANSPTLCQKYVAAAIEPVRKSWAQMYIIHYMDDILIAGKLGEQVLQCFAQLKQALTTTGLQIAPEKVQLQDPYTYLGFQINGPKITNQKAVIRRDKLQTLNDFQKLLGDINWLRPYLHLTTGDLKPLFDILKGDSNPNSPRSLSEAALASLQKVETAIAEQFVTQIDYTQPLTFLIFNTTLTPTGLFWQNNPVMWVHLPASPKKVLLPYYDAIADLIILGRDNSKKYFGLEPSTIIQPYSKSQIHWLMQNTETWPIACASYAGNIDNHYPPNKLIQFCKLHAVVFPRIISKTPLDNALLVFTDGSSTGIAAYTFEKTTVRFKTSHTSAQLVELQALIAVLSAFPHRALNVYTDSAYLAHSIPLLETVSHIKHISDTAKFFLQCQQLIYNRSIPFYLGHIRAHSGLPGPLSQGNHITDLATKVVATTLTTAGKRTADGSEFEKRTADGSEFESPKKKAKVE

SEQ ID NO: 747 - protein, 2029 aa, synthetic construct
MPAAKRVKLDGGDKKYSIGLDIGTNSVGWAVITDEYKVPSKKFKVLGNTDRHSIKKNLIGALLFDSGETAEATRLKRTARRRYTRRKNRICYLQEIFSNEMAKVDDSFFHRLEESFLVEEDKKHERHPIFGNIVDEVAYHEKYPTIYHLRKKLVDSTDKADLRLIYLALAHMIKFRGHFLIEGDLNPDNSDVDKLFIQLVQTYNQLFEENPINASGVDAKAILSARLSKSRRLENLIAQLPGEKKNGLFGNLIALSLGLTPNFKSNFDLAEDAKLQLSKDTYDDDLDNLLAQIGDQYADLFLAAKNLSDAILLSDILRVNTEITKAPLSASMIKRYDEHHQDLTLLKALVRQQLPEKYKEIFFDQSKNGYAGYIDGGASQEEFYKFIKPILEKMDGTEELLVKLNREDLLRKQRTFDNGSIPHQIHLGELHAILRRQEDFYPFLKDNREKIEKILTFRIPYYVGPLARGNSRFAWMTRKSEETITPWNFEEVVDKGASAQSFIERMTNFDKNLPNEKVLPKHSLLYEYFTVYNELTKVKYVTEGMRKPAFLSGEQKKAIVDLLFKTNRKVTVKQLKEDYFKKIECFDSVEISGVEDRFNASLGTYHDLLKIIKDKDFLDNEENEDILEDIVLTLTLFEDREMIEERLKTYAHLFDDKVMKQLKRRRYTGWGRLSRKLINGIRDKQSGKTILDFLKSDGFANRNFMQLIHDDSLTFKEDIQKAQVSGQGDSLHEHIANLAGSPAIKKGILQTVKVVDELVKVMGRHKPENIVIEMARENQTTQKGQKNSRERMKRIEEGIKELGSQILKEHPVENTQLQNEKLYLYYLQNGRDMYVDQELDINRLSDYDVDHIVPQSFLKDDSIDNKVLTRSDKARGKSDNVPSEEVVKKMKNYWRQLLNAKLITQRKFDNLTKAERGGLSELDKAGFIKRQLVETRQITKHVAQILDSRMNTKYDENDKLIREVKVITLKSKLVSDFRKDFQFYKVREINNYHHAHDAYLNAVVGTALIKKYPKLESEFVYGDYKVYDVRKMIAKSEQEIGKATAKYFFYSNIMNFFKTEITLANGEIRKRPLIETNGETGEIVWDKGRDFATVRKVLSMPQVNIVKKTEVQTGGFSKESILPKRNSDKLIARKKDWDPKKYGGFDSPTVAYSVLVVAKVEKGKSKKLKSVKELLGITIMERSSFEKNPIDFLEAKGYKEVKKDLIIKLPKYSLFELENGRKRMLASAGELQKGNELALPSKYVNFLYLASHYEKLKGSPEDNEQKQLFVEQHKHYLDEIIEQISEFSKRVILADANLDKVLSAYNKHRDKPIREQAENIIHLFTLTNLGAPAAFKYFDTTIDRKRYTSTKEVLDATLIHQSITGLYETRIDLSQLGGDGGEAAAKEAAAKEAAAKEAAAKEAAAKEAAAKGGLATAVDILAPQRYADPITWKSDEPVWVDQWPLTQEKLAAAQQLVQEQLQAGHIIESNSPWNTPIFVIKKKSGKWRLLQDLRAVNATMVLMGALQPGLPSPVAIPQGYFKIVIDLKDCFFTIPLQPVDQKRFAFSLPSTNFKQPMKRYQWKVLPQGMANSPTLCQKYVAAAIEPVRKSWAQMYIIHYMDDILIAGKLGEQVLQCFAQLKQALTTTGLQIAPEKVQLQDPYTYLGFQINGPKITNQKAVIRRDKLQTLNDFQKLLGDINWLRPYLHLTTGDLKPLFDILKGDSNPNSPRSLSEAALASLQKVETAIAEQFVTQIDYTQPLTFLIFNTTLTPTGLFWQNNPVMWVHLPASPKKVLLPYYDAIADLIILGRDNSKKYFGLEPSTIIQPYSKSQIHWLMQNTETWPIACASYAGNIDNHYPPNKLIQFCKLHAVVFPRIISKTPLDNALLVFTDGSSTGIAAYTFEKTTVRFKTSHTSAQLVELQALIAVLSAFPHRALNVYTDSAYLAHSIPLLETVSHIKHISDTAKFFLQCQQLIYNRSIPFYLGHIRAHSGLPGPLSQGNHITDLATKVVATTLTTAGKRTADGSEFEKRTADGSEFESPKKKAKVE

SEQ ID NO: 748 - protein, 2024 aa, synthetic construct
MPAAKRVKLDGGDKKYSIGLDIGTNSVGWAVITDEYKVPSKKFKVLGNTDRHSIKKNLIGALLFDSGETAEATRLKRTARRRYTRRKNRICYLQEIFSNEMAKVDDSFFHRLEESFLVEEDKKHERHPIFGNIVDEVAYHEKYPTIYHLRKKLVDSTDKADLRLIYLALAHMIKFRGHFLIEGDLNPDNSDVDKLFIQLVQTYNQLFEENPINASGVDAKAILSARLSKSRRLENLIAQLPGEKKNGLFGNLIALSLGLTPNFKSNFDLAEDAKLQLSKDTYDDDLDNLLAQIGDQYADLFLAAKNLSDAILLSDILRVNTEITKAPLSASMIKRYDEHHQDLTLLKALVRQQLPEKYKEIFFDQSKNGYAGYIDGGASQEEFYKFIKPILEKMDGTEELLVKLNREDLLRKQRTFDNGSIPHQIHLGELHAILRRQEDFYPFLKDNREKIEKILTFRIPYYVGPLARGNSRFAWMTRKSEETITPWNFEEVVDKGASAQSFIERMTNFDKNLPNEKVLPKHSLLYEYFTVYNELTKVKYVTEGMRKPAFLSGEQKKAIVDLLFKTNRKVTVKQLKEDYFKKIECFDSVEISGVEDRFNASLGTYHDLLKIIKDKDFLDNEENEDILEDIVLTLTLFEDREMIEERLKTYAHLFDDKVMKQLKRRRYTGWGRLSRKLINGIRDKQSGKTILDFLKSDGFANRNFMQLIHDDSLTFKEDIQKAQVSGQGDSLHEHIANLAGSPAIKKGILQTVKVVDELVKVMGRHKPENIVIEMARENQTTQKGQKNSRERMKRIEEGIKELGSQILKEHPVENTQLQNEKLYLYYLQNGRDMYVDQELDINRLSDYDVDHIVPQSFLKDDSIDNKVLTRSDKARGKSDNVPSEEVVKKMKNYWRQLLNAKLITQRKFDNLTKAERGGLSELDKAGFIKRQLVETRQITKHVAQILDSRMNTKYDENDKLIREVKVITLKSKLVSDFRKDFQFYKVREINNYHHAHDAYLNAVVGTALIKKYPKLESEFVYGDYKVYDVRKMIAKSEQEIGKATAKYFFYSNIMNFFKTEITLANGEIRKRPLIETNGETGEIVWDKGRDFATVRKVLSMPQVNIVKKTEVQTGGFSKESILPKRNSDKLIARKKDWDPKKYGGFDSPTVAYSVLVVAKVEKGKSKKLKSVKELLGITIMERSSFEKNPIDFLEAKGYKEVKKDLIIKLPKYSLFELENGRKRMLASAGELQKGNELALPSKYVNFLYLASHYEKLKGSPEDNEQKQLFVEQHKHYLDEIIEQISEFSKRVILADANLDKVLSAYNKHRDKPIREQAENIIHLFTLTNLGAPAAFKYFDTTIDRKRYTSTKEVLDATLIHQSITGLYETRIDLSQLGGDGGEAAAKEAAAKEAAAKEAAAKEAAAKGGLATAVDILAPQRYADPITWKSDEPVWVDQWPLTQEKLAAAQQLVQEQLQAGHIIESNSPWNTPIFVIKKKSGKWRLLQDLRAVNATMVLMGALQPGLPSPVAIPQGYFKIVIDLKDCFFTIPLQPVDQKRFAFSLPSTNFKQPMKRYQWKVLPQGMANSPTLCQKYVAAAIEPVRKSWAQMYIIHYMDDILIAGKLGEQVLQCFAQLKQALTTTGLQIAPEKVQLQDPYTYLGFQINGPKITNQKAVIRRDKLQTLNDFQKLLGDINWLRPYLHLTTGDLKPLFDILKGDSNPNSPRSLSEAALASLQKVETAIAEQFVTQIDYTQPLTFLIFNTTLTPTGLFWQNNPVMWVHLPASPKKVLLPYYDAIADLIILGRDNSKKYFGLEPSTIIQPYSKSQIHWLMQNTETWPIACASYAGNIDNHYPPNKLIQFCKLHAVVFPRIISKTPLDNALLVFTDGSSTGIAAYTFEKTTVRFKTSHTSAQLVELQALIAVLSAFPHRALNVYTDSAYLAHSIPLLETVSHIKHISDTAKFFLQCQQLIYNRSIPFYLGHIRAHSGLPGPLSQGNHITDLATKVVATTLTTAGKRTADGSEFEKRTADGSEFESPKKKAKVE

SEQ ID NO: 749 - protein, 2012 aa, synthetic construct
MPAAKRVKLDGGDKKYSIGLDIGTNSVGWAVITDEYKVPSKKFKVLGNTDRHSIKKNLIGALLFDSGETAEATRLKRTARRRYTRRKNRICYLQEIFSNEMAKVDDSFFHRLEESFLVEEDKKHERHPIFGNIVDEVAYHEKYPTIYHLRKKLVDSTDKADLRLIYLALAHMIKFRGHFLIEGDLNPDNSDVDKLFIQLVQTYNQLFEENPINASGVDAKAILSARLSKSRRLENLIAQLPGEKKNGLFGNLIALSLGLTPNFKSNFDLAEDAKLQLSKDTYDDDLDNLLAQIGDQYADLFLAAKNLSDAILLSDILRVNTEITKAPLSASMIKRYDEHHQDLTLLKALVRQQLPEKYKEIFFDQSKNGYAGYIDGGASQEEFYKFIKPILEKMDGTEELLVKLNREDLLRKQRTFDNGSIPHQIHLGELHAILRRQEDFYPFLKDNREKIEKILTFRIPYYVGPLARGNSRFAWMTRKSEETITPWNFEEVVDKGASAQSFIERMTNFDKNLPNEKVLPKHSLLYEYFTVYNELTKVKYVTEGMRKPAFLSGEQKKAIVDLLFKTNRKVTVKQLKEDYFKKIECFDSVEISGVEDRFNASLGTYHDLLKIIKDKDFLDNEENEDILEDIVLTLTLFEDREMIEERLKTYAHLFDDKVMKQLKRRRYTGWGRLSRKLINGIRDKQSGKTILDFLKSDGFANRNFMQLIHDDSLTFKEDIQKAQVSGQGDSLHEHIANLAGSPAIKKGILQTVKVVDELVKVMGRHKPENIVIEMARENQTTQKGQKNSRERMKRIEEGIKELGSQILKEHPVENTQLQNEKLYLYYLQNGRDMYVDQELDINRLSDYDVDHIVPQSFLKDDSIDNKVLTRSDKARGKSDNVPSEEVVKKMKNYWRQLLNAKLITQRKFDNLTKAERGGLSELDKAGFIKRQLVETRQITKHVAQILDSRMNTKYDENDKLIREVKVITLKSKLVSDFRKDFQFYKVREINNYHHAHDAYLNAVVGTALIKKYPKLESEFVYGDYKVYDVRKMIAKSEQEIGKATAKYFFYSNIMNFFKTEITLANGEIRKRPLIETNGETGEIVWDKGRDFATVRKVLSMPQVNIVKKTEVQTGGFSKESILPKRNSDKLIARKKDWDPKKYGGFDSPTVAYSVLVVAKVEKGKSKKLKSVKELLGITIMERSSFEKNPIDFLEAKGYKEVKKDLIIKLPKYSLFELENGRKRMLASAGELQKGNELALPSKYVNFLYLASHYEKLKGSPEDNEQKQLFVEQHKHYLDEIIEQISEFSKRVILADANLDKVLSAYNKHRDKPIREQAENIIHLFTLTNLGAPAAFKYFDTTIDRKRYTSTKEVLDATLIHQSITGLYETRIDLSQLGGDGGPAPAPAPAPAPAPGGLATAVDILAPQRYADPITWKSDEPVWVDQWPLTQEKLAAAQQLVQEQLQAGHIIESNSPWNTPIFVIKKKSGKWRLLQDLRAVNATMVLMGALQPGLPSPVAIPQGYFKIVIDLKDCFFTIPLQPVDQKRFAFSLPSTNFKQPMKRYQWKVLPQGMANSPTLCQKYVAAAIEPVRKSWAQMYIIHYMDDILIAGKLGEQVLQCFAQLKQALTTTGLQIAPEKVQLQDPYTYLGFQINGPKITNQKAVIRRDKLQTLNDFQKLLGDINWLRPYLHLTTGDLKPLFDILKGDSNPNSPRSLSEAALASLQKVETAIAEQFVTQIDYTQPLTFLIFNTTLTPTGLFWQNNPVMWVHLPASPKKVLLPYYDAIADLIILGRDNSKKYFGLEPSTIIQPYSKSQIHWLMQNTETWPIACASYAGNIDNHYPPNKLIQFCKLHAVVFPRIISKTPLDNALLVFTDGSSTGIAAYTFEKTTVRFKTSHTSAQLVELQALIAVLSAFPHRALNVYTDSAYLAHSIPLLETVSHIKHISDTAKFFLQCQQLIYNRSIPFYLGHIRAHSGLPGPLSQGNHITDLATKVVATTLTTAGKRTADGSEFEKRTADGSEFESPKKKAKVE

SEQ ID NO: 750 - protein, 2010 aa, synthetic construct
MPAAKRVKLDGGDKKYSIGLDIGTNSVGWAVITDEYKVPSKKFKVLGNTDRHSIKKNLIGALLFDSGETAEATRLKRTARRRYTRRKNRICYLQEIFSNEMAKVDDSFFHRLEESFLVEEDKKHERHPIFGNIVDEVAYHEKYPTIYHLRKKLVDSTDKADLRLIYLALAHMIKFRGHFLIEGDLNPDNSDVDKLFIQLVQTYNQLFEENPINASGVDAKAILSARLSKSRRLENLIAQLPGEKKNGLFGNLIALSLGLTPNFKSNFDLAEDAKLQLSKDTYDDDLDNLLAQIGDQYADLFLAAKNLSDAILLSDILRVNTEITKAPLSASMIKRYDEHHQDLTLLKALVRQQLPEKYKEIFFDQSKNGYAGYIDGGASQEEFYKFIKPILEKMDGTEELLVKLNREDLLRKQRTFDNGSIPHQIHLGELHAILRRQEDFYPFLKDNREKIEKILTFRIPYYVGPLARGNSRFAWMTRKSEETITPWNFEEVVDKGASAQSFIERMTNFDKNLPNEKVLPKHSLLYEYFTVYNELTKVKYVTEGMRKPAFLSGEQKKAIVDLLFKTNRKVTVKQLKEDYFKKIECFDSVEISGVEDRFNASLGTYHDLLKIIKDKDFLDNEENEDILEDIVLTLTLFEDREMIEERLKTYAHLFDDKVMKQLKRRRYTGWGRLSRKLINGIRDKQSGKTILDFLKSDGFANRNFMQLIHDDSLTFKEDIQKAQVSGQGDSLHEHIANLAGSPAIKKGILQTVKVVDELVKVMGRHKPENIVIEMARENQTTQKGQKNSRERMKRIEEGIKELGSQILKEHPVENTQLQNEKLYLYYLQNGRDMYVDQELDINRLSDYDVDHIVPQSFLKDDSIDNKVLTRSDKARGKSDNVPSEEVVKKMKNYWRQLLNAKLITQRKFDNLTKAERGGLSELDKAGFIKRQLVETRQITKHVAQILDSRMNTKYDENDKLIREVKVITLKSKLVSDFRKDFQFYKVREINNYHHAHDAYLNAVVGTALIKKYPKLESEFVYGDYKVYDVRKMIAKSEQEIGKATAKYFFYSNIMNFFKTEITLANGEIRKRPLIETNGETGEIVWDKGRDFATVRKVLSMPQVNIVKKTEVQTGGFSKESILPKRNSDKLIARKKDWDPKKYGGFDSPTVAYSVLVVAKVEKGKSKKLKSVKELLGITIMERSSFEKNPIDFLEAKGYKEVKKDLIIKLPKYSLFELENGRKRMLASAGELQKGNELALPSKYVNFLYLASHYEKLKGSPEDNEQKQLFVEQHKHYLDEIIEQISEFSKRVILADANLDKVLSAYNKHRDKPIREQAENIIHLFTLTNLGAPAAFKYFDTTIDRKRYTSTKEVLDATLIHQSITGLYETRIDLSQLGGDGGPAPAPAPAPAPGGLATAVDILAPQRYADPITWKSDEPVWVDQWPLTQEKLAAAQQLVQEQLQAGHIIESNSPWNTPIFVIKKKSGKWRLLQDLRAVNATMVLMGALQPGLPSPVAIPQGYFKIVIDLKDCFFTIPLQPVDQKRFAFSLPSTNFKQPMKRYQWKVLPQGMANSPTLCQKYVAAAIEPVRKSWAQMYIIHYMDDILIAGKLGEQVLQCFAQLKQALTTTGLQIAPEKVQLQDPYTYLGFQINGPKITNQKAVIRRDKLQTLNDFQKLLGDINWLRPYLHLTTGDLKPLFDILKGDSNPNSPRSLSEAALASLQKVETAIAEQFVTQIDYTQPLTFLIFNTTLTPTGLFWQNNPVMWVHLPASPKKVLLPYYDAIADLIILGRDNSKKYFGLEPSTIIQPYSKSQIHWLMQNTETWPIACASYAGNIDNHYPPNKLIQFCKLHAVVFPRIISKTPLDNALLVFTDGSSTGIAAYTFEKTTVRFKTSHTSAQLVELQALIAVLSAFPHRALNVYTDSAYLAHSIPLLETVSHIKHISDTAKFFLQCQQLIYNRSIPFYLGHIRAHSGLPGPLSQGNHITDLATKVVATTLTTAGKRTADGSEFEKRTADGSEFESPKKKAKVE

SEQ ID NO: 751 - protein, 2014 aa, synthetic construct
MPAAKRVKLDGGDKKYSIGLDIGTNSVGWAVITDEYKVPSKKFKVLGNTDRHSIKKNLIGALLFDSGETAEATRLKRTARRRYTRRKNRICYLQEIFSNEMAKVDDSFFHRLEESFLVEEDKKHERHPIFGNIVDEVAYHEKYPTIYHLRKKLVDSTDKADLRLIYLALAHMIKFRGHFLIEGDLNPDNSDVDKLFIQLVQTYNQLFEENPINASGVDAKAILSARLSKSRRLENLIAQLPGEKKNGLFGNLIALSLGLTPNFKSNFDLAEDAKLQLSKDTYDDDLDNLLAQIGDQYADLFLAAKNLSDAILLSDILRVNTEITKAPLSASMIKRYDEHHQDLTLLKALVRQQLPEKYKEIFFDQSKNGYAGYIDGGASQEEFYKFIKPILEKMDGTEELLVKLNREDLLRKQRTFDNGSIPHQIHLGELHAILRRQEDFYPFLKDNREKIEKILTFRIPYYVGPLARGNSRFAWMTRKSEETITPWNFEEVVDKGASAQSFIERMTNFDKNLPNEKVLPKHSLLYEYFTVYNELTKVKYVTEGMRKPAFLSGEQKKAIVDLLFKTNRKVTVKQLKEDYFKKIECFDSVEISGVEDRFNASLGTYHDLLKIIKDKDFLDNEENEDILEDIVLTLTLFEDREMIEERLKTYAHLFDDKVMKQLKRRRYTGWGRLSRKLINGIRDKQSGKTILDFLKSDGFANRNFMQLIHDDSLTFKEDIQKAQVSGQGDSLHEHIANLAGSPAIKKGILQTVKVVDELVKVMGRHKPENIVIEMARENQTTQKGQKNSRERMKRIEEGIKELGSQILKEHPVENTQLQNEKLYLYYLQNGRDMYVDQELDINRLSDYDVDHIVPQSFLKDDSIDNKVLTRSDKARGKSDNVPSEEVVKKMKNYWRQLLNAKLITQRKFDNLTKAERGGLSELDKAGFIKRQLVETRQITKHVAQILDSRMNTKYDENDKLIREVKVITLKSKLVSDFRKDFQFYKVREINNYHHAHDAYLNAVVGTALIKKYPKLESEFVYGDYKVYDVRKMIAKSEQEIGKATAKYFFYSNIMNFFKTEITLANGEIRKRPLIETNGETGEIVWDKGRDFATVRKVLSMPQVNIVKKTEVQTGGFSKESILPKRNSDKLIARKKDWDPKKYGGFDSPTVAYSVLVVAKVEKGKSKKLKSVKELLGITIMERSSFEKNPIDFLEAKGYKEVKKDLIIKLPKYSLFELENGRKRMLASAGELQKGNELALPSKYVNFLYLASHYEKLKGSPEDNEQKQLFVEQHKHYLDEIIEQISEFSKRVILADANLDKVLSAYNKHRDKPIREQAENIIHLFTLTNLGAPAAFKYFDTTIDRKRYTSTKEVLDATLIHQSITGLYETRIDLSQLGGDGGGSSGSSGSSGSSGSSGGLATAVDILAPQRYADPITWKSDEPVWVDQWPLTQEKLAAAQQLVQEQLQAGHIIESNSPWNTPIFVIKKKSGKWRLLQDLRAVNATMVLMGALQPGLPSPVAIPQGYFKIVIDLKDCFFTIPLQPVDQKRFAFSLPSTNFKQPMKRYQWKVLPQGMANSPTLCQKYVAAAIEPVRKSWAQMYIIHYMDDILIAGKLGEQVLQCFAQLKQALTTTGLQIAPEKVQLQDPYTYLGFQINGPKITNQKAVIRRDKLQTLNDFQKLLGDINWLRPYLHLTTGDLKPLFDILKGDSNPNSPRSLSEAALASLQKVETAIAEQFVTQIDYTQPLTFLIFNTTLTPTGLFWQNNPVMWVHLPASPKKVLLPYYDAIADLIILGRDNSKKYFGLEPSTIIQPYSKSQIHWLMQNTETWPIACASYAGNIDNHYPPNKLIQFCKLHAVVFPRIISKTPLDNALLVFTDGSSTGIAAYTFEKTTVRFKTSHTSAQLVELQALIAVLSAFPHRALNVYTDSAYLAHSIPLLETVSHIKHISDTAKFFLQCQQLIYNRSIPFYLGHIRAHSGLPGPLSQGNHITDLATKVVATTLTTAGKRTADGSEFEKRTADGSEFESPKKKAKVE

SEQ ID NO: 752 - protein, 2015 aa, synthetic construct
MPAAKRVKLDGGDKKYSIGLDIGTNSVGWAVITDEYKVPSKKFKVLGNTDRHSIKKNLIGALLFDSGETAEATRLKRTARRRYTRRKNRICYLQEIFSNEMAKVDDSFFHRLEESFLVEEDKKHERHPIFGNIVDEVAYHEKYPTIYHLRKKLVDSTDKADLRLIYLALAHMIKFRGHFLIEGDLNPDNSDVDKLFIQLVQTYNQLFEENPINASGVDAKAILSARLSKSRRLENLIAQLPGEKKNGLFGNLIALSLGLTPNFKSNFDLAEDAKLQLSKDTYDDDLDNLLAQIGDQYADLFLAAKNLSDAILLSDILRVNTEITKAPLSASMIKRYDEHHQDLTLLKALVRQQLPEKYKEIFFDQSKNGYAGYIDGGASQEEFYKFIKPILEKMDGTEELLVKLNREDLLRKQRTFDNGSIPHQIHLGELHAILRRQEDFYPFLKDNREKIEKILTFRIPYYVGPLARGNSRFAWMTRKSEETITPWNFEEVVDKGASAQSFIERMTNFDKNLPNEKVLPKHSLLYEYFTVYNELTKVKYVTEGMRKPAFLSGEQKKAIVDLLFKTNRKVTVKQLKEDYFKKIECFDSVEISGVEDRFNASLGTYHDLLKIIKDKDFLDNEENEDILEDIVLTLTLFEDREMIEERLKTYAHLFDDKVMKQLKRRRYTGWGRLSRKLINGIRDKQSGKTILDFLKSDGFANRNFMQLIHDDSLTFKEDIQKAQVSGQGDSLHEHIANLAGSPAIKKGILQTVKVVDELVKVMGRHKPENIVIEMARENQTTQKGQKNSRERMKRIEEGIKELGSQILKEHPVENTQLQNEKLYLYYLQNGRDMYVDQELDINRLSDYDVDHIVPQSFLKDDSIDNKVLTRSDKARGKSDNVPSEEVVKKMKNYWRQLLNAKLITQRKFDNLTKAERGGLSELDKAGFIKRQLVETRQITKHVAQILDSRMNTKYDENDKLIREVKVITLKSKLVSDFRKDFQFYKVREINNYHHAHDAYLNAVVGTALIKKYPKLESEFVYGDYKVYDVRKMIAKSEQEIGKATAKYFFYSNIMNFFKTEITLANGEIRKRPLIETNGETGEIVWDKGRDFATVRKVLSMPQVNIVKKTEVQTGGFSKESILPKRNSDKLIARKKDWDPKKYGGFDSPTVAYSVLVVAKVEKGKSKKLKSVKELLGITIMERSSFEKNPIDFLEAKGYKEVKKDLIIKLPKYSLFELENGRKRMLASAGELQKGNELALPSKYVNFLYLASHYEKLKGSPEDNEQKQLFVEQHKHYLDEIIEQISEFSKRVILADANLDKVLSAYNKHRDKPIREQAENIIHLFTLTNLGAPAAFKYFDTTIDRKRYTSTKEVLDATLIHQSITGLYETRIDLSQLGGDGGSGSETPGTSESATPESGGLATAVDILAPQRYADPITWKSDEPVWVDQWPLTQEKLAAAQQLVQEQLQAGHIIESNSPWNTPIFVIKKKSGKWRLLQDLRAVNATMVLMGALQPGLPSPVAIPQGYFKIVIDLKDCFFTIPLQPVDQKRFAFSLPSTNFKQPMKRYQWKVLPQGMANSPTLCQKYVAAAIEPVRKSWAQMYIIHYMDDILIAGKLGEQVLQCFAQLKQALTTTGLQIAPEKVQLQDPYTYLGFQINGPKITNQKAVIRRDKLQTLNDFQKLLGDINWLRPYLHLTTGDLKPLFDILKGDSNPNSPRSLSEAALASLQKVETAIAEQFVTQIDYTQPLTFLIFNTTLTPTGLFWQNNPVMWVHLPASPKKVLLPYYDAIADLIILGRDNSKKYFGLEPSTIIQPYSKSQIHWLMQNTETWPIACASYAGNIDNHYPPNKLIQFCKLHAVVFPRIISKTPLDNALLVFTDGSSTGIAAYTFEKTTVRFKTSHTSAQLVELQALIAVLSAFPHRALNVYTDSAYLAHSIPLLETVSHIKHISDTAKFFLQCQQLIYNRSIPFYLGHIRAHSGLPGPLSQGNHITDLATKVVATTLTTAGKRTADGSEFEKRTADGSEFESPKKKAKVE

SEQ ID NO: 753 - protein, 2010 aa, synthetic construct
MPAAKRVKLDGGDKKYSIGLDIGTNSVGWAVITDEYKVPSKKFKVLGNTDRHSIKKNLIGALLFDSGETAEATRLKRTARRRYTRRKNRICYLQEIFSNEMAKVDDSFFHRLEESFLVEEDKKHERHPIFGNIVDEVAYHEKYPTIYHLRKKLVDSTDKADLRLIYLALAHMIKFRGHFLIEGDLNPDNSDVDKLFIQLVQTYNQLFEENPINASGVDAKAILSARLSKSRRLENLIAQLPGEKKNGLFGNLIALSLGLTPNFKSNFDLAEDAKLQLSKDTYDDDLDNLLAQIGDQYADLFLAAKNLSDAILLSDILRVNTEITKAPLSASMIKRYDEHHQDLTLLKALVRQQLPEKYKEIFFDQSKNGYAGYIDGGASQEEFYKFIKPILEKMDGTEELLVKLNREDLLRKQRTFDNGSIPHQIHLGELHAILRRQEDFYPFLKDNREKIEKILTFRIPYYVGPLARGNSRFAWMTRKSEETITPWNFEEVVDKGASAQSFIERMTNFDKNLPNEKVLPKHSLLYEYFTVYNELTKVKYVTEGMRKPAFLSGEQKKAIVDLLFKTNRKVTVKQLKEDYFKKIECFDSVEISGVEDRFNASLGTYHDLLKIIKDKDFLDNEENEDILEDIVLTLTLFEDREMIEERLKTYAHLFDDKVMKQLKRRRYTGWGRLSRKLINGIRDKQSGKTILDFLKSDGFANRNFMQLIHDDSLTFKEDIQKAQVSGQGDSLHEHIANLAGSPAIKKGILQTVKVVDELVKVMGRHKPENIVIEMARENQTTQKGQKNSRERMKRIEEGIKELGSQILKEHPVENTQLQNEKLYLYYLQNGRDMYVDQELDINRLSDYDVDHIVPQSFLKDDSIDNKVLTRSDKARGKSDNVPSEEVVKKMKNYWRQLLNAKLITQRKFDNLTKAERGGLSELDKAGFIKRQLVETRQITKHVAQILDSRMNTKYDENDKLIREVKVITLKSKLVSDFRKDFQFYKVREINNYHHAHDAYLNAVVGTALIKKYPKLESEFVYGDYKVYDVRKMIAKSEQEIGKATAKYFFYSNIMNFFKTEITLANGEIRKRPLIETNGETGEIVWDKGRDFATVRKVLSMPQVNIVKKTEVQTGGFSKESILPKRNSDKLIARKKDWDPKKYGGFDSPTVAYSVLVVAKVEKGKSKKLKSVKELLGITIMERSSFEKNPIDFLEAKGYKEVKKDLIIKLPKYSLFELENGRKRMLASAGELQKGNELALPSKYVNFLYLASHYEKLKGSPEDNEQKQLFVEQHKHYLDEIIEQISEFSKRVILADANLDKVLSAYNKHRDKPIREQAENIIHLFTLTNLGAPAAFKYFDTTIDRKRYTSTKEVLDATLIHQSITGLYETRIDLSQLGGDGGGSSPAPEAAAKGGLATAVDILAPQRYADPITWKSDEPVWVDQWPLTQEKLAAAQQLVQEQLQAGHIIESNSPWNTPIFVIKKKSGKWRLLQDLRAVNATMVLMGALQPGLPSPVAIPQGYFKIVIDLKDCFFTIPLQPVDQKRFAFSLPSTNFKQPMKRYQWKVLPQGMANSPTLCQKYVAAAIEPVRKSWAQMYIIHYMDDILIAGKLGEQVLQCFAQLKQALTTTGLQIAPEKVQLQDPYTYLGFQINGPKITNQKAVIRRDKLQTLNDFQKLLGDINWLRPYLHLTTGDLKPLFDILKGDSNPNSPRSLSEAALASLQKVETAIAEQFVTQIDYTQPLTFLIFNTTLTPTGLFWQNNPVMWVHLPASPKKVLLPYYDAIADLIILGRDNSKKYFGLEPSTIIQPYSKSQIHWLMQNTETWPIACASYAGNIDNHYPPNKLIQFCKLHAVVFPRIISKTPLDNALLVFTDGSSTGIAAYTFEKTTVRFKTSHTSAQLVELQALIAVLSAFPHRALNVYTDSAYLAHSIPLLETVSHIKHISDTAKFFLQCQQLIYNRSIPFYLGHIRAHSGLPGPLSQGNHITDLATKVVATTLTTAGKRTADGSEFEKRTADGSEFESPKKKAKVE

SEQ ID NO: 754 - protein, 2010 aa, synthetic construct
MPAAKRVKLDGGDKKYSIGLDIGTNSVGWAVITDEYKVPSKKFKVLGNTDRHSIKKNLIGALLFDSGETAEATRLKRTARRRYTRRKNRICYLQEIFSNEMAKVDDSFFHRLEESFLVEEDKKHERHPIFGNIVDEVAYHEKYPTIYHLRKKLVDSTDKADLRLIYLALAHMIKFRGHFLIEGDLNPDNSDVDKLFIQLVQTYNQLFEENPINASGVDAKAILSARLSKSRRLENLIAQLPGEKKNGLFGNLIALSLGLTPNFKSNFDLAEDAKLQLSKDTYDDDLDNLLAQIGDQYADLFLAAKNLSDAILLSDILRVNTEITKAPLSASMIKRYDEHHQDLTLLKALVRQQLPEKYKEIFFDQSKNGYAGYIDGGASQEEFYKFIKPILEKMDGTEELLVKLNREDLLRKQRTFDNGSIPHQIHLGELHAILRRQEDFYPFLKDNREKIEKILTFRIPYYVGPLARGNSRFAWMTRKSEETITPWNFEEVVDKGASAQSFIERMTNFDKNLPNEKVLPKHSLLYEYFTVYNELTKVKYVTEGMRKPAFLSGEQKKAIVDLLFKTNRKVTVKQLKEDYFKKIECFDSVEISGVEDRFNASLGTYHDLLKIIKDKDFLDNEENEDILEDIVLTLTLFEDREMIEERLKTYAHLFDDKVMKQLKRRRYTGWGRLSRKLINGIRDKQSGKTILDFLKSDGFANRNFMQLIHDDSLTFKEDIQKAQVSGQGDSLHEHIANLAGSPAIKKGILQTVKVVDELVKVMGRHKPENIVIEMARENQTTQKGQKNSRERMKRIEEGIKELGSQILKEHPVENTQLQNEKLYLYYLQNGRDMYVDQELDINRLSDYDVDHIVPQSFLKDDSIDNKVLTRSDKARGKSDNVPSEEVVKKMKNYWRQLLNAKLITQRKFDNLTKAERGGLSELDKAGFIKRQLVETRQITKHVAQILDSRMNTKYDENDKLIREVKVITLKSKLVSDFRKDFQFYKVREINNYHHAHDAYLNAVVGTALIKKYPKLESEFVYGDYKVYDVRKMIAKSEQEIGKATAKYFFYSNIMNFFKTEITLANGEIRKRPLIETNGETGEIVWDKGRDFATVRKVLSMPQVNIVKKTEVQTGGFSKESILPKRNSDKLIARKKDWDPKKYGGFDSPTVAYSVLVVAKVEKGKSKKLKSVKELLGITIMERSSFEKNPIDFLEAKGYKEVKKDLIIKLPKYSLFELENGRKRMLASAGELQKGNELALPSKYVNFLYLASHYEKLKGSPEDNEQKQLFVEQHKHYLDEIIEQISEFSKRVILADANLDKVLSAYNKHRDKPIREQAENIIHLFTLTNLGAPAAFKYFDTTIDRKRYTSTKEVLDATLIHQSITGLYETRIDLSQLGGDGGGSSGGSEAAAKGGLATAVDILAPQRYADPITWKSDEPVWVDQWPLTQEKLAAAQQLVQEQLQAGHIIESNSPWNTPIFVIKKKSGKWRLLQDLRAVNATMVLMGALQPGLPSPVAIPQGYFKIVIDLKDCFFTIPLQPVDQKRFAFSLPSTNFKQPMKRYQWKVLPQGMANSPTLCQKYVAAAIEPVRKSWAQMYIIHYMDDILIAGKLGEQVLQCFAQLKQALTTTGLQIAPEKVQLQDPYTYLGFQINGPKITNQKAVIRRDKLQTLNDFQKLLGDINWLRPYLHLTTGDLKPLFDILKGDSNPNSPRSLSEAALASLQKVETAIAEQFVTQIDYTQPLTFLIFNTTLTPTGLFWQNNPVMWVHLPASPKKVLLPYYDAIADLIILGRDNSKKYFGLEPSTIIQPYSKSQIHWLMQNTETWPIACASYAGNIDNHYPPNKLIQFCKLHAVVFPRIISKTPLDNALLVFTDGSSTGIAAYTFEKTTVRFKTSHTSAQLVELQALIAVLSAFPHRALNVYTDSAYLAHSIPLLETVSHIKHISDTAKFFLQCQQLIYNRSIPFYLGHIRAHSGLPGPLSQGNHITDLATKVVATTLTTAGKRTADGSEFEKRTADGSEFESPKKKAKVE

SEQ ID NO: 755 - protein, 2008 aa, synthetic construct
MPAAKRVKLDGGDKKYSIGLDIGTNSVGWAVITDEYKVPSKKFKVLGNTDRHSIKKNLIGALLFDSGETAEATRLKRTARRRYTRRKNRICYLQEIFSNEMAKVDDSFFHRLEESFLVEEDKKHERHPIFGNIVDEVAYHEKYPTIYHLRKKLVDSTDKADLRLIYLALAHMIKFRGHFLIEGDLNPDNSDVDKLFIQLVQTYNQLFEENPINASGVDAKAILSARLSKSRRLENLIAQLPGEKKNGLFGNLIALSLGLTPNFKSNFDLAEDAKLQLSKDTYDDDLDNLLAQIGDQYADLFLAAKNLSDAILLSDILRVNTEITKAPLSASMIKRYDEHHQDLTLLKALVRQQLPEKYKEIFFDQSKNGYAGYIDGGASQEEFYKFIKPILEKMDGTEELLVKLNREDLLRKQRTFDNGSIPHQIHLGELHAILRRQEDFYPFLKDNREKIEKILTFRIPYYVGPLARGNSRFAWMTRKSEETITPWNFEEVVDKGASAQSFIERMTNFDKNLPNEKVLPKHSLLYEYFTVYNELTKVKYVTEGMRKPAFLSGEQKKAIVDLLFKTNRKVTVKQLKEDYFKKIECFDSVEISGVEDRFNASLGTYHDLLKIIKDKDFLDNEENEDILEDIVLTLTLFEDREMIEERLKTYAHLFDDKVMKQLKRRRYTGWGRLSRKLINGIRDKQSGKTILDFLKSDGFANRNFMQLIHDDSLTFKEDIQKAQVSGQGDSLHEHIANLAGSPAIKKGILQTVKVVDELVKVMGRHKPENIVIEMARENQTTQKGQKNSRERMKRIEEGIKELGSQILKEHPVENTQLQNEKLYLYYLQNGRDMYVDQELDINRLSDYDVDHIVPQSFLKDDSIDNKVLTRSDKARGKSDNVPSEEVVKKMKNYWRQLLNAKLITQRKFDNLTKAERGGLSELDKAGFIKRQLVETRQITKHVAQILDSRMNTKYDENDKLIREVKVITLKSKLVSDFRKDFQFYKVREINNYHHAHDAYLNAVVGTALIKKYPKLESEFVYGDYKVYDVRKMIAKSEQEIGKATAKYFFYSNIMNFFKTEITLANGEIRKRPLIETNGETGEIVWDKGRDFATVRKVLSMPQVNIVKKTEVQTGGFSKESILPKRNSDKLIARKKDWDPKKYGGFDSPTVAYSVLVVAKVEKGKSKKLKSVKELLGITIMERSSFEKNPIDFLEAKGYKEVKKDLIIKLPKYSLFELENGRKRMLASAGELQKGNELALPSKYVNFLYLASHYEKLKGSPEDNEQKQLFVEQHKHYLDEIIEQISEFSKRVILADANLDKVLSAYNKHRDKPIREQAENIIHLFTLTNLGAPAAFKYFDTTIDRKRYTSTKEVLDATLIHQSITGLYETRIDLSQLGGDGGPAPGGGGGSGGLATAVDILAPQRYADPITWKSDEPVWVDQWPLTQEKLAAAQQLVQEQLQAGHIIESNSPWNTPIFVIKKKSGKWRLLQDLRAVNATMVLMGALQPGLPSPVAIPQGYFKIVIDLKDCFFTIPLQPVDQKRFAFSLPSTNFKQPMKRYQWKVLPQGMANSPTLCQKYVAAAIEPVRKSWAQMYIIHYMDDILIAGKLGEQVLQCFAQLKQALTTTGLQIAPEKVQLQDPYTYLGFQINGPKITNQKAVIRRDKLQTLNDFQKLLGDINWLRPYLHLTTGDLKPLFDILKGDSNPNSPRSLSEAALASLQKVETAIAEQFVTQIDYTQPLTFLIFNTTLTPTGLFWQNNPVMWVHLPASPKKVLLPYYDAIADLIILGRDNSKKYFGLEPSTIIQPYSKSQIHWLMQNTETWPIACASYAGNIDNHYPPNKLIQFCKLHAVVFPRIISKTPLDNALLVFTDGSSTGIAAYTFEKTTVRFKTSHTSAQLVELQALIAVLSAFPHRALNVYTDSAYLAHSIPLLETVSHIKHISDTAKFFLQCQQLIYNRSIPFYLGHIRAHSGLPGPLSQGNHITDLATKVVATTLTTAGKRTADGSEFEKRTADGSEFESPKKKAKVE

SEQ ID NO: 756 - protein, 2005 aa, synthetic construct
MPAAKRVKLDGGDKKYSIGLDIGTNSVGWAVITDEYKVPSKKFKVLGNTDRHSIKKNLIGALLFDSGETAEATRLKRTARRRYTRRKNRICYLQEIFSNEMAKVDDSFFHRLEESFLVEEDKKHERHPIFGNIVDEVAYHEKYPTIYHLRKKLVDSTDKADLRLIYLALAHMIKFRGHFLIEGDLNPDNSDVDKLFIQLVQTYNQLFEENPINASGVDAKAILSARLSKSRRLENLIAQLPGEKKNGLFGNLIALSLGLTPNFKSNFDLAEDAKLQLSKDTYDDDLDNLLAQIGDQYADLFLAAKNLSDAILLSDILRVNTEITKAPLSASMIKRYDEHHQDLTLLKALVRQQLPEKYKEIFFDQSKNGYAGYIDGGASQEEFYKFIKPILEKMDGTEELLVKLNREDLLRKQRTFDNGSIPHQIHLGELHAILRRQEDFYPFLKDNREKIEKILTFRIPYYVGPLARGNSRFAWMTRKSEETITPWNFEEVVDKGASAQSFIERMTNFDKNLPNEKVLPKHSLLYEYFTVYNELTKVKYVTEGMRKPAFLSGEQKKAIVDLLFKTNRKVTVKQLKEDYFKKIECFDSVEISGVEDRFNASLGTYHDLLKIIKDKDFLDNEENEDILEDIVLTLTLFEDREMIEERLKTYAHLFDDKVMKQLKRRRYTGWGRLSRKLINGIRDKQSGKTILDFLKSDGFANRNFMQLIHDDSLTFKEDIQKAQVSGQGDSLHEHIANLAGSPAIKKGILQTVKVVDELVKVMGRHKPENIVIEMARENQTTQKGQKNSRERMKRIEEGIKELGSQILKEHPVENTQLQNEKLYLYYLQNGRDMYVDQELDINRLSDYDVDHIVPQSFLKDDSIDNKVLTRSDKARGKSDNVPSEEVVKKMKNYWRQLLNAKLITQRKFDNLTKAERGGLSELDKAGFIKRQLVETRQITKHVAQILDSRMNTKYDENDKLIREVKVITLKSKLVSDFRKDFQFYKVREINNYHHAHDAYLNAVVGTALIKKYPKLESEFVYGDYKVYDVRKMIAKSEQEIGKATAKYFFYSNIMNFFKTEITLANGEIRKRPLIETNGETGEIVWDKGRDFATVRKVLSMPQVNIVKKTEVQTGGFSKESILPKRNSDKLIARKKDWDPKKYGGFDSPTVAYSVLVVAKVEKGKSKKLKSVKELLGITIMERSSFEKNPIDFLEAKGYKEVKKDLIIKLPKYSLFELENGRKRMLASAGELQKGNELALPSKYVNFLYLASHYEKLKGSPEDNEQKQLFVEQHKHYLDEIIEQISEFSKRVILADANLDKVLSAYNKHRDKPIREQAENIIHLFTLTNLGAPAAFKYFDTTIDRKRYTSTKEVLDATLIHQSITGLYETRIDLSQLGGDGGGGGGGSGGLATAVDILAPQRYADPITWKSDEPVWVDQWPLTQEKLAAAQQLVQEQLQAGHIIESNSPWNTPIFVIKKKSGKWRLLQDLRAVNATMVLMGALQPGLPSPVAIPQGYFKIVIDLKDCFFTIPLQPVDQKRFAFSLPSTNFKQPMKRYQWKVLPQGMANSPTLCQKYVAAAIEPVRKSWAQMYIIHYMDDILIAGKLGEQVLQCFAQLKQALTTTGLQIAPEKVQLQDPYTYLGFQINGPKITNQKAVIRRDKLQTLNDFQKLLGDINWLRPYLHLTTGDLKPLFDILKGDSNPNSPRSLSEAALASLQKVETAIAEQFVTQIDYTQPLTFLIFNTTLTPTGLFWQNNPVMWVHLPASPKKVLLPYYDAIADLIILGRDNSKKYFGLEPSTIIQPYSKSQIHWLMQNTETWPIACASYAGNIDNHYPPNKLIQFCKLHAVVFPRIISKTPLDNALLVFTDGSSTGIAAYTFEKTTVRFKTSHTSAQLVELQALIAVLSAFPHRALNVYTDSAYLAHSIPLLETVSHIKHISDTAKFFLQCQQLIYNRSIPFYLGHIRAHSGLPGPLSQGNHITDLATKVVATTLTTAGKRTADGSEFEKRTADGSEFESPKKKAKVE

SEQ ID NO: 757 - protein, 2014 aa, synthetic construct
MPAAKRVKLDGGDKKYSIGLDIGTNSVGWAVITDEYKVPSKKFKVLGNTDRHSIKKNLIGALLFDSGETAEATRLKRTARRRYTRRKNRICYLQEIFSNEMAKVDDSFFHRLEESFLVEEDKKHERHPIFGNIVDEVAYHEKYPTIYHLRKKLVDSTDKADLRLIYLALAHMIKFRGHFLIEGDLNPDNSDVDKLFIQLVQTYNQLFEENPINASGVDAKAILSARLSKSRRLENLIAQLPGEKKNGLFGNLIALSLGLTPNFKSNFDLAEDAKLQLSKDTYDDDLDNLLAQIGDQYADLFLAAKNLSDAILLSDILRVNTEITKAPLSASMIKRYDEHHQDLTLLKALVRQQLPEKYKEIFFDQSKNGYAGYIDGGASQEEFYKFIKPILEKMDGTEELLVKLNREDLLRKQRTFDNGSIPHQIHLGELHAILRRQEDFYPFLKDNREKIEKILTFRIPYYVGPLARGNSRFAWMTRKSEETITPWNFEEVVDKGASAQSFIERMTNFDKNLPNEKVLPKHSLLYEYFTVYNELTKVKYVTEGMRKPAFLSGEQKKAIVDLLFKTNRKVTVKQLKEDYFKKIECFDSVEISGVEDRFNASLGTYHDLLKIIKDKDFLDNEENEDILEDIVLTLTLFEDREMIEERLKTYAHLFDDKVMKQLKRRRYTGWGRLSRKLINGIRDKQSGKTILDFLKSDGFANRNFMQLIHDDSLTFKEDIQKAQVSGQGDSLHEHIANLAGSPAIKKGILQTVKVVDELVKVMGRHKPENIVIEMARENQTTQKGQKNSRERMKRIEEGIKELGSQILKEHPVENTQLQNEKLYLYYLQNGRDMYVDQELDINRLSDYDVDHIVPQSFLKDDSIDNKVLTRSDKARGKSDNVPSEEVVKKMKNYWRQLLNAKLITQRKFDNLTKAERGGLSELDKAGFIKRQLVETRQITKHVAQILDSRMNTKYDENDKLIREVKVITLKSKLVSDFRKDFQFYKVREINNYHHAHDAYLNAVVGTALIKKYPKLESEFVYGDYKVYDVRKMIAKSEQEIGKATAKYFFYSNIMNFFKTEITLANGEIRKRPLIETNGETGEIVWDKGRDFATVRKVLSMPQVNIVKKTEVQTGGFSKESILPKRNSDKLIARKKDWDPKKYGGFDSPTVAYSVLVVAKVEKGKSKKLKSVKELLGITIMERSSFEKNPIDFLEAKGYKEVKKDLIIKLPKYSLFELENGRKRMLASAGELQKGNELALPSKYVNFLYLASHYEKLKGSPEDNEQKQLFVEQHKHYLDEIIEQISEFSKRVILADANLDKVLSAYNKHRDKPIREQAENIIHLFTLTNLGAPAAFKYFDTTIDRKRYTSTKEVLDATLIHQSITGLYETRIDLSQLGGDGGGSSGSSGSSGSSGSSGGLATAVDILAPQRYADPITWKSDEPVWVDQWPLTQEKLAAAQQLVQEQLQAGHIIESNSPWNTPIFVIKKKSGKWRLLQDLRAVNATMVLMGALQPGLPSPVAPPQGYFKIVIDLKDCFFTIPLQPVDQKRFAFSLPSTNFKQPMKRYQWKVLPQGMANSPTLCQKYVAAAIEPVRKSWAQMYIIHYMDDILIAGKLGEQVLQCFAQLKQALTTTGLQIAPEKVQLQDPYTYLGFQINGPKITNQKAVIRRDKLQTLNDFQKLLGDINWLRPYLHLTTGDLKPLFDILKGDSNPNSPRSLSEAALASLQKVETAIAEQFVTQIDYTQPLTFLIFNTTLTPTGLFWQNNPVMWVHLPASPKKVLLPYYDAIADLIILGRDNSKKYFGLEPSTIIQPYSKSQIHWLMQNTETWPIACASYAGNIDNHYPPNKLIQFCKLHAVVFPRIISKTPLDNALLVFTDGSSTGIAAYTFEKTTVRFKTSHTSAQLVELQALIAVLSAFPHRALNVYTDSAYLAHSIPLLETVSHIKHISDTAKFFLQCQQLIYNRSIPFYLGHIRAHSGLPGPLSQGNHITDLATKVVATTLTTAGKRTADGSEFEKRTADGSEFESPKKKAKVE

SEQ ID NO: 758 - protein, 2010 aa, synthetic construct
MPAAKRVKLDGGDKKYSIGLDIGTNSVGWAVITDEYKVPSKKFKVLGNTDRHSIKKNLIGALLFDSGETAEATRLKRTARRRYTRRKNRICYLQEIFSNEMAKVDDSFFHRLEESFLVEEDKKHERHPIFGNIVDEVAYHEKYPTIYHLRKKLVDSTDKADLRLIYLALAHMIKFRGHFLIEGDLNPDNSDVDKLFIQLVQTYNQLFEENPINASGVDAKAILSARLSKSRRLENLIAQLPGEKKNGLFGNLIALSLGLTPNFKSNFDLAEDAKLQLSKDTYDDDLDNLLAQIGDQYADLFLAAKNLSDAILLSDILRVNTEITKAPLSASMIKRYDEHHQDLTLLKALVRQQLPEKYKEIFFDQSKNGYAGYIDGGASQEEFYKFIKPILEKMDGTEELLVKLNREDLLRKQRTFDNGSIPHQIHLGELHAILRRQEDFYPFLKDNREKIEKILTFRIPYYVGPLARGNSRFAWMTRKSEETITPWNFEEVVDKGASAQSFIERMTNFDKNLPNEKVLPKHSLLYEYFTVYNELTKVKYVTEGMRKPAFLSGEQKKAIVDLLFKTNRKVTVKQLKEDYFKKIECFDSVEISGVEDRFNASLGTYHDLLKIIKDKDFLDNEENEDILEDIVLTLTLFEDREMIEERLKTYAHLFDDKVMKQLKRRRYTGWGRLSRKLINGIRDKQSGKTILDFLKSDGFANRNFMQLIHDDSLTFKEDIQKAQVSGQGDSLHEHIANLAGSPAIKKGILQTVKVVDELVKVMGRHKPENIVIEMARENQTTQKGQKNSRERMKRIEEGIKELGSQILKEHPVENTQLQNEKLYLYYLQNGRDMYVDQELDINRLSDYDVDHIVPQSFLKDDSIDNKVLTRSDKARGKSDNVPSEEVVKKMKNYWRQLLNAKLITQRKFDNLTKAERGGLSELDKAGFIKRQLVETRQITKHVAQILDSRMNTKYDENDKLIREVKVITLKSKLVSDFRKDFQFYKVREINNYHHAHDAYLNAVVGTALIKKYPKLESEFVYGDYKVYDVRKMIAKSEQEIGKATAKYFFYSNIMNFFKTEITLANGEIRKRPLIETNGETGEIVWDKGRDFATVRKVLSMPQVNIVKKTEVQTGGFSKESILPKRNSDKLIARKKDWDPKKYGGFDSPTVAYSVLVVAKVEKGKSKKLKSVKELLGITIMERSSFEKNPIDFLEAKGYKEVKKDLIIKLPKYSLFELENGRKRMLASAGELQKGNELALPSKYVNFLYLASHYEKLKGSPEDNEQKQLFVEQHKHYLDEIIEQISEFSKRVILADANLDKVLSAYNKHRDKPIREQAENIIHLFTLTNLGAPAAFKYFDTTIDRKRYTSTKEVLDATLIHQSITGLYETRIDLSQLGGDGGGSSPAPEAAAKGGLATAVDILAPQRYADPITWKSDEPVWVDQWPLTQEKLAAAQQLVQEQLQAGHIIESNSPWNTPIFVIKKKSGKWRLLQDLRAVNATMVLMGALQPGLPSPVAPPQGYFKIVIDLKDCFFTIPLQPVDQKRFAFSLPSTNFKQPMKRYQWKVLPQGMANSPTLCQKYVAAAIEPVRKSWAQMYIIHYMDDILIAGKLGEQVLQCFAQLKQALTTTGLQIAPEKVQLQDPYTYLGFQINGPKITNQKAVIRRDKLQTLNDFQKLLGDINWLRPYLHLTTGDLKPLFDILKGDSNPNSPRSLSEAALASLQKVETAIAEQFVTQIDYTQPLTFLIFNTTLTPTGLFWQNNPVMWVHLPASPKKVLLPYYDAIADLIILGRDNSKKYFGLEPSTIIQPYSKSQIHWLMQNTETWPIACASYAGNIDNHYPPNKLIQFCKLHAVVFPRIISKTPLDNALLVFTDGSSTGIAAYTFEKTTVRFKTSHTSAQLVELQALIAVLSAFPHRALNVYTDSAYLAHSIPLLETVSHIKHISDTAKFFLQCQQLIYNRSIPFYLGHIRAHSGLPGPLSQGNHITDLATKVVATTLTTAGKRTADGSEFEKRTADGSEFESPKKKAKVE

SEQ ID NO: 759 - protein, 2072 aa, synthetic construct
MPAAKRVKLDGGDKKYSIGLDIGTNSVGWAVITDEYKVPSKKFKVLGNTDRHSIKKNLIGALLFDSGETAEATRLKRTARRRYTRRKNRICYLQEIFSNEMAKVDDSFFHRLEESFLVEEDKKHERHPIFGNIVDEVAYHEKYPTIYHLRKKLVDSTDKADLRLIYLALAHMIKFRGHFLIEGDLNPDNSDVDKLFIQLVQTYNQLFEENPINASGVDAKAILSARLSKSRRLENLIAQLPGEKKNGLFGNLIALSLGLTPNFKSNFDLAEDAKLQLSKDTYDDDLDNLLAQIGDQYADLFLAAKNLSDAILLSDILRVNTEITKAPLSASMIKRYDEHHQDLTLLKALVRQQLPEKYKEIFFDQSKNGYAGYIDGGASQEEFYKFIKPILEKMDGTEELLVKLNREDLLRKQRTFDNGSIPHQIHLGELHAILRRQEDFYPFLKDNREKIEKILTFRIPYYVGPLARGNSRFAWMTRKSEETITPWNFEEVVDKGASAQSFIERMTNFDKNLPNEKVLPKHSLLYEYFTVYNELTKVKYVTEGMRKPAFLSGEQKKAIVDLLFKTNRKVTVKQLKEDYFKKIECFDSVEISGVEDRFNASLGTYHDLLKIIKDKDFLDNEENEDILEDIVLTLTLFEDREMIEERLKTYAHLFDDKVMKQLKRRRYTGWGRLSRKLINGIRDKQSGKTILDFLKSDGFANRNFMQLIHDDSLTFKEDIQKAQVSGQGDSLHEHIANLAGSPAIKKGILQTVKVVDELVKVMGRHKPENIVIEMARENQTTQKGQKNSRERMKRIEEGIKELGSQILKEHPVENTQLQNEKLYLYYLQNGRDMYVDQELDINRLSDYDVDHIVPQSFLKDDSIDNKVLTRSDKARGKSDNVPSEEVVKKMKNYWRQLLNAKLITQRKFDNLTKAERGGLSELDKAGFIKRQLVETRQITKHVAQILDSRMNTKYDENDKLIREVKVITLKSKLVSDFRKDFQFYKVREINNYHHAHDAYLNAVVGTALIKKYPKLESEFVYGDYKVYDVRKMIAKSEQEIGKATAKYFFYSNIMNFFKTEITLANGEIRKRPLIETNGETGEIVWDKGRDFATVRKVLSMPQVNIVKKTEVQTGGFSKESILPKRNSDKLIARKKDWDPKKYGGFDSPTVAYSVLVVAKVEKGKSKKLKSVKELLGITIMERSSFEKNPIDFLEAKGYKEVKKDLIIKLPKYSLFELENGRKRMLASAGELQKGNELALPSKYVNFLYLASHYEKLKGSPEDNEQKQLFVEQHKHYLDEIIEQISEFSKRVILADANLDKVLSAYNKHRDKPIREQAENIIHLFTLTNLGAPAAFKYFDTTIDRKRYTSTKEVLDATLIHQSITGLYETRIDLSQLGGDGGPAPEAAAKGGSCQTKNTLNIDEYLLQFPDQLWASLPTDIGRMLVPPITIKIKDNASLPSIRQYPLPKDKTEGLRPLISSLENQGILIKCHSPCNTPIFPIKKAGRDEYRMIHDLRAINNIVAPLTAVVASPTTVLSNLAPSLHWFTVIDLSNAFFSVPIHKDSQYLFAFTFEGHQYTWTVLPQGFIHSPTLFSQALYQSLHKIKFKISSEICIYMDDVLIASKDRDTNLKDTAVMLQHLASEGHKVSKKKLQLCQQEVVYLGQLLTPEGRKILPDRKVTVSQFQQPTTIRQIRAFLGLVGYCRHWIPEFSIHSKFLEKQLKKDTAEPFQLDDQQVEAFNKLKHAITTAPVLVVPDPAKPFQLYTSHSEHASIAVLTQKHAGRTRPIAFLSSKFDAIESGLPPCLKACASIHRSLTQADSFILGAPLIIYTTHAICTLLQRDRSQLVTASRFSKWEADLLRPELTFVACSAVSPAHLYMQSCENNIPPHDCVLLTHTISRPRPDLSDLPIPDPDMTLFSDGSYTTGRGGAAVVMHRPVTDDFIIIHQQPGGASAQTAELLALAAACHLATDKTVNIYTDSRYAYGVVHDFGHLWMHRGFVTSAGTPIKNHKEIEYLLKQIMKPKQVSVIKIEAHTKGVSMEVRGNAAADEAAKNAVFLVQRAGKRTADGSEFEKRTADGSEFESPKKKAKVE

SEQ ID NO: 760 - protein, 2070 aa, synthetic construct
MPAAKRVKLDGGDKKYSIGLDIGTNSVGWAVITDEYKVPSKKFKVLGNTDRHSIKKNLIGALLFDSGETAEATRLKRTARRRYTRRKNRICYLQEIFSNEMAKVDDSFFHRLEESFLVEEDKKHERHPIFGNIVDEVAYHEKYPTIYHLRKKLVDSTDKADLRLIYLALAHMIKFRGHFLIEGDLNPDNSDVDKLFIQLVQTYNQLFEENPINASGVDAKAILSARLSKSRRLENLIAQLPGEKKNGLFGNLIALSLGLTPNFKSNFDLAEDAKLQLSKDTYDDDLDNLLAQIGDQYADLFLAAKNLSDAILLSDILRVNTEITKAPLSASMIKRYDEHHQDLTLLKALVRQQLPEKYKEIFFDQSKNGYAGYIDGGASQEEFYKFIKPILEKMDGTEELLVKLNREDLLRKQRTFDNGSIPHQIHLGELHAILRRQEDFYPFLKDNREKIEKILTFRIPYYVGPLARGNSRFAWMTRKSEETITPWNFEEVVDKGASAQSFIERMTNFDKNLPNEKVLPKHSLLYEYFTVYNELTKVKYVTEGMRKPAFLSGEQKKAIVDLLFKTNRKVTVKQLKEDYFKKIECFDSVEISGVEDRFNASLGTYHDLLKIIKDKDFLDNEENEDILEDIVLTLTLFEDREMIEERLKTYAHLFDDKVMKQLKRRRYTGWGRLSRKLINGIRDKQSGKTILDFLKSDGFANRNFMQLIHDDSLTFKEDIQKAQVSGQGDSLHEHIANLAGSPAIKKGILQTVKVVDELVKVMGRHKPENIVIEMARENQTTQKGQKNSRERMKRIEEGIKELGSQILKEHPVENTQLQNEKLYLYYLQNGRDMYVDQELDINRLSDYDVDHIVPQSFLKDDSIDNKVLTRSDKARGKSDNVPSEEVVKKMKNYWRQLLNAKLITQRKFDNLTKAERGGLSELDKAGFIKRQLVETRQITKHVAQILDSRMNTKYDENDKLIREVKVITLKSKLVSDFRKDFQFYKVREINNYHHAHDAYLNAVVGTALIKKYPKLESEFVYGDYKVYDVRKMIAKSEQEIGKATAKYFFYSNIMNFFKTEITLANGEIRKRPLIETNGETGEIVWDKGRDFATVRKVLSMPQVNIVKKTEVQTGGFSKESILPKRNSDKLIARKKDWDPKKYGGFDSPTVAYSVLVVAKVEKGKSKKLKSVKELLGITIMERSSFEKNPIDFLEAKGYKEVKKDLIIKLPKYSLFELENGRKRMLASAGELQKGNELALPSKYVNFLYLASHYEKLKGSPEDNEQKQLFVEQHKHYLDEIIEQISEFSKRVILADANLDKVLSAYNKHRDKPIREQAENIIHLFTLTNLGAPAAFKYFDTTIDRKRYTSTKEVLDATLIHQSITGLYETRIDLSQLGGDGGGGGGGGGGSCQTKNTLNIDEYLLQFPDQLWASLPTDIGRMLVPPITIKIKDNASLPSIRQYPLPKDKTEGLRPLISSLENQGILIKCHSPCNTPIFPIKKAGRDEYRMIHDLRAINNIVAPLTAVVASPTTVLSNLAPSLHWFTVIDLSNAFFSVPIHKDSQYLFAFTFEGHQYTWTVLPQGFIHSPTLFSQALYQSLHKIKFKISSEICIYMDDVLIASKDRDTNLKDTAVMLQHLASEGHKVSKKKLQLCQQEVVYLGQLLTPEGRKILPDRKVTVSQFQQPTTIRQIRAFLGLVGYCRHWIPEFSIHSKFLEKQLKKDTAEPFQLDDQQVEAFNKLKHAITTAPVLVVPDPAKPFQLYTSHSEHASIAVLTQKHAGRTRPIAFLSSKFDAIESGLPPCLKACASIHRSLTQADSFILGAPLIIYTTHAICTLLQRDRSQLVTASRFSKWEADLLRPELTFVACSAVSPAHLYMQSCENNIPPHDCVLLTHTISRPRPDLSDLPIPDPDMTLFSDGSYTTGRGGAAVVMHRPVTDDFIIIHQQPGGASAQTAELLALAAACHLATDKTVNIYTDSRYAYGVVHDFGHLWMHRGFVTSAGTPIKNHKEIEYLLKQIMKPKQVSVIKIEAHTKGVSMEVRGNAAADEAAKNAVFLVQRAGKRTADGSEFEKRTADGSEFESPKKKAKVE

SEQ ID NO: 761 - protein, 2077 aa, synthetic construct
MPAAKRVKLDGGDKKYSIGLDIGTNSVGWAVITDEYKVPSKKFKVLGNTDRHSIKKNLIGALLFDSGETAEATRLKRTARRRYTRRKNRICYLQEIFSNEMAKVDDSFFHRLEESFLVEEDKKHERHPIFGNIVDEVAYHEKYPTIYHLRKKLVDSTDKADLRLIYLALAHMIKFRGHFLIEGDLNPDNSDVDKLFIQLVQTYNQLFEENPINASGVDAKAILSARLSKSRRLENLIAQLPGEKKNGLFGNLIALSLGLTPNFKSNFDLAEDAKLQLSKDTYDDDLDNLLAQIGDQYADLFLAAKNLSDAILLSDILRVNTEITKAPLSASMIKRYDEHHQDLTLLKALVRQQLPEKYKEIFFDQSKNGYAGYIDGGASQEEFYKFIKPILEKMDGTEELLVKLNREDLLRKQRTFDNGSIPHQIHLGELHAILRRQEDFYPFLKDNREKIEKILTFRIPYYVGPLARGNSRFAWMTRKSEETITPWNFEEVVDKGASAQSFIERMTNFDKNLPNEKVLPKHSLLYEYFTVYNELTKVKYVTEGMRKPAFLSGEQKKAIVDLLFKTNRKVTVKQLKEDYFKKIECFDSVEISGVEDRFNASLGTYHDLLKIIKDKDFLDNEENEDILEDIVLTLTLFEDREMIEERLKTYAHLFDDKVMKQLKRRRYTGWGRLSRKLINGIRDKQSGKTILDFLKSDGFANRNFMQLIHDDSLTFKEDIQKAQVSGQGDSLHEHIANLAGSPAIKKGILQTVKVVDELVKVMGRHKPENIVIEMARENQTTQKGQKNSRERMKRIEEGIKELGSQILKEHPVENTQLQNEKLYLYYLQNGRDMYVDQELDINRLSDYDVDHIVPQSFLKDDSIDNKVLTRSDKARGKSDNVPSEEVVKKMKNYWRQLLNAKLITQRKFDNLTKAERGGLSELDKAGFIKRQLVETRQITKHVAQILDSRMNTKYDENDKLIREVKVITLKSKLVSDFRKDFQFYKVREINNYHHAHDAYLNAVVGTALIKKYPKLESEFVYGDYKVYDVRKMIAKSEQEIGKATAKYFFYSNIMNFFKTEITLANGEIRKRPLIETNGETGEIVWDKGRDFATVRKVLSMPQVNIVKKTEVQTGGFSKESILPKRNSDKLIARKKDWDPKKYGGFDSPTVAYSVLVVAKVEKGKSKKLKSVKELLGITIMERSSFEKNPIDFLEAKGYKEVKKDLIIKLPKYSLFELENGRKRMLASAGELQKGNELALPSKYVNFLYLASHYEKLKGSPEDNEQKQLFVEQHKHYLDEIIEQISEFSKRVILADANLDKVLSAYNKHRDKPIREQAENIIHLFTLTNLGAPAAFKYFDTTIDRKRYTSTKEVLDATLIHQSITGLYETRIDLSQLGGDGGPAPAPAPAPAPAPGGSCQTKNTLNIDEYLLQFPDQLWASLPTDIGRMLVPPITIKIKDNASLPSIRQYPLPKDKTEGLRPLISSLENQGILIKCHSPCNTPIFPIKKAGRDEYRMIHDLRAINNIVAPLTAVVASPTTVLSNLAPSLHWFTVIDLSNAFFSVPIHKDSQYLFAFTFEGHQYTWTVLPQGFIHSPTLFSQALYQSLHKIKFKISSEICIYMDDVLIASKDRDTNLKDTAVMLQHLASEGHKVSKKKLQLCQQEVVYLGQLLTPEGRKILPDRKVTVSQFQQPTTIRQIRAFLGLVGYCRHWIPEFSIHSKFLEKQLKKDTAEPFQLDDQQVEAFNKLKHAITTAPVLVVPDPAKPFQLYTSHSEHASIAVLTQKHAGRTRPIAFLSSKFDAIESGLPPCLKACASIHRSLTQADSFILGAPLIIYTTHAICTLLQRDRSQLVTASRFSKWEADLLRPELTFVACSAVSPAHLYMQSCENNIPPHDCVLLTHTISRPRPDLSDLPIPDPDMTLFSDGSYTTGRGGAAVVMHRPVTDDFIIIHQQPGGASAQTAELLALAAACHLATDKTVNIYTDSRYAYGVVHDFGHLWMHRGFVTSAGTPIKNHKEIEYLLKQIMKPKQVSVIKIEAHTKGVSMEVRGNAAADEAAKNAVFLVQRAGKRTADGSEFEKRTADGSEFESPKKKAKVE

SEQ ID NO: 762 - protein, 2079 aa, synthetic construct
MPAAKRVKLDGGDKKYSIGLDIGTNSVGWAVITDEYKVPSKKFKVLGNTDRHSIKKNLIGALLFDSGETAEATRLKRTARRRYTRRKNRICYLQEIFSNEMAKVDDSFFHRLEESFLVEEDKKHERHPIFGNIVDEVAYHEKYPTIYHLRKKLVDSTDKADLRLIYLALAHMIKFRGHFLIEGDLNPDNSDVDKLFIQLVQTYNQLFEENPINASGVDAKAILSARLSKSRRLENLIAQLPGEKKNGLFGNLIALSLGLTPNFKSNFDLAEDAKLQLSKDTYDDDLDNLLAQIGDQYADLFLAAKNLSDAILLSDILRVNTEITKAPLSASMIKRYDEHHQDLTLLKALVRQQLPEKYKEIFFDQSKNGYAGYIDGGASQEEFYKFIKPILEKMDGTEELLVKLNREDLLRKQRTFDNGSIPHQIHLGELHAILRRQEDFYPFLKDNREKIEKILTFRIPYYVGPLARGNSRFAWMTRKSEETITPWNFEEVVDKGASAQSFIERMTNFDKNLPNEKVLPKHSLLYEYFTVYNELTKVKYVTEGMRKPAFLSGEQKKAIVDLLFKTNRKVTVKQLKEDYFKKIECFDSVEISGVEDRFNASLGTYHDLLKIIKDKDFLDNEENEDILEDIVLTLTLFEDREMIEERLKTYAHLFDDKVMKQLKRRRYTGWGRLSRKLINGIRDKQSGKTILDFLKSDGFANRNFMQLIHDDSLTFKEDIQKAQVSGQGDSLHEHIANLAGSPAIKKGILQTVKVVDELVKVMGRHKPENIVIEMARENQTTQKGQKNSRERMKRIEEGIKELGSQILKEHPVENTQLQNEKLYLYYLQNGRDMYVDQELDINRLSDYDVDHIVPQSFLKDDSIDNKVLTRSDKARGKSDNVPSEEVVKKMKNYWRQLLNAKLITQRKFDNLTKAERGGLSELDKAGFIKRQLVETRQITKHVAQILDSRMNTKYDENDKLIREVKVITLKSKLVSDFRKDFQFYKVREINNYHHAHDAYLNAVVGTALIKKYPKLESEFVYGDYKVYDVRKMIAKSEQEIGKATAKYFFYSNIMNFFKTEITLANGEIRKRPLIETNGETGEIVWDKGRDFATVRKVLSMPQVNIVKKTEVQTGGFSKESILPKRNSDKLIARKKDWDPKKYGGFDSPTVAYSVLVVAKVEKGKSKKLKSVKELLGITIMERSSFEKNPIDFLEAKGYKEVKKDLIIKLPKYSLFELENGRKRMLASAGELQKGNELALPSKYVNFLYLASHYEKLKGSPEDNEQKQLFVEQHKHYLDEIIEQISEFSKRVILADANLDKVLSAYNKHRDKPIREQAENIIHLFTLTNLGAPAAFKYFDTTIDRKRYTSTKEVLDATLIHQSITGLYETRIDLSQLGGDGGGGGGSEAAAKGGGGSGGSCQTKNTLNIDEYLLQFPDQLWASLPTDIGRMLVPPITIKIKDNASLPSIRQYPLPKDKTEGLRPLISSLENQGILIKCHSPCNTPIFPIKKAGRDEYRMIHDLRAINNIVAPLTAVVASPTTVLSNLAPSLHWFTVIDLSNAFFSVPIHKDSQYLFAFTFEGHQYTWTVLPQGFIHSPTLFNQALYQSLHKIKFKISSEICIYMDDVLIASKDRDTNLKDTAVMLQHLASEGHKVSKKKLQLCQQEVVYLGQLLTPEGRKILPDRKVTVSQFQQPTTIRQIRAFLGLVGYCRHWIPEFSIHSKFLEKQLKPDTAEPFQLDDQQVEAFNKLKHAITTAPVLVVPDPAKPFQLYTSHSEHASIAVLTQKHAGRTRPIAFLSSKFDAIESGLPPCLKACASIHRSLTQADSFILGAPLIIYTTHAICTLLQRDRSQLVTASRFSKWEADLLRPELTFVACSAVSPAHLYMQSCENNIPPHDCVLLTHTISRPRPDLSDLPIPDPDMTLFSDGSYTTGRGGAAVVMHRPVTDDFIIIHQQPGGASAQTAELLALAAACHLATDKTVNIYTDSRYAYGVVHDFGHLWMHRGFVTSAGTPIKNHKEIEYLLKQIMKPKQVSVIKIEAHTKGVSMEVRGNAAADEAAKNAVFLVQRAGKRTADGSEFEKRTADGSEFESPKKKAKVE

SEQ ID NO: 763 - protein, 2110 aa, synthetic construct
MPAAKRVKLDGGDKKYSIGLDIGTNSVGWAVITDEYKVPSKKFKVLGNTDRHSIKKNLIGALLFDSGETAEATRLKRTARRRYTRRKNRICYLQEIFSNEMAKVDDSFFHRLEESFLVEEDKKHERHPIFGNIVDEVAYHEKYPTIYHLRKKLVDSTDKADLRLIYLALAHMIKFRGHFLIEGDLNPDNSDVDKLFIQLVQTYNQLFEENPINASGVDAKAILSARLSKSRRLENLIAQLPGEKKNGLFGNLIALSLGLTPNFKSNFDLAEDAKLQLSKDTYDDDLDNLLAQIGDQYADLFLAAKNLSDAILLSDILRVNTEITKAPLSASMIKRYDEHHQDLTLLKALVRQQLPEKYKEIFFDQSKNGYAGYIDGGASQEEFYKFIKPILEKMDGTEELLVKLNREDLLRKQRTFDNGSIPHQIHLGELHAILRRQEDFYPFLKDNREKIEKILTFRIPYYVGPLARGNSRFAWMTRKSEETITPWNFEEVVDKGASAQSFIERMTNFDKNLPNEKVLPKHSLLYEYFTVYNELTKVKYVTEGMRKPAFLSGEQKKAIVDLLFKTNRKVTVKQLKEDYFKKIECFDSVEISGVEDRFNASLGTYHDLLKIIKDKDFLDNEENEDILEDIVLTLTLFEDREMIEERLKTYAHLFDDKVMKQLKRRRYTGWGRLSRKLINGIRDKQSGKTILDFLKSDGFANRNFMQLIHDDSLTFKEDIQKAQVSGQGDSLHEHIANLAGSPAIKKGILQTVKVVDELVKVMGRHKPENIVIEMARENQTTQKGQKNSRERMKRIEEGIKELGSQILKEHPVENTQLQNEKLYLYYLQNGRDMYVDQELDINRLSDYDVDHIVPQSFLKDDSIDNKVLTRSDKARGKSDNVPSEEVVKKMKNYWRQLLNAKLITQRKFDNLTKAERGGLSELDKAGFIKRQLVETRQITKHVAQILDSRMNTKYDENDKLIREVKVITLKSKLVSDFRKDFQFYKVREINNYHHAHDAYLNAVVGTALIKKYPKLESEFVYGDYKVYDVRKMIAKSEQEIGKATAKYFFYSNIMNFFKTEITLANGEIRKRPLIETNGETGEIVWDKGRDFATVRKVLSMPQVNIVKKTEVQTGGFSKESILPKRNSDKLIARKKDWDPKKYGGFDSPTVAYSVLVVAKVEKGKSKKLKSVKELLGITIMERSSFEKNPIDFLEAKGYKEVKKDLIIKLPKYSLFELENGRKRMLASAGELQKGNELALPSKYVNFLYLASHYEKLKGSPEDNEQKQLFVEQHKHYLDEIIEQISEFSKRVILADANLDKVLSAYNKHRDKPIREQAENIIHLFTLTNLGAPAAFKYFDTTIDRKRYTSTKEVLDATLIHQSITGLYETRIDLSQLGGDGGAEAAAKEAAAKEAAAKEAAAKALEAEAAAKEAAAKEAAAKEAAAKAGGSCQTKNTLNIDEYLLQFPDQLWASLPTDIGRMLVPPITIKIKDNASLPSIRQYPLPKDKTEGLRPLISSLENQGILIKCHSPCNTPIFPIKKAGRDEYRMIHDLRAINNIVAPLTAVVASPTTVLSNLAPSLHWFTVIDLSNAFFSVPIHKDSQYLFAFTFEGHQYTWTVLPQGFIHSPTLFNQALYQSLHKIKFKISSEICIYMDDVLIASKDRDTNLKDTAVMLQHLASEGHKVSKKKLQLCQQEVVYLGQLLTPEGRKILPDRKVTVSQFQQPTTIRQIRAFLGLVGYCRHWIPEFSIHSKFLEKQLKPDTAEPFQLDDQQVEAFNKLKHAITTAPVLVVPDPAKPFQLYTSHSEHASIAVLTQKHAGRTRPIAFLSSKFDAIESGLPPCLKACASIHRSLTQADSFILGAPLIIYTTHAICTLLQRDRSQLVTASRFSKWEADLLRPELTFVACSAVSPAHLYMQSCENNIPPHDCVLLTHTISRPRPDLSDLPIPDPDMTLFSDGSYTTGRGGAAVVMHRPVTDDFIIIHQQPGGASAQTAELLALAAACHLATDKTVNIYTDSRYAYGVVHDFGHLWMHRGFVTSAGTPIKNHKEIEYLLKQIMKPKQVSVIKIEAHTKGVSMEVRGNAAADEAAKNAVFLVQRAGKRTADGSEFEKRTADGSEFESPKKKAKVE

SEQ ID NO: 764 - protein, 2073 aa, synthetic construct
MPAAKRVKLDGGDKKYSIGLDIGTNSVGWAVITDEYKVPSKKFKVLGNTDRHSIKKNLIGALLFDSGETAEATRLKRTARRRYTRRKNRICYLQEIFSNEMAKVDDSFFHRLEESFLVEEDKKHERHPIFGNIVDEVAYHEKYPTIYHLRKKLVDSTDKADLRLIYLALAHMIKFRGHFLIEGDLNPDNSDVDKLFIQLVQTYNQLFEENPINASGVDAKAILSARLSKSRRLENLIAQLPGEKKNGLFGNLIALSLGLTPNFKSNFDLAEDAKLQLSKDTYDDDLDNLLAQIGDQYADLFLAAKNLSDAILLSDILRVNTEITKAPLSASMIKRYDEHHQDLTLLKALVRQQLPEKYKEIFFDQSKNGYAGYIDGGASQEEFYKFIKPILEKMDGTEELLVKLNREDLLRKQRTFDNGSIPHQIHLGELHAILRRQEDFYPFLKDNREKIEKILTFRIPYYVGPLARGNSRFAWMTRKSEETITPWNFEEVVDKGASAQSFIERMTNFDKNLPNEKVLPKHSLLYEYFTVYNELTKVKYVTEGMRKPAFLSGEQKKAIVDLLFKTNRKVTVKQLKEDYFKKIECFDSVEISGVEDRFNASLGTYHDLLKIIKDKDFLDNEENEDILEDIVLTLTLFEDREMIEERLKTYAHLFDDKVMKQLKRRRYTGWGRLSRKLINGIRDKQSGKTILDFLKSDGFANRNFMQLIHDDSLTFKEDIQKAQVSGQGDSLHEHIANLAGSPAIKKGILQTVKVVDELVKVMGRHKPENIVIEMARENQTTQKGQKNSRERMKRIEEGIKELGSQILKEHPVENTQLQNEKLYLYYLQNGRDMYVDQELDINRLSDYDVDHIVPQSFLKDDSIDNKVLTRSDKARGKSDNVPSEEVVKKMKNYWRQLLNAKLITQRKFDNLTKAERGGLSELDKAGFIKRQLVETRQITKHVAQILDSRMNTKYDENDKLIREVKVITLKSKLVSDFRKDFQFYKVREINNYHHAHDAYLNAVVGTALIKKYPKLESEFVYGDYKVYDVRKMIAKSEQEIGKATAKYFFYSNIMNFFKTEITLANGEIRKRPLIETNGETGEIVWDKGRDFATVRKVLSMPQVNIVKKTEVQTGGFSKESILPKRNSDKLIARKKDWDPKKYGGFDSPTVAYSVLVVAKVEKGKSKKLKSVKELLGITIMERSSFEKNPIDFLEAKGYKEVKKDLIIKLPKYSLFELENGRKRMLASAGELQKGNELALPSKYVNFLYLASHYEKLKGSPEDNEQKQLFVEQHKHYLDEIIEQISEFSKRVILADANLDKVLSAYNKHRDKPIREQAENIIHLFTLTNLGAPAAFKYFDTTIDRKRYTSTKEVLDATLIHQSITGLYETRIDLSQLGGDGGGSSGGSGGGGGSCQTKNTLNIDEYLLQFPDQLWASLPTDIGRMLVPPITIKIKDNASLPSIRQYPLPKDKTEGLRPLISSLENQGILIKCHSPCNTPIFPIKKAGRDEYRMIHDLRAINNIVAPLTAVVASPTTVLSNLAPSLHWFTVIDLSNAFFSVPIHKDSQYLFAFTFEGHQYTWTVLPQGFIHSPTLFNQALYQSLHKIKFKISSEICIYMDDVLIASKDRDTNLKDTAVMLQHLASEGHKVSKKKLQLCQQEVVYLGQLLTPEGRKILPDRKVTVSQFQQPTTIRQIRAFLGLVGYCRHWIPEFSIHSKFLEKQLKPDTAEPFQLDDQQVEAFNKLKHAITTAPVLVVPDPAKPFQLYTSHSEHASIAVLTQKHAGRTRPIAFLSSKFDAIESGLPPCLKACASIHRSLTQADSFILGAPLIIYTTHAICTLLQRDRSQLVTASRFSKWEADLLRPELTFVACSAVSPAHLYMQSCENNIPPHDCVLLTHTISRPRPDLSDLPIPDPDMTLFSDGSYTTGRGGAAVVMHRPVTDDFIIIHQQPGGASAQTAELLALAAACHLATDKTVNIYTDSRYAYGVVHDFGHLWMHRGFVTSAGTPIKNHKEIEYLLKQIMKPKQVSVIKIEAHTKGVSMEVRGNAAADEAAKNAVFLVQRAGKRTADGSEFEKRTADGSEFESPKKKAKVE

SEQ ID NO: 765 - protein, 2087 aa, synthetic construct
MPAAKRVKLDGGDKKYSIGLDIGTNSVGWAVITDEYKVPSKKFKVLGNTDRHSIKKNLIGALLFDSGETAEATRLKRTARRRYTRRKNRICYLQEIFSNEMAKVDDSFFHRLEESFLVEEDKKHERHPIFGNIVDEVAYHEKYPTIYHLRKKLVDSTDKADLRLIYLALAHMIKFRGHFLIEGDLNPDNSDVDKLFIQLVQTYNQLFEENPINASGVDAKAILSARLSKSRRLENLIAQLPGEKKNGLFGNLIALSLGLTPNFKSNFDLAEDAKLQLSKDTYDDDLDNLLAQIGDQYADLFLAAKNLSDAILLSDILRVNTEITKAPLSASMIKRYDEHHQDLTLLKALVRQQLPEKYKEIFFDQSKNGYAGYIDGGASQEEFYKFIKPILEKMDGTEELLVKLNREDLLRKQRTFDNGSIPHQIHLGELHAILRRQEDFYPFLKDNREKIEKILTFRIPYYVGPLARGNSRFAWMTRKSEETITPWNFEEVVDKGASAQSFIERMTNFDKNLPNEKVLPKHSLLYEYFTVYNELTKVKYVTEGMRKPAFLSGEQKKAIVDLLFKTNRKVTVKQLKEDYFKKIECFDSVEISGVEDRFNASLGTYHDLLKIIKDKDFLDNEENEDILEDIVLTLTLFEDREMIEERLKTYAHLFDDKVMKQLKRRRYTGWGRLSRKLINGIRDKQSGKTILDFLKSDGFANRNFMQLIHDDSLTFKEDIQKAQVSGQGDSLHEHIANLAGSPAIKKGILQTVKVVDELVKVMGRHKPENIVIEMARENQTTQKGQKNSRERMKRIEEGIKELGSQILKEHPVENTQLQNEKLYLYYLQNGRDMYVDQELDINRLSDYDVDHIVPQSFLKDDSIDNKVLTRSDKARGKSDNVPSEEVVKKMKNYWRQLLNAKLITQRKFDNLTKAERGGLSELDKAGFIKRQLVETRQITKHVAQILDSRMNTKYDENDKLIREVKVITLKSKLVSDFRKDFQFYKVREINNYHHAHDAYLNAVVGTALIKKYPKLESEFVYGDYKVYDVRKMIAKSEQEIGKATAKYFFYSNIMNFFKTEITLANGEIRKRPLIETNGETGEIVWDKGRDFATVRKVLSMPQVNIVKKTEVQTGGFSKESILPKRNSDKLIARKKDWDPKKYGGFDSPTVAYSVLVVAKVEKGKSKKLKSVKELLGITIMERSSFEKNPIDFLEAKGYKEVKKDLIIKLPKYSLFELENGRKRMLASAGELQKGNELALPSKYVNFLYLASHYEKLKGSPEDNEQKQLFVEQHKHYLDEIIEQISEFSKRVILADANLDKVLSAYNKHRDKPIREQAENIIHLFTLTNLGAPAAFKYFDTTIDRKRYTSTKEVLDATLIHQSITGLYETRIDLSQLGGDGGEAAAKGGSPAPGGVPWILKKPLELTIKLDLEEQQGTLLNNSILSKKGKEELKQLFEKYSALWQSWENQVGHRRIRPHKIATGTVKPTPQKQYHINPKAKPDIQIVINDLLKQGVLIQKESTMNTPVYPVPKPNGRWRMVLDYRAVNKVTPLIAVQNQHSYGILGSLFKGRYKTTIDLSNGFWAHPIVPEDYWITAFTWQGKQYCWTVLPQGFLNSPGLFTGDVVDLLQGIPNVEVYVDDVYISHDSEKEHLEYLDILFNRLKEAGYIISLKKSNIANSIVDFLGFQITNEGRGLTDTFKEKLENITAPTTLKQLQSILGLLNFARNFIPDFTELIAPLYALIPKSTKNYVPWQIEHSTTLETLITKLNGAEYLQGRKGDKTLIMKVNASYTTGYIRYYNEGEKKPISYVSIVFSKTELKFTELEKLLTTVHKGLLKALDLSMGQNIHVYSPIVSMQNIQKTPQTAKKALASRWLSWLSYLEDPRIRFFYDPQMPALKDLPAVDTGKDNKKHPSNFQHIFYTDGSAITSPTKEGHLNAGMGIVYFINKDGNLQKQQEWSISLGNHTAQFAEIAAFEFALKKCLPLGGNILVVTDSNYVAKAYNEELDVWASNGFVNNRKKPLKHISKWKSVADLKRLRPDVVVTHEPGHQKLDSSPHAYGNNLADQLATQASFKVHAGKRTADGSEFEKRTADGSEFESPKKKAKVE

SEQ ID NO: 766 - protein, 2085 aa, synthetic construct
MPAAKRVKLDGGDKKYSIGLDIGTNSVGWAVITDEYKVPSKKFKVLGNTDRHSIKKNLIGALLFDSGETAEATRLKRTARRRYTRRKNRICYLQEIFSNEMAKVDDSFFHRLEESFLVEEDKKHERHPIFGNIVDEVAYHEKYPTIYHLRKKLVDSTDKADLRLIYLALAHMIKFRGHFLIEGDLNPDNSDVDKLFIQLVQTYNQLFEENPINASGVDAKAILSARLSKSRRLENLIAQLPGEKKNGLFGNLIALSLGLTPNFKSNFDLAEDAKLQLSKDTYDDDLDNLLAQIGDQYADLFLAAKNLSDAILLSDILRVNTEITKAPLSASMIKRYDEHHQDLTLLKALVRQQLPEKYKEIFFDQSKNGYAGYIDGGASQEEFYKFIKPILEKMDGTEELLVKLNREDLLRKQRTFDNGSIPHQIHLGELHAILRRQEDFYPFLKDNREKIEKILTFRIPYYVGPLARGNSRFAWMTRKSEETITPWNFEEVVDKGASAQSFIERMTNFDKNLPNEKVLPKHSLLYEYFTVYNELTKVKYVTEGMRKPAFLSGEQKKAIVDLLFKTNRKVTVKQLKEDYFKKIECFDSVEISGVEDRFNASLGTYHDLLKIIKDKDFLDNEENEDILEDIVLTLTLFEDREMIEERLKTYAHLFDDKVMKQLKRRRYTGWGRLSRKLINGIRDKQSGKTILDFLKSDGFANRNFMQLIHDDSLTFKEDIQKAQVSGQGDSLHEHIANLAGSPAIKKGILQTVKVVDELVKVMGRHKPENIVIEMARENQTTQKGQKNSRERMKRIEEGIKELGSQILKEHPVENTQLQNEKLYLYYLQNGRDMYVDQELDINRLSDYDVDHIVPQSFLKDDSIDNKVLTRSDKARGKSDNVPSEEVVKKMKNYWRQLLNAKLITQRKFDNLTKAERGGLSELDKAGFIKRQLVETRQITKHVAQILDSRMNTKYDENDKLIREVKVITLKSKLVSDFRKDFQFYKVREINNYHHAHDAYLNAVVGTALIKKYPKLESEFVYGDYKVYDVRKMIAKSEQEIGKATAKYFFYSNIMNFFKTEITLANGEIRKRPLIETNGETGEIVWDKGRDFATVRKVLSMPQVNIVKKTEVQTGGFSKESILPKRNSDKLIARKKDWDPKKYGGFDSPTVAYSVLVVAKVEKGKSKKLKSVKELLGITIMERSSFEKNPIDFLEAKGYKEVKKDLIIKLPKYSLFELENGRKRMLASAGELQKGNELALPSKYVNFLYLASHYEKLKGSPEDNEQKQLFVEQHKHYLDEIIEQISEFSKRVILADANLDKVLSAYNKHRDKPIREQAENIIHLFTLTNLGAPAAFKYFDTTIDRKRYTSTKEVLDATLIHQSITGLYETRIDLSQLGGDGGGSSGGGGGSGGVPWILKKPLELTIKLDLEEQQGTLLNNSILSKKGKEELKQLFEKYSALWQSWENQVGHRRIRPHKIATGTVKPTPQKQYHINPKAKPDIQIVINDLLKQGVLIQKESTMNTPVYPVPKPNGRWRMVLDYRAVNKVTPLIAVQNQHSYGILGSLFKGRYKTTIDLSNGFWAHPIVPEDYWITAFTWQGKQYCWTVLPQGFLNSPGLFTGDVVDLLQGIPNVEVYVDDVYISHDSEKEHLEYLDILFNRLKEAGYIISLKKSNIANSIVDFLGFQITNEGRGLTDTFKEKLENITAPTTLKQLQSILGLLNFARNFIPDFTELIAPLYALIPKSTKNYVPWQIEHSTTLETLITKLNGAEYLQGRKGDKTLIMKVNASYTTGYIRYYNEGEKKPISYVSIVFSKTELKFTELEKLLTTVHKGLLKALDLSMGQNIHVYSPIVSMQNIQKTPQTAKKALASRWLSWLSYLEDPRIRFFYDPQMPALKDLPAVDTGKDNKKHPSNFQHIFYTDGSAITSPTKEGHLNAGMGIVYFINKDGNLQKQQEWSISLGNHTAQFAEIAAFEFALKKCLPLGGNILVVTDSNYVAKAYNEELDVWASNGFVNNRKKPLKHISKWKSVADLKRLRPDVVVTHEPGHQKLDSSPHAYGNNLADQLATQASFKVHAGKRTADGSEFEKRTADGSEFESPKKKAKVE

SEQ ID NO: 767 - protein, 2087 aa, synthetic construct
MPAAKRVKLDGGDKKYSIGLDIGTNSVGWAVITDEYKVPSKKFKVLGNTDRHSIKKNLIGALLFDSGETAEATRLKRTARRRYTRRKNRICYLQEIFSNEMAKVDDSFFHRLEESFLVEEDKKHERHPIFGNIVDEVAYHEKYPTIYHLRKKLVDSTDKADLRLIYLALAHMIKFRGHFLIEGDLNPDNSDVDKLFIQLVQTYNQLFEENPINASGVDAKAILSARLSKSRRLENLIAQLPGEKKNGLFGNLIALSLGLTPNFKSNFDLAEDAKLQLSKDTYDDDLDNLLAQIGDQYADLFLAAKNLSDAILLSDILRVNTEITKAPLSASMIKRYDEHHQDLTLLKALVRQQLPEKYKEIFFDQSKNGYAGYIDGGASQEEFYKFIKPILEKMDGTEELLVKLNREDLLRKQRTFDNGSIPHQIHLGELHAILRRQEDFYPFLKDNREKIEKILTFRIPYYVGPLARGNSRFAWMTRKSEETITPWNFEEVVDKGASAQSFIERMTNFDKNLPNEKVLPKHSLLYEYFTVYNELTKVKYVTEGMRKPAFLSGEQKKAIVDLLFKTNRKVTVKQLKEDYFKKIECFDSVEISGVEDRFNASLGTYHDLLKIIKDKDFLDNEENEDILEDIVLTLTLFEDREMIEERLKTYAHLFDDKVMKQLKRRRYTGWGRLSRKLINGIRDKQSGKTILDFLKSDGFANRNFMQLIHDDSLTFKEDIQKAQVSGQGDSLHEHIANLAGSPAIKKGILQTVKVVDELVKVMGRHKPENIVIEMARENQTTQKGQKNSRERMKRIEEGIKELGSQILKEHPVENTQLQNEKLYLYYLQNGRDMYVDQELDINRLSDYDVDHIVPQSFLKDDSIDNKVLTRSDKARGKSDNVPSEEVVKKMKNYWRQLLNAKLITQRKFDNLTKAERGGLSELDKAGFIKRQLVETRQITKHVAQILDSRMNTKYDENDKLIREVKVITLKSKLVSDFRKDFQFYKVREINNYHHAHDAYLNAVVGTALIKKYPKLESEFVYGDYKVYDVRKMIAKSEQEIGKATAKYFFYSNIMNFFKTEITLANGEIRKRPLIETNGETGEIVWDKGRDFATVRKVLSMPQVNIVKKTEVQTGGFSKESILPKRNSDKLIARKKDWDPKKYGGFDSPTVAYSVLVVAKVEKGKSKKLKSVKELLGITIMERSSFEKNPIDFLEAKGYKEVKKDLIIKLPKYSLFELENGRKRMLASAGELQKGNELALPSKYVNFLYLASHYEKLKGSPEDNEQKQLFVEQHKHYLDEIIEQISEFSKRVILADANLDKVLSAYNKHRDKPIREQAENIIHLFTLTNLGAPAAFKYFDTTIDRKRYTSTKEVLDATLIHQSITGLYETRIDLSQLGGDGGPAPEAAAKGSSGGVPWILKKPLELTIKLDLEEQQGTLLNNSILSKKGKEELKQLFEKYSALWQSWENQVGHRRIRPHKIATGTVKPTPQKQYHINPKAKPDIQIVINDLLKQGVLIQKESTMNTPVYPVPKPNGRWRMVLDYRAVNKVTPLIAVQNQHSYGILGSLFKGRYKTTIDLSNGFWAHPIVPEDYWITAFTWQGKQYCWTVLPQGFLNSPGLFTGDVVDLLQGIPNVEVYVDDVYISHDSEKEHLEYLDILFNRLKEAGYIISLKKSNIANSIVDFLGFQITNEGRGLTDTFKEKLENITAPTTLKQLQSILGLLNFARNFIPDFTELIAPLYALIPKSTKNYVPWQIEHSTTLETLITKLNGAEYLQGRKGDKTLIMKVNASYTTGYIRYYNEGEKKPISYVSIVFSKTELKFTELEKLLTTVHKGLLKALDLSMGQNIHVYSPIVSMQNIQKTPQTAKKALASRWLSWLSYLEDPRIRFFYDPQMPALKDLPAVDTGKDNKKHPSNFQHIFYTDGSAITSPTKEGHLNAGMGIVYFINKDGNLQKQQEWSISLGNHTAQFAEIAAFEFALKKCLPLGGNILVVTDSNYVAKAYNEELDVWASNGFVNNRKKPLKHISKWKSVADLKRLRPDVVVTHEPGHQKLDSSPHAYGNNLADQLATQASFKVHAGKRTADGSEFEKRTADGSEFESPKKKAKVE

SEQ ID NO: 768 - protein, 2091 aa, synthetic construct
MPAAKRVKLDGGDKKYSIGLDIGTNSVGWAVITDEYKVPSKKFKVLGNTDRHSIKKNLIGALLFDSGETAEATRLKRTARRRYTRRKNRICYLQEIFSNEMAKVDDSFFHRLEESFLVEEDKKHERHPIFGNIVDEVAYHEKYPTIYHLRKKLVDSTDKADLRLIYLALAHMIKFRGHFLIEGDLNPDNSDVDKLFIQLVQTYNQLFEENPINASGVDAKAILSARLSKSRRLENLIAQLPGEKKNGLFGNLIALSLGLTPNFKSNFDLAEDAKLQLSKDTYDDDLDNLLAQIGDQYADLFLAAKNLSDAILLSDILRVNTEITKAPLSASMIKRYDEHHQDLTLLKALVRQQLPEKYKEIFFDQSKNGYAGYIDGGASQEEFYKFIKPILEKMDGTEELLVKLNREDLLRKQRTFDNGSIPHQIHLGELHAILRRQEDFYPFLKDNREKIEKILTFRIPYYVGPLARGNSRFAWMTRKSEETITPWNFEEVVDKGASAQSFIERMTNFDKNLPNEKVLPKHSLLYEYFTVYNELTKVKYVTEGMRKPAFLSGEQKKAIVDLLFKTNRKVTVKQLKEDYFKKIECFDSVEISGVEDRFNASLGTYHDLLKIIKDKDFLDNEENEDILEDIVLTLTLFEDREMIEERLKTYAHLFDDKVMKQLKRRRYTGWGRLSRKLINGIRDKQSGKTILDFLKSDGFANRNFMQLIHDDSLTFKEDIQKAQVSGQGDSLHEHIANLAGSPAIKKGILQTVKVVDELVKVMGRHKPENIVIEMARENQTTQKGQKNSRERMKRIEEGIKELGSQILKEHPVENTQLQNEKLYLYYLQNGRDMYVDQELDINRLSDYDVDHIVPQSFLKDDSIDNKVLTRSDKARGKSDNVPSEEVVKKMKNYWRQLLNAKLITQRKFDNLTKAERGGLSELDKAGFIKRQLVETRQITKHVAQILDSRMNTKYDENDKLIREVKVITLKSKLVSDFRKDFQFYKVREINNYHHAHDAYLNAVVGTALIKKYPKLESEFVYGDYKVYDVRKMIAKSEQEIGKATAKYFFYSNIMNFFKTEITLANGEIRKRPLIETNGETGEIVWDKGRDFATVRKVLSMPQVNIVKKTEVQTGGFSKESILPKRNSDKLIARKKDWDPKKYGGFDSPTVAYSVLVVAKVEKGKSKKLKSVKELLGITIMERSSFEKNPIDFLEAKGYKEVKKDLIIKLPKYSLFELENGRKRMLASAGELQKGNELALPSKYVNFLYLASHYEKLKGSPEDNEQKQLFVEQHKHYLDEIIEQISEFSKRVILADANLDKVLSAYNKHRDKPIREQAENIIHLFTLTNLGAPAAFKYFDTTIDRKRYTSTKEVLDATLIHQSITGLYETRIDLSQLGGDGGGGGGSEAAAKGGGGSGGVPWILKKPLELTIKLDLEEQQGTLLNNSILSKKGKEELKQLFEKYSALWQSWENQVGHRRIRPHKIATGTVKPTPQKQYHINPKAKPDIQIVINDLLKQGVLIQKESTMNTPVYPVPKPNGRWRMVLDYRAVNKVTPLIAVQNQHSYGILGSLFKGRYKTTIDLSNGFWAHPIVPEDYWITAFTWQGKQYCWTVLPQGFLNSPGLFTGDVVDLLQGIPNVEVYVDDVYISHDSEKEHLEYLDILFNRLKEAGYIISLKKSNIANSIVDFLGFQITNEGRGLTDTFKEKLENITAPTTLKQLQSILGLLNFARNFIPDFTELIAPLYALIPKSTKNYVPWQIEHSTTLETLITKLNGAEYLQGRKGDKTLIMKVNASYTTGYIRYYNEGEKKPISYVSIVFSKTELKFTELEKLLTTVHKGLLKALDLSMGQNIHVYSPIVSMQNIQKTPQTAKKALASRWLSWLSYLEDPRIRFFYDPQMPALKDLPAVDTGKDNKKHPSNFQHIFYTDGSAITSPTKEGHLNAGMGIVYFINKDGNLQKQQEWSISLGNHTAQFAEIAAFEFALKKCLPLGGNILVVTDSNYVAKAYNEELDVWASNGFVNNRKKPLKHISKWKSVADLKRLRPDVVVTHEPGHQKLDSSPHAYGNNLADQLATQASFKVHAGKRTADGSEFEKRTADGSEFESPKKKAKVE

SEQ ID NO: 769 - protein, 2087 aa, synthetic construct
MPAAKRVKLDGGDKKYSIGLDIGTNSVGWAVITDEYKVPSKKFKVLGNTDRHSIKKNLIGALLFDSGETAEATRLKRTARRRYTRRKNRICYLQEIFSNEMAKVDDSFFHRLEESFLVEEDKKHERHPIFGNIVDEVAYHEKYPTIYHLRKKLVDSTDKADLRLIYLALAHMIKFRGHFLIEGDLNPDNSDVDKLFIQLVQTYNQLFEENPINASGVDAKAILSARLSKSRRLENLIAQLPGEKKNGLFGNLIALSLGLTPNFKSNFDLAEDAKLQLSKDTYDDDLDNLLAQIGDQYADLFLAAKNLSDAILLSDILRVNTEITKAPLSASMIKRYDEHHQDLTLLKALVRQQLPEKYKEIFFDQSKNGYAGYIDGGASQEEFYKFIKPILEKMDGTEELLVKLNREDLLRKQRTFDNGSIPHQIHLGELHAILRRQEDFYPFLKDNREKIEKILTFRIPYYVGPLARGNSRFAWMTRKSEETITPWNFEEVVDKGASAQSFIERMTNFDKNLPNEKVLPKHSLLYEYFTVYNELTKVKYVTEGMRKPAFLSGEQKKAIVDLLFKTNRKVTVKQLKEDYFKKIECFDSVEISGVEDRFNASLGTYHDLLKIIKDKDFLDNEENEDILEDIVLTLTLFEDREMIEERLKTYAHLFDDKVMKQLKRRRYTGWGRLSRKLINGIRDKQSGKTILDFLKSDGFANRNFMQLIHDDSLTFKEDIQKAQVSGQGDSLHEHIANLAGSPAIKKGILQTVKVVDELVKVMGRHKPENIVIEMARENQTTQKGQKNSRERMKRIEEGIKELGSQILKEHPVENTQLQNEKLYLYYLQNGRDMYVDQELDINRLSDYDVDHIVPQSFLKDDSIDNKVLTRSDKARGKSDNVPSEEVVKKMKNYWRQLLNAKLITQRKFDNLTKAERGGLSELDKAGFIKRQLVETRQITKHVAQILDSRMNTKYDENDKLIREVKVITLKSKLVSDFRKDFQFYKVREINNYHHAHDAYLNAVVGTALIKKYPKLESEFVYGDYKVYDVRKMIAKSEQEIGKATAKYFFYSNIMNFFKTEITLANGEIRKRPLIETNGETGEIVWDKGRDFATVRKVLSMPQVNIVKKTEVQTGGFSKESILPKRNSDKLIARKKDWDPKKYGGFDSPTVAYSVLVVAKVEKGKSKKLKSVKELLGITIMERSSFEKNPIDFLEAKGYKEVKKDLIIKLPKYSLFELENGRKRMLASAGELQKGNELALPSKYVNFLYLASHYEKLKGSPEDNEQKQLFVEQHKHYLDEIIEQISEFSKRVILADANLDKVLSAYNKHRDKPIREQAENIIHLFTLTNLGAPAAFKYFDTTIDRKRYTSTKEVLDATLIHQSITGLYETRIDLSQLGGDGGGGGGSSEAAAKGGVPWILKKPLELTIKLDLEEQQGTLLNNSILSKKGKEELKQLFEKYSALWQSWENQVGHRRIRPHKIATGTVKPTPQKQYHINPKAKPDIQIVINDLLKQGVLIQKESTMNTPVYPVPKPNGRWRMVLDYRAVNKVTPLIAVQNQHSYGILGSLFKGRYKTTIDLSNGFWAHPIVPEDYWITAFTWQGKQYCWTVLPQGFLNSPGLFTGDVVDLLQGIPNVEVYVDDVYISHDSEKEHLEYLDILFNRLKEAGYIISLKKSNIANSIVDFLGFQITNEGRGLTDTFKEKLENITAPTTLKQLQSILGLLNFARNFIPDFTELIAPLYALIPKSTKNYVPWQIEHSTTLETLITKLNGAEYLQGRKGDKTLIMKVNASYTTGYIRYYNEGEKKPISYVSIVFSKTELKFTELEKLLTTVHKGLLKALDLSMGQNIHVYSPIVSMQNIQKTPQTAKKALASRWLSWLSYLEDPRIRFFYDPQMPALKDLPAVDTGKDNKKHPSNFQHIFYTDGSAITSPTKEGHLNAGMGIVYFINKDGNLQKQQEWSISLGNHTAQFAEIAAFEFALKKCLPLGGNILVVTDSNYVAKAYNEELDVWASNGFVNNRKKPLKHISKWKSVADLKRLRPDVVVTHEPGHQKLDSSPHAYGNNLADQLATQASFKVHAGKRTADGSEFEKRTADGSEFESPKKKAKVE

SEQ ID NO: 770 - protein, 2087 aa, synthetic construct
MPAAKRVKLDGGDKKYSIGLDIGTNSVGWAVITDEYKVPSKKFKVLGNTDRHSIKKNLIGALLFDSGETAEATRLKRTARRRYTRRKNRICYLQEIFSNEMAKVDDSFFHRLEESFLVEEDKKHERHPIFGNIVDEVAYHEKYPTIYHLRKKLVDSTDKADLRLIYLALAHMIKFRGHFLIEGDLNPDNSDVDKLFIQLVQTYNQLFEENPINASGVDAKAILSARLSKSRRLENLIAQLPGEKKNGLFGNLIALSLGLTPNFKSNFDLAEDAKLQLSKDTYDDDLDNLLAQIGDQYADLFLAAKNLSDAILLSDILRVNTEITKAPLSASMIKRYDEHHQDLTLLKALVRQQLPEKYKEIFFDQSKNGYAGYIDGGASQEEFYKFIKPILEKMDGTEELLVKLNREDLLRKQRTFDNGSIPHQIHLGELHAILRRQEDFYPFLKDNREKIEKILTFRIPYYVGPLARGNSRFAWMTRKSEETITPWNFEEVVDKGASAQSFIERMTNFDKNLPNEKVLPKHSLLYEYFTVYNELTKVKYVTEGMRKPAFLSGEQKKAIVDLLFKTNRKVTVKQLKEDYFKKIECFDSVEISGVEDRFNASLGTYHDLLKIIKDKDFLDNEENEDILEDIVLTLTLFEDREMIEERLKTYAHLFDDKVMKQLKRRRYTGWGRLSRKLINGIRDKQSGKTILDFLKSDGFANRNFMQLIHDDSLTFKEDIQKAQVSGQGDSLHEHIANLAGSPAIKKGILQTVKVVDELVKVMGRHKPENIVIEMARENQTTQKGQKNSRERMKRIEEGIKELGSQILKEHPVENTQLQNEKLYLYYLQNGRDMYVDQELDINRLSDYDVDHIVPQSFLKDDSIDNKVLTRSDKARGKSDNVPSEEVVKKMKNYWRQLLNAKLITQRKFDNLTKAERGGLSELDKAGFIKRQLVETRQITKHVAQILDSRMNTKYDENDKLIREVKVITLKSKLVSDFRKDFQFYKVREINNYHHAHDAYLNAVVGTALIKKYPKLESEFVYGDYKVYDVRKMIAKSEQEIGKATAKYFFYSNIMNFFKTEITLANGEIRKRPLIETNGETGEIVWDKGRDFATVRKVLSMPQVNIVKKTEVQTGGFSKESILPKRNSDKLIARKKDWDPKKYGGFDSPTVAYSVLVVAKVEKGKSKKLKSVKELLGITIMERSSFEKNPIDFLEAKGYKEVKKDLIIKLPKYSLFELENGRKRMLASAGELQKGNELALPSKYVNFLYLASHYEKLKGSPEDNEQKQLFVEQHKHYLDEIIEQISEFSKRVILADANLDKVLSAYNKHRDKPIREQAENIIHLFTLTNLGAPAAFKYFDTTIDRKRYTSTKEVLDATLIHQSITGLYETRIDLSQLGGDGGGGGEAAAKGSSGGVPWILKKPLELTIKLDLEEQQGTLLNNSILSKKGKEELKQLFEKYSALWQSWENQVGHRRIRPHKIATGTVKPTPQKQYHINPKAKPDIQIVINDLLKQGVLIQKESTMNTPVYPVPKPNGRWRMVLDYRAVNKVTPLIAVQNQHSYGILGSLFKGRYKTTIDLSNGFWAHPIVPEDYWITAFTWQGKQYCWTVLPQGFLNSPGLFTGDVVDLLQGIPNVEVYVDDVYISHDSEKEHLEYLDILFNRLKEAGYIISLKKSNIANSIVDFLGFQITNEGRGLTDTFKEKLENITAPTTLKQLQSILGLLNFARNFIPDFTELIAPLYALIPKSTKNYVPWQIEHSTTLETLITKLNGAEYLQGRKGDKTLIMKVNASYTTGYIRYYNEGEKKPISYVSIVFSKTELKFTELEKLLTTVHKGLLKALDLSMGQNIHVYSPIVSMQNIQKTPQTAKKALASRWLSWLSYLEDPRIRFFYDPQMPALKDLPAVDTGKDNKKHPSNFQHIFYTDGSAITSPTKEGHLNAGMGIVYFINKDGNLQKQQEWSISLGNHTAQFAEIAAFEFALKKCLPLGGNILVVTDSNYVAKAYNEELDVWASNGFVNNRKKPLKHISKWKSVADLKRLRPDVVVTHEPGHQKLDSSPHAYGNNLADQLATQASFKVHAGKRTADGSEFEKRTADGSEFESPKKKAKVE

SEQ ID NO: 771 - protein, 2082 aa, synthetic construct
MPAAKRVKLDGGDKKYSIGLDIGTNSVGWAVITDEYKVPSKKFKVLGNTDRHSIKKNLIGALLFDSGETAEATRLKRTARRRYTRRKNRICYLQEIFSNEMAKVDDSFFHRLEESFLVEEDKKHERHPIFGNIVDEVAYHEKYPTIYHLRKKLVDSTDKADLRLIYLALAHMIKFRGHFLIEGDLNPDNSDVDKLFIQLVQTYNQLFEENPINASGVDAKAILSARLSKSRRLENLIAQLPGEKKNGLFGNLIALSLGLTPNFKSNFDLAEDAKLQLSKDTYDDDLDNLLAQIGDQYADLFLAAKNLSDAILLSDILRVNTEITKAPLSASMIKRYDEHHQDLTLLKALVRQQLPEKYKEIFFDQSKNGYAGYIDGGASQEEFYKFIKPILEKMDGTEELLVKLNREDLLRKQRTFDNGSIPHQIHLGELHAILRRQEDFYPFLKDNREKIEKILTFRIPYYVGPLARGNSRFAWMTRKSEETITPWNFEEVVDKGASAQSFIERMTNFDKNLPNEKVLPKHSLLYEYFTVYNELTKVKYVTEGMRKPAFLSGEQKKAIVDLLFKTNRKVTVKQLKEDYFKKIECFDSVEISGVEDRFNASLGTYHDLLKIIKDKDFLDNEENEDILEDIVLTLTLFEDREMIEERLKTYAHLFDDKVMKQLKRRRYTGWGRLSRKLINGIRDKQSGKTILDFLKSDGFANRNFMQLIHDDSLTFKEDIQKAQVSGQGDSLHEHIANLAGSPAIKKGILQTVKVVDELVKVMGRHKPENIVIEMARENQTTQKGQKNSRERMKRIEEGIKELGSQILKEHPVENTQLQNEKLYLYYLQNGRDMYVDQELDINRLSDYDVDHIVPQSFLKDDSIDNKVLTRSDKARGKSDNVPSEEVVKKMKNYWRQLLNAKLITQRKFDNLTKAERGGLSELDKAGFIKRQLVETRQITKHVAQILDSRMNTKYDENDKLIREVKVITLKSKLVSDFRKDFQFYKVREINNYHHAHDAYLNAVVGTALIKKYPKLESEFVYGDYKVYDVRKMIAKSEQEIGKATAKYFFYSNIMNFFKTEITLANGEIRKRPLIETNGETGEIVWDKGRDFATVRKVLSMPQVNIVKKTEVQTGGFSKESILPKRNSDKLIARKKDWDPKKYGGFDSPTVAYSVLVVAKVEKGKSKKLKSVKELLGITIMERSSFEKNPIDFLEAKGYKEVKKDLIIKLPKYSLFELENGRKRMLASAGELQKGNELALPSKYVNFLYLASHYEKLKGSPEDNEQKQLFVEQHKHYLDEIIEQISEFSKRVILADANLDKVLSAYNKHRDKPIREQAENIIHLFTLTNLGAPAAFKYFDTTIDRKRYTSTKEVLDATLIHQSITGLYETRIDLSQLGGDGGGSSGGGGGVPWILKKPLELTIKLDLEEQQGTLLNNSILSKKGKEELKQLFEKYSALWQSWENQVGHRRIRPHKIATGTVKPTPQKQYHINPKAKPDIQIVINDLLKQGVLIQKESTMNTPVYPVPKPNGRWRMVLDYRAVNKVTPLIAVQNQHSYGILGSLFKGRYKTTIDLSNGFWAHPIVPEDYWITAFTWQGKQYCWTVLPQGFLNSPGLFTGDVVDLLQGIPNVEVYVDDVYISHDSEKEHLEYLDILFNRLKEAGYIISLKKSNIANSIVDFLGFQITNEGRGLTDTFKEKLENITAPTTLKQLQSILGLLNFARNFIPDFTELIAPLYALIPKSTKNYVPWQIEHSTTLETLITKLNGAEYLQGRKGDKTLIMKVNASYTTGYIRYYNEGEKKPISYVSIVFSKTELKFTELEKLLTTVHKGLLKALDLSMGQNIHVYSPIVSMQNIQKTPQTAKKALASRWLSWLSYLEDPRIRFFYDPQMPALKDLPAVDTGKDNKKHPSNFQHIFYTDGSAITSPTKEGHLNAGMGIVYFINKDGNLQKQQEWSISLGNHTAQFAEIAAFEFALKKCLPLGGNILVVTDSNYVAKAYNEELDVWASNGFVNNRKKPLKHISKWKSVADLKRLRPDVVVTHEPGHQKLDSSPHAYGNNLADQLATQASFKVHAGKRTADGSEFEKRTADGSEFESPKKKAKVE

SEQ ID NO: 772 - protein, 2087 aa, synthetic construct
MPAAKRVKLDGGDKKYSIGLDIGTNSVGWAVITDEYKVPSKKFKVLGNTDRHSIKKNLIGALLFDSGETAEATRLKRTARRRYTRRKNRICYLQEIFSNEMAKVDDSFFHRLEESFLVEEDKKHERHPIFGNIVDEVAYHEKYPTIYHLRKKLVDSTDKADLRLIYLALAHMIKFRGHFLIEGDLNPDNSDVDKLFIQLVQTYNQLFEENPINASGVDAKAILSARLSKSRRLENLIAQLPGEKKNGLFGNLIALSLGLTPNFKSNFDLAEDAKLQLSKDTYDDDLDNLLAQIGDQYADLFLAAKNLSDAILLSDILRVNTEITKAPLSASMIKRYDEHHQDLTLLKALVRQQLPEKYKEIFFDQSKNGYAGYIDGGASQEEFYKFIKPILEKMDGTEELLVKLNREDLLRKQRTFDNGSIPHQIHLGELHAILRRQEDFYPFLKDNREKIEKILTFRIPYYVGPLARGNSRFAWMTRKSEETITPWNFEEVVDKGASAQSFIERMTNFDKNLPNEKVLPKHSLLYEYFTVYNELTKVKYVTEGMRKPAFLSGEQKKAIVDLLFKTNRKVTVKQLKEDYFKKIECFDSVEISGVEDRFNASLGTYHDLLKIIKDKDFLDNEENEDILEDIVLTLTLFEDREMIEERLKTYAHLFDDKVMKQLKRRRYTGWGRLSRKLINGIRDKQSGKTILDFLKSDGFANRNFMQLIHDDSLTFKEDIQKAQVSGQGDSLHEHIANLAGSPAIKKGILQTVKVVDELVKVMGRHKPENIVIEMARENQTTQKGQKNSRERMKRIEEGIKELGSQILKEHPVENTQLQNEKLYLYYLQNGRDMYVDQELDINRLSDYDVDHIVPQSFLKDDSIDNKVLTRSDKARGKSDNVPSEEVVKKMKNYWRQLLNAKLITQRKFDNLTKAERGGLSELDKAGFIKRQLVETRQITKHVAQILDSRMNTKYDENDKLIREVKVITLKSKLVSDFRKDFQFYKVREINNYHHAHDAYLNAVVGTALIKKYPKLESEFVYGDYKVYDVRKMIAKSEQEIGKATAKYFFYSNIMNFFKTEITLANGEIRKRPLIETNGETGEIVWDKGRDFATVRKVLSMPQVNIVKKTEVQTGGFSKESILPKRNSDKLIARKKDWDPKKYGGFDSPTVAYSVLVVAKVEKGKSKKLKSVKELLGITIMERSSFEKNPIDFLEAKGYKEVKKDLIIKLPKYSLFELENGRKRMLASAGELQKGNELALPSKYVNFLYLASHYEKLKGSPEDNEQKQLFVEQHKHYLDEIIEQISEFSKRVILADANLDKVLSAYNKHRDKPIREQAENIIHLFTLTNLGAPAAFKYFDTTIDRKRYTSTKEVLDATLIHQSITGLYETRIDLSQLGGDGGEAAAKPAPGGSGGVPWILKKPLELTIKLDLEEQQGTLLNNSILSKKGKEELKQLFEKYSALWQSWENQVGHRRIRPHKIATGTVKPTPQKQYHINPKAKPDIQIVINDLLKQGVLIQKESTMNTPVYPVPKPNGRWRMVLDYRAVNKVTPLIAVQNQHSYGILGSLFKGRYKTTIDLSNGFWAHPIVPEDYWITAFTWQGKQYCWTVLPQGFLNSPGLFTGDVVDLLQGIPNVEVYVDDVYISHDSEKEHLEYLDILFNRLKEAGYIISLKKSNIANSIVDFLGFQITNEGRGLTDTFKEKLENITAPTTLKQLQSILGLLNFARNFIPDFTELIAPLYALIPKSTKNYVPWQIEHSTTLETLITKLNGAEYLQGRKGDKTLIMKVNASYTTGYIRYYNEGEKKPISYVSIVFSKTELKFTELEKLLTTVHKGLLKALDLSMGQNIHVYSPIVSMQNIQKTPQTAKKALASRWLSWLSYLEDPRIRFFYDPQMPALKDLPAVDTGKDNKKHPSNFQHIFYTDGSAITSPTKEGHLNAGMGIVYFINKDGNLQKQQEWSISLGNHTAQFAEIAAFEFALKKCLPLGGNILVVTDSNYVAKAYNEELDVWASNGFVNNRKKPLKHISKWKSVADLKRLRPDVVVTHEPGHQKLDSSPHAYGNNLADQLATQASFKVHAGKRTADGSEFEKRTADGSEFESPKKKAKVE

SEQ ID NO: 773 - protein, 2088 aa, synthetic construct
MPAAKRVKLDGGDKKYSIGLDIGTNSVGWAVITDEYKVPSKKFKVLGNTDRHSIKKNLIGALLFDSGETAEATRLKRTARRRYTRRKNRICYLQEIFSNEMAKVDDSFFHRLEESFLVEEDKKHERHPIFGNIVDEVAYHEKYPTIYHLRKKLVDSTDKADLRLIYLALAHMIKFRGHFLIEGDLNPDNSDVDKLFIQLVQTYNQLFEENPINASGVDAKAILSARLSKSRRLENLIAQLPGEKKNGLFGNLIALSLGLTPNFKSNFDLAEDAKLQLSKDTYDDDLDNLLAQIGDQYADLFLAAKNLSDAILLSDILRVNTEITKAPLSASMIKRYDEHHQDLTLLKALVRQQLPEKYKEIFFDQSKNGYAGYIDGGASQEEFYKFIKPILEKMDGTEELLVKLNREDLLRKQRTFDNGSIPHQIHLGELHAILRRQEDFYPFLKDNREKIEKILTFRIPYYVGPLARGNSRFAWMTRKSEETITPWNFEEVVDKGASAQSFIERMTNFDKNLPNEKVLPKHSLLYEYFTVYNELTKVKYVTEGMRKPAFLSGEQKKAIVDLLFKTNRKVTVKQLKEDYFKKIECFDSVEISGVEDRFNASLGTYHDLLKIIKDKDFLDNEENEDILEDIVLTLTLFEDREMIEERLKTYAHLFDDKVMKQLKRRRYTGWGRLSRKLINGIRDKQSGKTILDFLKSDGFANRNFMQLIHDDSLTFKEDIQKAQVSGQGDSLHEHIANLAGSPAIKKGILQTVKVVDELVKVMGRHKPENIVIEMARENQTTQKGQKNSRERMKRIEEGIKELGSQILKEHPVENTQLQNEKLYLYYLQNGRDMYVDQELDINRLSDYDVDHIVPQSFLKDDSIDNKVLTRSDKARGKSDNVPSEEVVKKMKNYWRQLLNAKLITQRKFDNLTKAERGGLSELDKAGFIKRQLVETRQITKHVAQILDSRMNTKYDENDKLIREVKVITLKSKLVSDFRKDFQFYKVREINNYHHAHDAYLNAVVGTALIKKYPKLESEFVYGDYKVYDVRKMIAKSEQEIGKATAKYFFYSNIMNFFKTEITLANGEIRKRPLIETNGETGEIVWDKGRDFATVRKVLSMPQVNIVKKTEVQTGGFSKESILPKRNSDKLIARKKDWDPKKYGGFDSPTVAYSVLVVAKVEKGKSKKLKSVKELLGITIMERSSFEKNPIDFLEAKGYKEVKKDLIIKLPKYSLFELENGRKRMLASAGELQKGNELALPSKYVNFLYLASHYEKLKGSPEDNEQKQLFVEQHKHYLDEIIEQISEFSKRVILADANLDKVLSAYNKHRDKPIREQAENIIHLFTLTNLGAPAAFKYFDTTIDRKRYTSTKEVLDATLIHQSITGLYETRIDLSQLGGDGGGSSGSSGSSGSSGGVPWILKKPLELTIKLDLEEQQGTLLNNSILSKKGKEELKQLFEKYSALWQSWENQVGHRRIRPHKIATGTVKPTPQKQYHINPKAKPDIQIVINDLLKQGVLIQKESTMNTPVYPVPKPNGRWRMVLDYRAVNKVTPLIAVQNQHSYGILGSLFKGRYKTTIDLSNGFWAHPIVPEDYWITAFTWQGKQYCWTVLPQGFLNSPGLFTGDVVDLLQGIPNVEVYVDDVYISHDSEKEHLEYLDILFNRLKEAGYIISLKKSNIANSIVDFLGFQITNEGRGLTDTFKEKLENITAPTTLKQLQSILGLLNFARNFIPDFTELIAPLYALIPKSTKNYVPWQIEHSTTLETLITKLNGAEYLQGRKGDKTLIMKVNASYTTGYIRYYNEGEKKPISYVSIVFSKTELKFTELEKLLTTVHKGLLKALDLSMGQNIHVYSPIVSMQNIQKTPQTAKKALASRWLSWLSYLEDPRIRFFYDPQMPALKDLPAVDTGKDNKKHPSNFQHIFYTDGSAITSPTKEGHLNAGMGIVYFINKDGNLQKQQEWSISLGNHTAQFAEIAAFEFALKKCLPLGGNILVVTDSNYVAKAYNEELDVWASNGFVNNRKKPLKHISKWKSVADLKRLRPDVVVTHEPGHQKLDSSPHAYGNNLADQLATQASFKVHAGKRTADGSEFEKRTADGSEFESPKKKAKVE

SEQ ID NO: 774 - protein, 2085 aa, synthetic construct
MPAAKRVKLDGGDKKYSIGLDIGTNSVGWAVITDEYKVPSKKFKVLGNTDRHSIKKNLIGALLFDSGETAEATRLKRTARRRYTRRKNRICYLQEIFSNEMAKVDDSFFHRLEESFLVEEDKKHERHPIFGNIVDEVAYHEKYPTIYHLRKKLVDSTDKADLRLIYLALAHMIKFRGHFLIEGDLNPDNSDVDKLFIQLVQTYNQLFEENPINASGVDAKAILSARLSKSRRLENLIAQLPGEKKNGLFGNLIALSLGLTPNFKSNFDLAEDAKLQLSKDTYDDDLDNLLAQIGDQYADLFLAAKNLSDAILLSDILRVNTEITKAPLSASMIKRYDEHHQDLTLLKALVRQQLPEKYKEIFFDQSKNGYAGYIDGGASQEEFYKFIKPILEKMDGTEELLVKLNREDLLRKQRTFDNGSIPHQIHLGELHAILRRQEDFYPFLKDNREKIEKILTFRIPYYVGPLARGNSRFAWMTRKSEETITPWNFEEVVDKGASAQSFIERMTNFDKNLPNEKVLPKHSLLYEYFTVYNELTKVKYVTEGMRKPAFLSGEQKKAIVDLLFKTNRKVTVKQLKEDYFKKIECFDSVEISGVEDRFNASLGTYHDLLKIIKDKDFLDNEENEDILEDIVLTLTLFEDREMIEERLKTYAHLFDDKVMKQLKRRRYTGWGRLSRKLINGIRDKQSGKTILDFLKSDGFANRNFMQLIHDDSLTFKEDIQKAQVSGQGDSLHEHIANLAGSPAIKKGILQTVKVVDELVKVMGRHKPENIVIEMARENQTTQKGQKNSRERMKRIEEGIKELGSQILKEHPVENTQLQNEKLYLYYLQNGRDMYVDQELDINRLSDYDVDHIVPQSFLKDDSIDNKVLTRSDKARGKSDNVPSEEVVKKMKNYWRQLLNAKLITQRKFDNLTKAERGGLSELDKAGFIKRQLVETRQITKHVAQILDSRMNTKYDENDKLIREVKVITLKSKLVSDFRKDFQFYKVREINNYHHAHDAYLNAVVGTALIKKYPKLESEFVYGDYKVYDVRKMIAKSEQEIGKATAKYFFYSNIMNFFKTEITLANGEIRKRPLIETNGETGEIVWDKGRDFATVRKVLSMPQVNIVKKTEVQTGGFSKESILPKRNSDKLIARKKDWDPKKYGGFDSPTVAYSVLVVAKVEKGKSKKLKSVKELLGITIMERSSFEKNPIDFLEAKGYKEVKKDLIIKLPKYSLFELENGRKRMLASAGELQKGNELALPSKYVNFLYLASHYEKLKGSPEDNEQKQLFVEQHKHYLDEIIEQISEFSKRVILADANLDKVLSAYNKHRDKPIREQAENIIHLFTLTNLGAPAAFKYFDTTIDRKRYTSTKEVLDATLIHQSITGLYETRIDLSQLGGDGGGGGGGSGSSGGVPWILKKPLELTIKLDLEEQQGTLLNNSILSKKGKEELKQLFEKYSALWQSWENQVGHRRIRPHKIATGTVKPTPQKQYHINPKAKPDIQIVINDLLKQGVLIQKESTMNTPVYPVPKPNGRWRMVLDYRAVNKVTPLIAVQNQHSYGILGSLFKGRYKTTIDLSNGFWAHPIVPEDYWITAFTWQGKQYCWTVLPQGFLNSPGLFTGDVVDLLQGIPNVEVYVDDVYISHDSEKEHLEYLDILFNRLKEAGYIISLKKSNIANSIVDFLGFQITNEGRGLTDTFKEKLENITAPTTLKQLQSILGLLNFARNFIPDFTELIAPLYALIPKSTKNYVPWQIEHSTTLETLITKLNGAEYLQGRKGDKTLIMKVNASYTTGYIRYYNEGEKKPISYVSIVFSKTELKFTELEKLLTTVHKGLLKALDLSMGQNIHVYSPIVSMQNIQKTPQTAKKALASRWLSWLSYLEDPRIRFFYDPQMPALKDLPAVDTGKDNKKHPSNFQHIFYTDGSAITSPTKEGHLNAGMGIVYFINKDGNLQKQQEWSISLGNHTAQFAEIAAFEFALKKCLPLGGNILVVTDSNYVAKAYNEELDVWASNGFVNNRKKPLKHISKWKSVADLKRLRPDVVVTHEPGHQKLDSSPHAYGNNLADQLATQASFKVHAGKRTADGSEFEKRTADGSEFESPKKKAKVE

SEQ ID NO: 775 - protein, 2085 aa, synthetic construct
MPAAKRVKLDGGDKKYSIGLDIGTNSVGWAVITDEYKVPSKKFKVLGNTDRHSIKKNLIGALLFDSGETAEATRLKRTARRRYTRRKNRICYLQEIFSNEMAKVDDSFFHRLEESFLVEEDKKHERHPIFGNIVDEVAYHEKYPTIYHLRKKLVDSTDKADLRLIYLALAHMIKFRGHFLIEGDLNPDNSDVDKLFIQLVQTYNQLFEENPINASGVDAKAILSARLSKSRRLENLIAQLPGEKKNGLFGNLIALSLGLTPNFKSNFDLAEDAKLQLSKDTYDDDLDNLLAQIGDQYADLFLAAKNLSDAILLSDILRVNTEITKAPLSASMIKRYDEHHQDLTLLKALVRQQLPEKYKEIFFDQSKNGYAGYIDGGASQEEFYKFIKPILEKMDGTEELLVKLNREDLLRKQRTFDNGSIPHQIHLGELHAILRRQEDFYPFLKDNREKIEKILTFRIPYYVGPLARGNSRFAWMTRKSEETITPWNFEEVVDKGASAQSFIERMTNFDKNLPNEKVLPKHSLLYEYFTVYNELTKVKYVTEGMRKPAFLSGEQKKAIVDLLFKTNRKVTVKQLKEDYFKKIECFDSVEISGVEDRFNASLGTYHDLLKIIKDKDFLDNEENEDILEDIVLTLTLFEDREMIEERLKTYAHLFDDKVMKQLKRRRYTGWGRLSRKLINGIRDKQSGKTILDFLKSDGFANRNFMQLIHDDSLTFKEDIQKAQVSGQGDSLHEHIANLAGSPAIKKGILQTVKVVDELVKVMGRHKPENIVIEMARENQTTQKGQKNSRERMKRIEEGIKELGSQILKEHPVENTQLQNEKLYLYYLQNGRDMYVDQELDINRLSDYDVDHIVPQSFLKDDSIDNKVLTRSDKARGKSDNVPSEEVVKKMKNYWRQLLNAKLITQRKFDNLTKAERGGLSELDKAGFIKRQLVETRQITKHVAQILDSRMNTKYDENDKLIREVKVITLKSKLVSDFRKDFQFYKVREINNYHHAHDAYLNAVVGTALIKKYPKLESEFVYGDYKVYDVRKMIAKSEQEIGKATAKYFFYSNIMNFFKTEITLANGEIRKRPLIETNGETGEIVWDKGRDFATVRKVLSMPQVNIVKKTEVQTGGFSKESILPKRNSDKLIARKKDWDPKKYGGFDSPTVAYSVLVVAKVEKGKSKKLKSVKELLGITIMERSSFEKNPIDFLEAKGYKEVKKDLIIKLPKYSLFELENGRKRMLASAGELQKGNELALPSKYVNFLYLASHYEKLKGSPEDNEQKQLFVEQHKHYLDEIIEQISEFSKRVILADANLDKVLSAYNKHRDKPIREQAENIIHLFTLTNLGAPAAFKYFDTTIDRKRYTSTKEVLDATLIHQSITGLYETRIDLSQLGGDGGGSSGGSPAPGGVPWILKKPLELTIKLDLEEQQGTLLNNSILSKKGKEELKQLFEKYSALWQSWENQVGHRRIRPHKIATGTVKPTPQKQYHINPKAKPDIQIVINDLLKQGVLIQKESTMNTPVYPVPKPNGRWRMVLDYRAVNKVTPLIAVQNQHSYGILGSLFKGRYKTTIDLSNGFWAHPIVPEDYWITAFTWQGKQYCWTVLPQGFLNSPGLFTGDVVDLLQGIPNVEVYVDDVYISHDSEKEHLEYLDILFNRLKEAGYIISLKKSNIANSIVDFLGFQITNEGRGLTDTFKEKLENITAPTTLKQLQSILGLLNFARNFIPDFTELIAPLYALIPKSTKNYVPWQIEHSTTLETLITKLNGAEYLQGRKGDKTLIMKVNASYTTGYIRYYNEGEKKPISYVSIVFSKTELKFTELEKLLTTVHKGLLKALDLSMGQNIHVYSPIVSMQNIQKTPQTAKKALASRWLSWLSYLEDPRIRFFYDPQMPALKDLPAVDTGKDNKKHPSNFQHIFYTDGSAITSPTKEGHLNAGMGIVYFINKDGNLQKQQEWSISLGNHTAQFAEIAAFEFALKKCLPLGGNILVVTDSNYVAKAYNEELDVWASNGFVNNRKKPLKHISKWKSVADLKRLRPDVVVTHEPGHQKLDSSPHAYGNNLADQLATQASFKVHAGKRTADGSEFEKRTADGSEFESPKKKAKVE

SEQ ID NO: 776 - protein, 2084 aa, synthetic construct
MPAAKRVKLDGGDKKYSIGLDIGTNSVGWAVITDEYKVPSKKFKVLGNTDRHSIKKNLIGALLFDSGETAEATRLKRTARRRYTRRKNRICYLQEIFSNEMAKVDDSFFHRLEESFLVEEDKKHERHPIFGNIVDEVAYHEKYPTIYHLRKKLVDSTDKADLRLIYLALAHMIKFRGHFLIEGDLNPDNSDVDKLFIQLVQTYNQLFEENPINASGVDAKAILSARLSKSRRLENLIAQLPGEKKNGLFGNLIALSLGLTPNFKSNFDLAEDAKLQLSKDTYDDDLDNLLAQIGDQYADLFLAAKNLSDAILLSDILRVNTEITKAPLSASMIKRYDEHHQDLTLLKALVRQQLPEKYKEIFFDQSKNGYAGYIDGGASQEEFYKFIKPILEKMDGTEELLVKLNREDLLRKQRTFDNGSIPHQIHLGELHAILRRQEDFYPFLKDNREKIEKILTFRIPYYVGPLARGNSRFAWMTRKSEETITPWNFEEVVDKGASAQSFIERMTNFDKNLPNEKVLPKHSLLYEYFTVYNELTKVKYVTEGMRKPAFLSGEQKKAIVDLLFKTNRKVTVKQLKEDYFKKIECFDSVEISGVEDRFNASLGTYHDLLKIIKDKDFLDNEENEDILEDIVLTLTLFEDREMIEERLKTYAHLFDDKVMKQLKRRRYTGWGRLSRKLINGIRDKQSGKTILDFLKSDGFANRNFMQLIHDDSLTFKEDIQKAQVSGQGDSLHEHIANLAGSPAIKKGILQTVKVVDELVKVMGRHKPENIVIEMARENQTTQKGQKNSRERMKRIEEGIKELGSQILKEHPVENTQLQNEKLYLYYLQNGRDMYVDQELDINRLSDYDVDHIVPQSFLKDDSIDNKVLTRSDKARGKSDNVPSEEVVKKMKNYWRQLLNAKLITQRKFDNLTKAERGGLSELDKAGFIKRQLVETRQITKHVAQILDSRMNTKYDENDKLIREVKVITLKSKLVSDFRKDFQFYKVREINNYHHAHDAYLNAVVGTALIKKYPKLESEFVYGDYKVYDVRKMIAKSEQEIGKATAKYFFYSNIMNFFKTEITLANGEIRKRPLIETNGETGEIVWDKGRDFATVRKVLSMPQVNIVKKTEVQTGGFSKESILPKRNSDKLIARKKDWDPKKYGGFDSPTVAYSVLVVAKVEKGKSKKLKSVKELLGITIMERSSFEKNPIDFLEAKGYKEVKKDLIIKLPKYSLFELENGRKRMLASAGELQKGNELALPSKYVNFLYLASHYEKLKGSPEDNEQKQLFVEQHKHYLDEIIEQISEFSKRVILADANLDKVLSAYNKHRDKPIREQAENIIHLFTLTNLGAPAAFKYFDTTIDRKRYTSTKEVLDATLIHQSITGLYETRIDLSQLGGDGGGGSEAAAKGGVPWILKKPLELTIKLDLEEQQGTLLNNSILSKKGKEELKQLFEKYSALWQSWENQVGHRRIRPHKIATGTVKPTPQKQYHINPKAKPDIQIVINDLLKQGVLIQKESTMNTPVYPVPKPNGRWRMVLDYRAVNKVTPLIAVQNQHSYGILGSLFKGRYKTTIDLSNGFWAHPIVPEDYWITAFTWQGKQYCWTVLPQGFLNSPGLFTGDVVDLLQGIPNVEVYVDDVYISHDSEKEHLEYLDILFNRLKEAGYIISLKKSNIANSIVDFLGFQITNEGRGLTDTFKEKLENITAPTTLKQLQSILGLLNFARNFIPDFTELIAPLYALIPKSTKNYVPWQIEHSTTLETLITKLNGAEYLQGRKGDKTLIMKVNASYTTGYIRYYNEGEKKPISYVSIVFSKTELKFTELEKLLTTVHKGLLKALDLSMGQNIHVYSPIVSMQNIQKTPQTAKKALASRWLSWLSYLEDPRIRFFYDPQMPALKDLPAVDTGKDNKKHPSNFQHIFYTDGSAITSPTKEGHLNAGMGIVYFINKDGNLQKQQEWSISLGNHTAQFAEIAAFEFALKKCLPLGGNILVVTDSNYVAKAYNEELDVWASNGFVNNRKKPLKHISKWKSVADLKRLRPDVVVTHEPGHQKLDSSPHAYGNNLADQLATQASFKVHAGKRTADGSEFEKRTADGSEFESPKKKAKVE

SEQ ID NO: 777 - protein, 2085 aa, synthetic construct
MPAAKRVKLDGGDKKYSIGLDIGTNSVGWAVITDEYKVPSKKFKVLGNTDRHSIKKNLIGALLFDSGETAEATRLKRTARRRYTRRKNRICYLQEIFSNEMAKVDDSFFHRLEESFLVEEDKKHERHPIFGNIVDEVAYHEKYPTIYHLRKKLVDSTDKADLRLIYLALAHMIKFRGHFLIEGDLNPDNSDVDKLFIQLVQTYNQLFEENPINASGVDAKAILSARLSKSRRLENLIAQLPGEKKNGLFGNLIALSLGLTPNFKSNFDLAEDAKLQLSKDTYDDDLDNLLAQIGDQYADLFLAAKNLSDAILLSDILRVNTEITKAPLSASMIKRYDEHHQDLTLLKALVRQQLPEKYKEIFFDQSKNGYAGYIDGGASQEEFYKFIKPILEKMDGTEELLVKLNREDLLRKQRTFDNGSIPHQIHLGELHAILRRQEDFYPFLKDNREKIEKILTFRIPYYVGPLARGNSRFAWMTRKSEETITPWNFEEVVDKGASAQSFIERMTNFDKNLPNEKVLPKHSLLYEYFTVYNELTKVKYVTEGMRKPAFLSGEQKKAIVDLLFKTNRKVTVKQLKEDYFKKIECFDSVEISGVEDRFNASLGTYHDLLKIIKDKDFLDNEENEDILEDIVLTLTLFEDREMIEERLKTYAHLFDDKVMKQLKRRRYTGWGRLSRKLINGIRDKQSGKTILDFLKSDGFANRNFMQLIHDDSLTFKEDIQKAQVSGQGDSLHEHIANLAGSPAIKKGILQTVKVVDELVKVMGRHKPENIVIEMARENQTTQKGQKNSRERMKRIEEGIKELGSQILKEHPVENTQLQNEKLYLYYLQNGRDMYVDQELDINRLSDYDVDHIVPQSFLKDDSIDNKVLTRSDKARGKSDNVPSEEVVKKMKNYWRQLLNAKLITQRKFDNLTKAERGGLSELDKAGFIKRQLVETRQITKHVAQILDSRMNTKYDENDKLIREVKVITLKSKLVSDFRKDFQFYKVREINNYHHAHDAYLNAVVGTALIKKYPKLESEFVYGDYKVYDVRKMIAKSEQEIGKATAKYFFYSNIMNFFKTEITLANGEIRKRPLIETNGETGEIVWDKGRDFATVRKVLSMPQVNIVKKTEVQTGGFSKESILPKRNSDKLIARKKDWDPKKYGGFDSPTVAYSVLVVAKVEKGKSKKLKSVKELLGITIMERSSFEKNPIDFLEAKGYKEVKKDLIIKLPKYSLFELENGRKRMLASAGELQKGNELALPSKYVNFLYLASHYEKLKGSPEDNEQKQLFVEQHKHYLDEIIEQISEFSKRVILADANLDKVLSAYNKHRDKPIREQAENIIHLFTLTNLGAPAAFKYFDTTIDRKRYTSTKEVLDATLIHQSITGLYETRIDLSQLGGDGGGGGGSSPAPGGVPWILKKPLELTIKLDLEEQQGTLLNNSILSKKGKEELKQLFEKYSALWQSWENQVGHRRIRPHKIATGTVKPTPQKQYHINPKAKPDIQIVINDLLKQGVLIQKESTMNTPVYPVPKPNGRWRMVLDYRAVNKVTPLIAVQNQHSYGILGSLFKGRYKTTIDLSNGFWAHPIVPEDYWITAFTWQGKQYCWTVLPQGFLNSPGLFTGDVVDLLQGIPNVEVYVDDVYISHDSEKEHLEYLDILFNRLKEAGYIISLKKSNIANSIVDFLGFQITNEGRGLTDTFKEKLENITAPTTLKQLQSILGLLNFARNFIPDFTELIAPLYALIPKSTKNYVPWQIEHSTTLETLITKLNGAEYLQGRKGDKTLIMKVNASYTTGYIRYYNEGEKKPISYVSIVFSKTELKFTELEKLLTTVHKGLLKALDLSMGQNIHVYSPIVSMQNIQKTPQTAKKALASRWLSWLSYLEDPRIRFFYDPQMPALKDLPAVDTGKDNKKHPSNFQHIFYTDGSAITSPTKEGHLNAGMGIVYFINKDGNLQKQQEWSISLGNHTAQFAEIAAFEFALKKCLPLGGNILVVTDSNYVAKAYNEELDVWASNGFVNNRKKPLKHISKWKSVADLKRLRPDVVVTHEPGHQKLDSSPHAYGNNLADQLATQASFKVHAGKRTADGSEFEKRTADGSEFESPKKKAKVE

SEQ ID NO: 778 - protein, 2091 aa, synthetic construct
MPAAKRVKLDGGDKKYSIGLDIGTNSVGWAVITDEYKVPSKKFKVLGNTDRHSIKKNLIGALLFDSGETAEATRLKRTARRRYTRRKNRICYLQEIFSNEMAKVDDSFFHRLEESFLVEEDKKHERHPIFGNIVDEVAYHEKYPTIYHLRKKLVDSTDKADLRLIYLALAHMIKFRGHFLIEGDLNPDNSDVDKLFIQLVQTYNQLFEENPINASGVDAKAILSARLSKSRRLENLIAQLPGEKKNGLFGNLIALSLGLTPNFKSNFDLAEDAKLQLSKDTYDDDLDNLLAQIGDQYADLFLAAKNLSDAILLSDILRVNTEITKAPLSASMIKRYDEHHQDLTLLKALVRQQLPEKYKEIFFDQSKNGYAGYIDGGASQEEFYKFIKPILEKMDGTEELLVKLNREDLLRKQRTFDNGSIPHQIHLGELHAILRRQEDFYPFLKDNREKIEKILTFRIPYYVGPLARGNSRFAWMTRKSEETITPWNFEEVVDKGASAQSFIERMTNFDKNLPNEKVLPKHSLLYEYFTVYNELTKVKYVTEGMRKPAFLSGEQKKAIVDLLFKTNRKVTVKQLKEDYFKKIECFDSVEISGVEDRFNASLGTYHDLLKIIKDKDFLDNEENEDILEDIVLTLTLFEDREMIEERLKTYAHLFDDKVMKQLKRRRYTGWGRLSRKLINGIRDKQSGKTILDFLKSDGFANRNFMQLIHDDSLTFKEDIQKAQVSGQGDSLHEHIANLAGSPAIKKGILQTVKVVDELVKVMGRHKPENIVIEMARENQTTQKGQKNSRERMKRIEEGIKELGSQILKEHPVENTQLQNEKLYLYYLQNGRDMYVDQELDINRLSDYDVDHIVPQSFLKDDSIDNKVLTRSDKARGKSDNVPSEEVVKKMKNYWRQLLNAKLITQRKFDNLTKAERGGLSELDKAGFIKRQLVETRQITKHVAQILDSRMNTKYDENDKLIREVKVITLKSKLVSDFRKDFQFYKVREINNYHHAHDAYLNAVVGTALIKKYPKLESEFVYGDYKVYDVRKMIAKSEQEIGKATAKYFFYSNIMNFFKTEITLANGEIRKRPLIETNGETGEIVWDKGRDFATVRKVLSMPQVNIVKKTEVQTGGFSKESILPKRNSDKLIARKKDWDPKKYGGFDSPTVAYSVLVVAKVEKGKSKKLKSVKELLGITIMERSSFEKNPIDFLEAKGYKEVKKDLIIKLPKYSLFELENGRKRMLASAGELQKGNELALPSKYVNFLYLASHYEKLKGSPEDNEQKQLFVEQHKHYLDEIIEQISEFSKRVILADANLDKVLSAYNKHRDKPIREQAENIIHLFTLTNLGAPAAFKYFDTTIDRKRYTSTKEVLDATLIHQSITGLYETRIDLSQLGGDGGEAAAKGGGGSEAAAKGGVPWILKKPLELTIKLDLEEQQGTLLNNSILSKKGKEELKQLFEKYSALWQSWENQVGHRRIRPHKIATGTVKPTPQKQYHINPKAKPDIQIVINDLLKQGVLIQKESTMNTPVYPVPKPNGRWRMVLDYRAVNKVTPLIAVQNQHSYGILGSLFKGRYKTTIDLSNGFWAHPIVPEDYWITAFTWQGKQYCWTVLPQGFLNSPGLFTGDVVDLLQGIPNVEVYVDDVYISHDSEKEHLEYLDILFNRLKEAGYIISLKKSNIANSIVDFLGFQITNEGRGLTDTFKEKLENITAPTTLKQLQSILGLLNFARNFIPDFTELIAPLYALIPKSTKNYVPWQIEHSTTLETLITKLNGAEYLQGRKGDKTLIMKVNASYTTGYIRYYNEGEKKPISYVSIVFSKTELKFTELEKLLTTVHKGLLKALDLSMGQNIHVYSPIVSMQNIQKTPQTAKKALASRWLSWLSYLEDPRIRFFYDPQMPALKDLPAVDTGKDNKKHPSNFQHIFYTDGSAITSPTKEGHLNAGMGIVYFINKDGNLQKQQEWSISLGNHTAQFAEIAAFEFALKKCLPLGGNILVVTDSNYVAKAYNEELDVWASNGFVNNRKKPLKHISKWKSVADLKRLRPDVVVTHEPGHQKLDSSPHAYGNNLADQLATQASFKVHAGKRTADGSEFEKRTADGSEFESPKKKAKVE

SEQ ID NO: 779 - protein, 2087 aa, synthetic construct
MPAAKRVKLDGGDKKYSIGLDIGTNSVGWAVITDEYKVPSKKFKVLGNTDRHSIKKNLIGALLFDSGETAEATRLKRTARRRYTRRKNRICYLQEIFSNEMAKVDDSFFHRLEESFLVEEDKKHERHPIFGNIVDEVAYHEKYPTIYHLRKKLVDSTDKADLRLIYLALAHMIKFRGHFLIEGDLNPDNSDVDKLFIQLVQTYNQLFEENPINASGVDAKAILSARLSKSRRLENLIAQLPGEKKNGLFGNLIALSLGLTPNFKSNFDLAEDAKLQLSKDTYDDDLDNLLAQIGDQYADLFLAAKNLSDAILLSDILRVNTEITKAPLSASMIKRYDEHHQDLTLLKALVRQQLPEKYKEIFFDQSKNGYAGYIDGGASQEEFYKFIKPILEKMDGTEELLVKLNREDLLRKQRTFDNGSIPHQIHLGELHAILRRQEDFYPFLKDNREKIEKILTFRIPYYVGPLARGNSRFAWMTRKSEETITPWNFEEVVDKGASAQSFIERMTNFDKNLPNEKVLPKHSLLYEYFTVYNELTKVKYVTEGMRKPAFLSGEQKKAIVDLLFKTNRKVTVKQLKEDYFKKIECFDSVEISGVEDRFNASLGTYHDLLKIIKDKDFLDNEENEDILEDIVLTLTLFEDREMIEERLKTYAHLFDDKVMKQLKRRRYTGWGRLSRKLINGIRDKQSGKTILDFLKSDGFANRNFMQLIHDDSLTFKEDIQKAQVSGQGDSLHEHIANLAGSPAIKKGILQTVKVVDELVKVMGRHKPENIVIEMARENQTTQKGQKNSRERMKRIEEGIKELGSQILKEHPVENTQLQNEKLYLYYLQNGRDMYVDQELDINRLSDYDVDHIVPQSFLKDDSIDNKVLTRSDKARGKSDNVPSEEVVKKMKNYWRQLLNAKLITQRKFDNLTKAERGGLSELDKAGFIKRQLVETRQITKHVAQILDSRMNTKYDENDKLIREVKVITLKSKLVSDFRKDFQFYKVREINNYHHAHDAYLNAVVGTALIKKYPKLESEFVYGDYKVYDVRKMIAKSEQEIGKATAKYFFYSNIMNFFKTEITLANGEIRKRPLIETNGETGEIVWDKGRDFATVRKVLSMPQVNIVKKTEVQTGGFSKESILPKRNSDKLIARKKDWDPKKYGGFDSPTVAYSVLVVAKVEKGKSKKLKSVKELLGITIMERSSFEKNPIDFLEAKGYKEVKKDLIIKLPKYSLFELENGRKRMLASAGELQKGNELALPSKYVNFLYLASHYEKLKGSPEDNEQKQLFVEQHKHYLDEIIEQISEFSKRVILADANLDKVLSAYNKHRDKPIREQAENIIHLFTLTNLGAPAAFKYFDTTIDRKRYTSTKEVLDATLIHQSITGLYETRIDLSQLGGDGGEAAAKGGSGSSGGVPWILKKPLELTIKLDLEEQQGTLLNNSILSKKGKEELKQLFEKYSALWQSWENQVGHRRIRPHKIATGTVKPTPQKQYHINPKAKPDIQIVINDLLKQGVLIQKESTMNTPVYPVPKPNGRWRMVLDYRAVNKVTPLIAVQNQHSYGILGSLFKGRYKTTIDLSNGFWAHPIVPEDYWITAFTWQGKQYCWTVLPQGFLNSPGLFTGDVVDLLQGIPNVEVYVDDVYISHDSEKEHLEYLDILFNRLKEAGYIISLKKSNIANSIVDFLGFQITNEGRGLTDTFKEKLENITAPTTLKQLQSILGLLNFARNFIPDFTELIAPLYALIPKSTKNYVPWQIEHSTTLETLITKLNGAEYLQGRKGDKTLIMKVNASYTTGYIRYYNEGEKKPISYVSIVFSKTELKFTELEKLLTTVHKGLLKALDLSMGQNIHVYSPIVSMQNIQKTPQTAKKALASRWLSWLSYLEDPRIRFFYDPQMPALKDLPAVDTGKDNKKHPSNFQHIFYTDGSAITSPTKEGHLNAGMGIVYFINKDGNLQKQQEWSISLGNHTAQFAEIAAFEFALKKCLPLGGNILVVTDSNYVAKAYNEELDVWASNGFVNNRKKPLKHISKWKSVADLKRLRPDVVVTHEPGHQKLDSSPHAYGNNLADQLATQASFKVHAGKRTADGSEFEKRTADGSEFESPKKKAKVE

SEQ ID NO: 780 - protein, 2085 aa, synthetic construct
MPAAKRVKLDGGDKKYSIGLDIGTNSVGWAVITDEYKVPSKKFKVLGNTDRHSIKKNLIGALLFDSGETAEATRLKRTARRRYTRRKNRICYLQEIFSNEMAKVDDSFFHRLEESFLVEEDKKHERHPIFGNIVDEVAYHEKYPTIYHLRKKLVDSTDKADLRLIYLALAHMIKFRGHFLIEGDLNPDNSDVDKLFIQLVQTYNQLFEENPINASGVDAKAILSARLSKSRRLENLIAQLPGEKKNGLFGNLIALSLGLTPNFKSNFDLAEDAKLQLSKDTYDDDLDNLLAQIGDQYADLFLAAKNLSDAILLSDILRVNTEITKAPLSASMIKRYDEHHQDLTLLKALVRQQLPEKYKEIFFDQSKNGYAGYIDGGASQEEFYKFIKPILEKMDGTEELLVKLNREDLLRKQRTFDNGSIPHQIHLGELHAILRRQEDFYPFLKDNREKIEKILTFRIPYYVGPLARGNSRFAWMTRKSEETITPWNFEEVVDKGASAQSFIERMTNFDKNLPNEKVLPKHSLLYEYFTVYNELTKVKYVTEGMRKPAFLSGEQKKAIVDLLFKTNRKVTVKQLKEDYFKKIECFDSVEISGVEDRFNASLGTYHDLLKIIKDKDFLDNEENEDILEDIVLTLTLFEDREMIEERLKTYAHLFDDKVMKQLKRRRYTGWGRLSRKLINGIRDKQSGKTILDFLKSDGFANRNFMQLIHDDSLTFKEDIQKAQVSGQGDSLHEHIANLAGSPAIKKGILQTVKVVDELVKVMGRHKPENIVIEMARENQTTQKGQKNSRERMKRIEEGIKELGSQILKEHPVENTQLQNEKLYLYYLQNGRDMYVDQELDINRLSDYDVDHIVPQSFLKDDSIDNKVLTRSDKARGKSDNVPSEEVVKKMKNYWRQLLNAKLITQRKFDNLTKAERGGLSELDKAGFIKRQLVETRQITKHVAQILDSRMNTKYDENDKLIREVKVITLKSKLVSDFRKDFQFYKVREINNYHHAHDAYLNAVVGTALIKKYPKLESEFVYGDYKVYDVRKMIAKSEQEIGKATAKYFFYSNIMNFFKTEITLANGEIRKRPLIETNGETGEIVWDKGRDFATVRKVLSMPQVNIVKKTEVQTGGFSKESILPKRNSDKLIARKKDWDPKKYGGFDSPTVAYSVLVVAKVEKGKSKKLKSVKELLGITIMERSSFEKNPIDFLEAKGYKEVKKDLIIKLPKYSLFELENGRKRMLASAGELQKGNELALPSKYVNFLYLASHYEKLKGSPEDNEQKQLFVEQHKHYLDEIIEQISEFSKRVILADANLDKVLSAYNKHRDKPIREQAENIIHLFTLTNLGAPAAFKYFDTTIDRKRYTSTKEVLDATLIHQSITGLYETRIDLSQLGGDGGGGSGGGPAPGGVPWILKKPLELTIKLDLEEQQGTLLNNSILSKKGKEELKQLFEKYSALWQSWENQVGHRRIRPHKIATGTVKPTPQKQYHINPKAKPDIQIVINDLLKQGVLIQKESTMNTPVYPVPKPNGRWRMVLDYRAVNKVTPLIAVQNQHSYGILGSLFKGRYKTTIDLSNGFWAHPIVPEDYWITAFTWQGKQYCWTVLPQGFLNSPGLFTGDVVDLLQGIPNVEVYVDDVYISHDSEKEHLEYLDILFNRLKEAGYIISLKKSNIANSIVDFLGFQITNEGRGLTDTFKEKLENITAPTTLKQLQSILGLLNFARNFIPDFTELIAPLYALIPKSTKNYVPWQIEHSTTLETLITKLNGAEYLQGRKGDKTLIMKVNASYTTGYIRYYNEGEKKPISYVSIVFSKTELKFTELEKLLTTVHKGLLKALDLSMGQNIHVYSPIVSMQNIQKTPQTAKKALASRWLSWLSYLEDPRIRFFYDPQMPALKDLPAVDTGKDNKKHPSNFQHIFYTDGSAITSPTKEGHLNAGMGIVYFINKDGNLQKQQEWSISLGNHTAQFAEIAAFEFALKKCLPLGGNILVVTDSNYVAKAYNEELDVWASNGFVNNRKKPLKHISKWKSVADLKRLRPDVVVTHEPGHQKLDSSPHAYGNNLADQLATQASFKVHAGKRTADGSEFEKRTADGSEFESPKKKAKVE

SEQ ID NO: 781 - protein, 2086 aa, synthetic construct
MPAAKRVKLDGGDKKYSIGLDIGTNSVGWAVITDEYKVPSKKFKVLGNTDRHSIKKNLIGALLFDSGETAEATRLKRTARRRYTRRKNRICYLQEIFSNEMAKVDDSFFHRLEESFLVEEDKKHERHPIFGNIVDEVAYHEKYPTIYHLRKKLVDSTDKADLRLIYLALAHMIKFRGHFLIEGDLNPDNSDVDKLFIQLVQTYNQLFEENPINASGVDAKAILSARLSKSRRLENLIAQLPGEKKNGLFGNLIALSLGLTPNFKSNFDLAEDAKLQLSKDTYDDDLDNLLAQIGDQYADLFLAAKNLSDAILLSDILRVNTEITKAPLSASMIKRYDEHHQDLTLLKALVRQQLPEKYKEIFFDQSKNGYAGYIDGGASQEEFYKFIKPILEKMDGTEELLVKLNREDLLRKQRTFDNGSIPHQIHLGELHAILRRQEDFYPFLKDNREKIEKILTFRIPYYVGPLARGNSRFAWMTRKSEETITPWNFEEVVDKGASAQSFIERMTNFDKNLPNEKVLPKHSLLYEYFTVYNELTKVKYVTEGMRKPAFLSGEQKKAIVDLLFKTNRKVTVKQLKEDYFKKIECFDSVEISGVEDRFNASLGTYHDLLKIIKDKDFLDNEENEDILEDIVLTLTLFEDREMIEERLKTYAHLFDDKVMKQLKRRRYTGWGRLSRKLINGIRDKQSGKTILDFLKSDGFANRNFMQLIHDDSLTFKEDIQKAQVSGQGDSLHEHIANLAGSPAIKKGILQTVKVVDELVKVMGRHKPENIVIEMARENQTTQKGQKNSRERMKRIEEGIKELGSQILKEHPVENTQLQNEKLYLYYLQNGRDMYVDQELDINRLSDYDVDHIVPQSFLKDDSIDNKVLTRSDKARGKSDNVPSEEVVKKMKNYWRQLLNAKLITQRKFDNLTKAERGGLSELDKAGFIKRQLVETRQITKHVAQILDSRMNTKYDENDKLIREVKVITLKSKLVSDFRKDFQFYKVREINNYHHAHDAYLNAVVGTALIKKYPKLESEFVYGDYKVYDVRKMIAKSEQEIGKATAKYFFYSNIMNFFKTEITLANGEIRKRPLIETNGETGEIVWDKGRDFATVRKVLSMPQVNIVKKTEVQTGGFSKESILPKRNSDKLIARKKDWDPKKYGGFDSPTVAYSVLVVAKVEKGKSKKLKSVKELLGITIMERSSFEKNPIDFLEAKGYKEVKKDLIIKLPKYSLFELENGRKRMLASAGELQKGNELALPSKYVNFLYLASHYEKLKGSPEDNEQKQLFVEQHKHYLDEIIEQISEFSKRVILADANLDKVLSAYNKHRDKPIREQAENIIHLFTLTNLGAPAAFKYFDTTIDRKRYTSTKEVLDATLIHQSITGLYETRIDLSQLGGDGGGGGGSGGGGSGGVPWILKKPLELTIKLDLEEQQGTLLNNSILSKKGKEELKQLFEKYSALWQSWENQVGHRRIRPHKIATGTVKPTPQKQYHINPKAKPDIQIVINDLLKQGVLIQKESTMNTPVYPVPKPNGRWRMVLDYRAVNKVTPLIAVQNQHSYGILGSLFKGRYKTTIDLSNGFWAHPIVPEDYWITAFTWQGKQYCWTVLPQGFLNSPGLFTGDVVDLLQGIPNVEVYVDDVYISHDSEKEHLEYLDILFNRLKEAGYIISLKKSNIANSIVDFLGFQITNEGRGLTDTFKEKLENITAPTTLKQLQSILGLLNFARNFIPDFTELIAPLYALIPKSTKNYVPWQIEHSTTLETLITKLNGAEYLQGRKGDKTLIMKVNASYTTGYIRYYNEGEKKPISYVSIVFSKTELKFTELEKLLTTVHKGLLKALDLSMGQNIHVYSPIVSMQNIQKTPQTAKKALASRWLSWLSYLEDPRIRFFYDPQMPALKDLPAVDTGKDNKKHPSNFQHIFYTDGSAITSPTKEGHLNAGMGIVYFINKDGNLQKQQEWSISLGNHTAQFAEIAAFEFALKKCLPLGGNILVVTDSNYVAKAYNEELDVWASNGFVNNRKKPLKHISKWKSVADLKRLRPDVVVTHEPGHQKLDSSPHAYGNNLADQLATQASFKVHAGKRTADGSEFEKRTADGSEFESPKKKAKVE

SEQ ID NO: 782 - protein, 2085 aa, synthetic construct
MPAAKRVKLDGGDKKYSIGLDIGTNSVGWAVITDEYKVPSKKFKVLGNTDRHSIKKNLIGALLFDSGETAEATRLKRTARRRYTRRKNRICYLQEIFSNEMAKVDDSFFHRLEESFLVEEDKKHERHPIFGNIVDEVAYHEKYPTIYHLRKKLVDSTDKADLRLIYLALAHMIKFRGHFLIEGDLNPDNSDVDKLFIQLVQTYNQLFEENPINASGVDAKAILSARLSKSRRLENLIAQLPGEKKNGLFGNLIALSLGLTPNFKSNFDLAEDAKLQLSKDTYDDDLDNLLAQIGDQYADLFLAAKNLSDAILLSDILRVNTEITKAPLSASMIKRYDEHHQDLTLLKALVRQQLPEKYKEIFFDQSKNGYAGYIDGGASQEEFYKFIKPILEKMDGTEELLVKLNREDLLRKQRTFDNGSIPHQIHLGELHAILRRQEDFYPFLKDNREKIEKILTFRIPYYVGPLARGNSRFAWMTRKSEETITPWNFEEVVDKGASAQSFIERMTNFDKNLPNEKVLPKHSLLYEYFTVYNELTKVKYVTEGMRKPAFLSGEQKKAIVDLLFKTNRKVTVKQLKEDYFKKIECFDSVEISGVEDRFNASLGTYHDLLKIIKDKDFLDNEENEDILEDIVLTLTLFEDREMIEERLKTYAHLFDDKVMKQLKRRRYTGWGRLSRKLINGIRDKQSGKTILDFLKSDGFANRNFMQLIHDDSLTFKEDIQKAQVSGQGDSLHEHIANLAGSPAIKKGILQTVKVVDELVKVMGRHKPENIVIEMARENQTTQKGQKNSRERMKRIEEGIKELGSQILKEHPVENTQLQNEKLYLYYLQNGRDMYVDQELDINRLSDYDVDHIVPQSFLKDDSIDNKVLTRSDKARGKSDNVPSEEVVKKMKNYWRQLLNAKLITQRKFDNLTKAERGGLSELDKAGFIKRQLVETRQITKHVAQILDSRMNTKYDENDKLIREVKVITLKSKLVSDFRKDFQFYKVREINNYHHAHDAYLNAVVGTALIKKYPKLESEFVYGDYKVYDVRKMIAKSEQEIGKATAKYFFYSNIMNFFKTEITLANGEIRKRPLIETNGETGEIVWDKGRDFATVRKVLSMPQVNIVKKTEVQTGGFSKESILPKRNSDKLIARKKDWDPKKYGGFDSPTVAYSVLVVAKVEKGKSKKLKSVKELLGITIMERSSFEKNPIDFLEAKGYKEVKKDLIIKLPKYSLFELENGRKRMLASAGELQKGNELALPSKYVNFLYLASHYEKLKGSPEDNEQKQLFVEQHKHYLDEIIEQISEFSKRVILADANLDKVLSAYNKHRDKPIREQAENIIHLFTLTNLGAPAAFKYFDTTIDRKRYTSTKEVLDATLIHQSITGLYETRIDLSQLGGDGGPAPAPAPAPGGVPWILKKPLELTIKLDLEEQQGTLLNNSILSKKGKEELKQLFEKYSALWQSWENQVGHRRIRPHKIATGTVKPTPQKQYHINPKAKPDIQIVINDLLKQGVLIQKESTMNTPVYPVPKPNGRWRMVLDYRAVNKVTPLIAVQNQHSYGILGSLFKGRYKTTIDLSNGFWAHPIVPEDYWITAFTWQGKQYCWTVLPQGFLNSPGLFTGDVVDLLQGIPNVEVYVDDVYISHDSEKEHLEYLDILFNRLKEAGYIISLKKSNIANSIVDFLGFQITNEGRGLTDTFKEKLENITAPTTLKQLQSILGLLNFARNFIPDFTELIAPLYALIPKSTKNYVPWQIEHSTTLETLITKLNGAEYLQGRKGDKTLIMKVNASYTTGYIRYYNEGEKKPISYVSIVFSKTELKFTELEKLLTTVHKGLLKALDLSMGQNIHVYSPIVSMQNIQKTPQTAKKALASRWLSWLSYLEDPRIRFFYDPQMPALKDLPAVDTGKDNKKHPSNFQHIFYTDGSAITSPTKEGHLNAGMGIVYFINKDGNLQKQQEWSISLGNHTAQFAEIAAFEFALKKCLPLGGNILVVTDSNYVAKAYNEELDVWASNGFVNNRKKPLKHISKWKSVADLKRLRPDVVVTHEPGHQKLDSSPHAYGNNLADQLATQASFKVHAGKRTADGSEFEKRTADGSEFESPKKKAKVE

SEQ ID NO: 783 - protein, 2091 aa, synthetic construct
MPAAKRVKLDGGDKKYSIGLDIGTNSVGWAVITDEYKVPSKKFKVLGNTDRHSIKKNLIGALLFDSGETAEATRLKRTARRRYTRRKNRICYLQEIFSNEMAKVDDSFFHRLEESFLVEEDKKHERHPIFGNIVDEVAYHEKYPTIYHLRKKLVDSTDKADLRLIYLALAHMIKFRGHFLIEGDLNPDNSDVDKLFIQLVQTYNQLFEENPINASGVDAKAILSARLSKSRRLENLIAQLPGEKKNGLFGNLIALSLGLTPNFKSNFDLAEDAKLQLSKDTYDDDLDNLLAQIGDQYADLFLAAKNLSDAILLSDILRVNTEITKAPLSASMIKRYDEHHQDLTLLKALVRQQLPEKYKEIFFDQSKNGYAGYIDGGASQEEFYKFIKPILEKMDGTEELLVKLNREDLLRKQRTFDNGSIPHQIHLGELHAILRRQEDFYPFLKDNREKIEKILTFRIPYYVGPLARGNSRFAWMTRKSEETITPWNFEEVVDKGASAQSFIERMTNFDKNLPNEKVLPKHSLLYEYFTVYNELTKVKYVTEGMRKPAFLSGEQKKAIVDLLFKTNRKVTVKQLKEDYFKKIECFDSVEISGVEDRFNASLGTYHDLLKIIKDKDFLDNEENEDILEDIVLTLTLFEDREMIEERLKTYAHLFDDKVMKQLKRRRYTGWGRLSRKLINGIRDKQSGKTILDFLKSDGFANRNFMQLIHDDSLTFKEDIQKAQVSGQGDSLHEHIANLAGSPAIKKGILQTVKVVDELVKVMGRHKPENIVIEMARENQTTQKGQKNSRERMKRIEEGIKELGSQILKEHPVENTQLQNEKLYLYYLQNGRDMYVDQELDINRLSDYDVDHIVPQSFLKDDSIDNKVLTRSDKARGKSDNVPSEEVVKKMKNYWRQLLNAKLITQRKFDNLTKAERGGLSELDKAGFIKRQLVETRQITKHVAQILDSRMNTKYDENDKLIREVKVITLKSKLVSDFRKDFQFYKVREINNYHHAHDAYLNAVVGTALIKKYPKLESEFVYGDYKVYDVRKMIAKSEQEIGKATAKYFFYSNIMNFFKTEITLANGEIRKRPLIETNGETGEIVWDKGRDFATVRKVLSMPQVNIVKKTEVQTGGFSKESILPKRNSDKLIARKKDWDPKKYGGFDSPTVAYSVLVVAKVEKGKSKKLKSVKELLGITIMERSSFEKNPIDFLEAKGYKEVKKDLIIKLPKYSLFELENGRKRMLASAGELQKGNELALPSKYVNFLYLASHYEKLKGSPEDNEQKQLFVEQHKHYLDEIIEQISEFSKRVILADANLDKVLSAYNKHRDKPIREQAENIIHLFTLTNLGAPAAFKYFDTTIDRKRYTSTKEVLDATLIHQSITGLYETRIDLSQLGGDGGGGSGGSGGSGGSGGSGGVPWILKKPLELTIKLDLEEQQGTLLNNSILSKKGKEELKQLFEKYSALWQSWENQVGHRRIRPHKIATGTVKPTPQKQYHINPKAKPDIQIVINDLLKQGVLIQKESTMNTPVYPVPKPNGRWRMVLDYRAVNKVTPLIAVQNQHSYGILGSLFKGRYKTTIDLSNGFWAHPIVPEDYWITAFTWQGKQYCWTVLPQGFLNSPGLFTGDVVDLLQGIPNVEVYVDDVYISHDSEKEHLEYLDILFNRLKEAGYIISLKKSNIANSIVDFLGFQITNEGRGLTDTFKEKLENITAPTTLKQLQSILGLLNFARNFIPDFTELIAPLYALIPKSTKNYVPWQIEHSTTLETLITKLNGAEYLQGRKGDKTLIMKVNASYTTGYIRYYNEGEKKPISYVSIVFSKTELKFTELEKLLTTVHKGLLKALDLSMGQNIHVYSPIVSMQNIQKTPQTAKKALASRWLSWLSYLEDPRIRFFYDPQMPALKDLPAVDTGKDNKKHPSNFQHIFYTDGSAITSPTKEGHLNAGMGIVYFINKDGNLQKQQEWSISLGNHTAQFAEIAAFEFALKKCLPLGGNILVVTDSNYVAKAYNEELDVWASNGFVNNRKKPLKHISKWKSVADLKRLRPDVVVTHEPGHQKLDSSPHAYGNNLADQLATQASFKVHAGKRTADGSEFEKRTADGSEFESPKKKAKVE

SEQ ID NO: 784 - protein, 2084 aa, synthetic construct
MPAAKRVKLDGGDKKYSIGLDIGTNSVGWAVITDEYKVPSKKFKVLGNTDRHSIKKNLIGALLFDSGETAEATRLKRTARRRYTRRKNRICYLQEIFSNEMAKVDDSFFHRLEESFLVEEDKKHERHPIFGNIVDEVAYHEKYPTIYHLRKKLVDSTDKADLRLIYLALAHMIKFRGHFLIEGDLNPDNSDVDKLFIQLVQTYNQLFEENPINASGVDAKAILSARLSKSRRLENLIAQLPGEKKNGLFGNLIALSLGLTPNFKSNFDLAEDAKLQLSKDTYDDDLDNLLAQIGDQYADLFLAAKNLSDAILLSDILRVNTEITKAPLSASMIKRYDEHHQDLTLLKALVRQQLPEKYKEIFFDQSKNGYAGYIDGGASQEEFYKFIKPILEKMDGTEELLVKLNREDLLRKQRTFDNGSIPHQIHLGELHAILRRQEDFYPFLKDNREKIEKILTFRIPYYVGPLARGNSRFAWMTRKSEETITPWNFEEVVDKGASAQSFIERMTNFDKNLPNEKVLPKHSLLYEYFTVYNELTKVKYVTEGMRKPAFLSGEQKKAIVDLLFKTNRKVTVKQLKEDYFKKIECFDSVEISGVEDRFNASLGTYHDLLKIIKDKDFLDNEENEDILEDIVLTLTLFEDREMIEERLKTYAHLFDDKVMKQLKRRRYTGWGRLSRKLINGIRDKQSGKTILDFLKSDGFANRNFMQLIHDDSLTFKEDIQKAQVSGQGDSLHEHIANLAGSPAIKKGILQTVKVVDELVKVMGRHKPENIVIEMARENQTTQKGQKNSRERMKRIEEGIKELGSQILKEHPVENTQLQNEKLYLYYLQNGRDMYVDQELDINRLSDYDVDHIVPQSFLKDDSIDNKVLTRSDKARGKSDNVPSEEVVKKMKNYWRQLLNAKLITQRKFDNLTKAERGGLSELDKAGFIKRQLVETRQITKHVAQILDSRMNTKYDENDKLIREVKVITLKSKLVSDFRKDFQFYKVREINNYHHAHDAYLNAVVGTALIKKYPKLESEFVYGDYKVYDVRKMIAKSEQEIGKATAKYFFYSNIMNFFKTEITLANGEIRKRPLIETNGETGEIVWDKGRDFATVRKVLSMPQVNIVKKTEVQTGGFSKESILPKRNSDKLIARKKDWDPKKYGGFDSPTVAYSVLVVAKVEKGKSKKLKSVKELLGITIMERSSFEKNPIDFLEAKGYKEVKKDLIIKLPKYSLFELENGRKRMLASAGELQKGNELALPSKYVNFLYLASHYEKLKGSPEDNEQKQLFVEQHKHYLDEIIEQISEFSKRVILADANLDKVLSAYNKHRDKPIREQAENIIHLFTLTNLGAPAAFKYFDTTIDRKRYTSTKEVLDATLIHQSITGLYETRIDLSQLGGDGGEAAAKGGGGGVPWILKKPLELTIKLDLEEQQGTLLNNSILSKKGKEELKQLFEKYSALWQSWENQVGHRRIRPHKIATGTVKPTPQKQYHINPKAKPDIQIVINDLLKQGVLIQKESTMNTPVYPVPKPNGRWRMVLDYRAVNKVTPLIAVQNQHSYGILGSLFKGRYKTTIDLSNGFWAHPIVPEDYWITAFTWQGKQYCWTVLPQGFLNSPGLFTGDVVDLLQGIPNVEVYVDDVYISHDSEKEHLEYLDILFNRLKEAGYIISLKKSNIANSIVDFLGFQITNEGRGLTDTFKEKLENITAPTTLKQLQSILGLLNFARNFIPDFTELIAPLYALIPKSTKNYVPWQIEHSTTLETLITKLNGAEYLQGRKGDKTLIMKVNASYTTGYIRYYNEGEKKPISYVSIVFSKTELKFTELEKLLTTVHKGLLKALDLSMGQNIHVYSPIVSMQNIQKTPQTAKKALASRWLSWLSYLEDPRIRFFYDPQMPALKDLPAVDTGKDNKKHPSNFQHIFYTDGSAITSPTKEGHLNAGMGIVYFINKDGNLQKQQEWSISLGNHTAQFAEIAAFEFALKKCLPLGGNILVVTDSNYVAKAYNEELDVWASNGFVNNRKKPLKHISKWKSVADLKRLRPDVVVTHEPGHQKLDSSPHAYGNNLADQLATQASFKVHAGKRTADGSEFEKRTADGSEFESPKKKAKVE

SEQ ID NO: 785 - protein, 2087 aa, synthetic construct
MPAAKRVKLDGGDKKYSIGLDIGTNSVGWAVITDEYKVPSKKFKVLGNTDRHSIKKNLIGALLFDSGETAEATRLKRTARRRYTRRKNRICYLQEIFSNEMAKVDDSFFHRLEESFLVEEDKKHERHPIFGNIVDEVAYHEKYPTIYHLRKKLVDSTDKADLRLIYLALAHMIKFRGHFLIEGDLNPDNSDVDKLFIQLVQTYNQLFEENPINASGVDAKAILSARLSKSRRLENLIAQLPGEKKNGLFGNLIALSLGLTPNFKSNFDLAEDAKLQLSKDTYDDDLDNLLAQIGDQYADLFLAAKNLSDAILLSDILRVNTEITKAPLSASMIKRYDEHHQDLTLLKALVRQQLPEKYKEIFFDQSKNGYAGYIDGGASQEEFYKFIKPILEKMDGTEELLVKLNREDLLRKQRTFDNGSIPHQIHLGELHAILRRQEDFYPFLKDNREKIEKILTFRIPYYVGPLARGNSRFAWMTRKSEETITPWNFEEVVDKGASAQSFIERMTNFDKNLPNEKVLPKHSLLYEYFTVYNELTKVKYVTEGMRKPAFLSGEQKKAIVDLLFKTNRKVTVKQLKEDYFKKIECFDSVEISGVEDRFNASLGTYHDLLKIIKDKDFLDNEENEDILEDIVLTLTLFEDREMIEERLKTYAHLFDDKVMKQLKRRRYTGWGRLSRKLINGIRDKQSGKTILDFLKSDGFANRNFMQLIHDDSLTFKEDIQKAQVSGQGDSLHEHIANLAGSPAIKKGILQTVKVVDELVKVMGRHKPENIVIEMARENQTTQKGQKNSRERMKRIEEGIKELGSQILKEHPVENTQLQNEKLYLYYLQNGRDMYVDQELDINRLSDYDVDHIVPQSFLKDDSIDNKVLTRSDKARGKSDNVPSEEVVKKMKNYWRQLLNAKLITQRKFDNLTKAERGGLSELDKAGFIKRQLVETRQITKHVAQILDSRMNTKYDENDKLIREVKVITLKSKLVSDFRKDFQFYKVREINNYHHAHDAYLNAVVGTALIKKYPKLESEFVYGDYKVYDVRKMIAKSEQEIGKATAKYFFYSNIMNFFKTEITLANGEIRKRPLIETNGETGEIVWDKGRDFATVRKVLSMPQVNIVKKTEVQTGGFSKESILPKRNSDKLIARKKDWDPKKYGGFDSPTVAYSVLVVAKVEKGKSKKLKSVKELLGITIMERSSFEKNPIDFLEAKGYKEVKKDLIIKLPKYSLFELENGRKRMLASAGELQKGNELALPSKYVNFLYLASHYEKLKGSPEDNEQKQLFVEQHKHYLDEIIEQISEFSKRVILADANLDKVLSAYNKHRDKPIREQAENIIHLFTLTNLGAPAAFKYFDTTIDRKRYTSTKEVLDATLIHQSITGLYETRIDLSQLGGDGGPAPAPAPAPAPGGVPWILKKPLELTIKLDLEEQQGTLLNNSILSKKGKEELKQLFEKYSALWQSWENQVGHRRIRPHKIATGTVKPTPQKQYHINPKAKPDIQIVINDLLKQGVLIQKESTMNTPVYPVPKPNGRWRMVLDYRAVNKVTPLIAVQNQHSYGILGSLFKGRYKTTIDLSNGFWAHPIVPEDYWITAFTWQGKQYCWTVLPQGFLNSPGLFTGDVVDLLQGIPNVEVYVDDVYISHDSEKEHLEYLDILFNRLKEAGYIISLKKSNIANSIVDFLGFQITNEGRGLTDTFKEKLENITAPTTLKQLQSILGLLNFARNFIPDFTELIAPLYALIPKSTKNYVPWQIEHSTTLETLITKLNGAEYLQGRKGDKTLIMKVNASYTTGYIRYYNEGEKKPISYVSIVFSKTELKFTELEKLLTTVHKGLLKALDLSMGQNIHVYSPIVSMQNIQKTPQTAKKALASRWLSWLSYLEDPRIRFFYDPQMPALKDLPAVDTGKDNKKHPSNFQHIFYTDGSAITSPTKEGHLNAGMGIVYFINKDGNLQKQQEWSISLGNHTAQFAEIAAFEFALKKCLPLGGNILVVTDSNYVAKAYNEELDVWASNGFVNNRKKPLKHISKWKSVADLKRLRPDVVVTHEPGHQKLDSSPHAYGNNLADQLATQASFKVHAGKRTADGSEFEKRTADGSEFESPKKKAKVE

SEQ ID NO: 786 - protein, 2085 aa, synthetic construct
MPAAKRVKLDGGDKKYSIGLDIGTNSVGWAVITDEYKVPSKKFKVLGNTDRHSIKKNLIGALLFDSGETAEATRLKRTARRRYTRRKNRICYLQEIFSNEMAKVDDSFFHRLEESFLVEEDKKHERHPIFGNIVDEVAYHEKYPTIYHLRKKLVDSTDKADLRLIYLALAHMIKFRGHFLIEGDLNPDNSDVDKLFIQLVQTYNQLFEENPINASGVDAKAILSARLSKSRRLENLIAQLPGEKKNGLFGNLIALSLGLTPNFKSNFDLAEDAKLQLSKDTYDDDLDNLLAQIGDQYADLFLAAKNLSDAILLSDILRVNTEITKAPLSASMIKRYDEHHQDLTLLKALVRQQLPEKYKEIFFDQSKNGYAGYIDGGASQEEFYKFIKPILEKMDGTEELLVKLNREDLLRKQRTFDNGSIPHQIHLGELHAILRRQEDFYPFLKDNREKIEKILTFRIPYYVGPLARGNSRFAWMTRKSEETITPWNFEEVVDKGASAQSFIERMTNFDKNLPNEKVLPKHSLLYEYFTVYNELTKVKYVTEGMRKPAFLSGEQKKAIVDLLFKTNRKVTVKQLKEDYFKKIECFDSVEISGVEDRFNASLGTYHDLLKIIKDKDFLDNEENEDILEDIVLTLTLFEDREMIEERLKTYAHLFDDKVMKQLKRRRYTGWGRLSRKLINGIRDKQSGKTILDFLKSDGFANRNFMQLIHDDSLTFKEDIQKAQVSGQGDSLHEHIANLAGSPAIKKGILQTVKVVDELVKVMGRHKPENIVIEMARENQTTQKGQKNSRERMKRIEEGIKELGSQILKEHPVENTQLQNEKLYLYYLQNGRDMYVDQELDINRLSDYDVDHIVPQSFLKDDSIDNKVLTRSDKARGKSDNVPSEEVVKKMKNYWRQLLNAKLITQRKFDNLTKAERGGLSELDKAGFIKRQLVETRQITKHVAQILDSRMNTKYDENDKLIREVKVITLKSKLVSDFRKDFQFYKVREINNYHHAHDAYLNAVVGTALIKKYPKLESEFVYGDYKVYDVRKMIAKSEQEIGKATAKYFFYSNIMNFFKTEITLANGEIRKRPLIETNGETGEIVWDKGRDFATVRKVLSMPQVNIVKKTEVQTGGFSKESILPKRNSDKLIARKKDWDPKKYGGFDSPTVAYSVLVVAKVEKGKSKKLKSVKELLGITIMERSSFEKNPIDFLEAKGYKEVKKDLIIKLPKYSLFELENGRKRMLASAGELQKGNELALPSKYVNFLYLASHYEKLKGSPEDNEQKQLFVEQHKHYLDEIIEQISEFSKRVILADANLDKVLSAYNKHRDKPIREQAENIIHLFTLTNLGAPAAFKYFDTTIDRKRYTSTKEVLDATLIHQSITGLYETRIDLSQLGGDGGGGSGGSGGSGGVPWILKKPLELTIKLDLEEQQGTLLNNSILSKKGKEELKQLFEKYSALWQSWENQVGHRRIRPHKIATGTVKPTPQKQYHINPKAKPDIQIVINDLLKQGVLIQKESTMNTPVYPVPKPNGRWRMVLDYRAVNKVTPLIAVQNQHSYGILGSLFKGRYKTTIDLSNGFWAHPIVPEDYWITAFTWQGKQYCWTVLPQGFLNSPGLFTGDVVDLLQGIPNVEVYVDDVYISHDSEKEHLEYLDILFNRLKEAGYIISLKKSNIANSIVDFLGFQITNEGRGLTDTFKEKLENITAPTTLKQLQSILGLLNFARNFIPDFTELIAPLYALIPKSTKNYVPWQIEHSTTLETLITKLNGAEYLQGRKGDKTLIMKVNASYTTGYIRYYNEGEKKPISYVSIVFSKTELKFTELEKLLTTVHKGLLKALDLSMGQNIHVYSPIVSMQNIQKTPQTAKKALASRWLSWLSYLEDPRIRFFYDPQMPALKDLPAVDTGKDNKKHPSNFQHIFYTDGSAITSPTKEGHLNAGMGIVYFINKDGNLQKQQEWSISLGNHTAQFAEIAAFEFALKKCLPLGGNILVVTDSNYVAKAYNEELDVWASNGFVNNRKKPLKHISKWKSVADLKRLRPDVVVTHEPGHQKLDSSPHAYGNNLADQLATQASFKVHAGKRTADGSEFEKRTADGSEFESPKKKAKVE

SEQ ID NO: 787 - protein, 2085 aa, synthetic construct
MPAAKRVKLDGGDKKYSIGLDIGTNSVGWAVITDEYKVPSKKFKVLGNTDRHSIKKNLIGALLFDSGETAEATRLKRTARRRYTRRKNRICYLQEIFSNEMAKVDDSFFHRLEESFLVEEDKKHERHPIFGNIVDEVAYHEKYPTIYHLRKKLVDSTDKADLRLIYLALAHMIKFRGHFLIEGDLNPDNSDVDKLFIQLVQTYNQLFEENPINASGVDAKAILSARLSKSRRLENLIAQLPGEKKNGLFGNLIALSLGLTPNFKSNFDLAEDAKLQLSKDTYDDDLDNLLAQIGDQYADLFLAAKNLSDAILLSDILRVNTEITKAPLSASMIKRYDEHHQDLTLLKALVRQQLPEKYKEIFFDQSKNGYAGYIDGGASQEEFYKFIKPILEKMDGTEELLVKLNREDLLRKQRTFDNGSIPHQIHLGELHAILRRQEDFYPFLKDNREKIEKILTFRIPYYVGPLARGNSRFAWMTRKSEETITPWNFEEVVDKGASAQSFIERMTNFDKNLPNEKVLPKHSLLYEYFTVYNELTKVKYVTEGMRKPAFLSGEQKKAIVDLLFKTNRKVTVKQLKEDYFKKIECFDSVEISGVEDRFNASLGTYHDLLKIIKDKDFLDNEENEDILEDIVLTLTLFEDREMIEERLKTYAHLFDDKVMKQLKRRRYTGWGRLSRKLINGIRDKQSGKTILDFLKSDGFANRNFMQLIHDDSLTFKEDIQKAQVSGQGDSLHEHIANLAGSPAIKKGILQTVKVVDELVKVMGRHKPENIVIEMARENQTTQKGQKNSRERMKRIEEGIKELGSQILKEHPVENTQLQNEKLYLYYLQNGRDMYVDQELDINRLSDYDVDHIVPQSFLKDDSIDNKVLTRSDKARGKSDNVPSEEVVKKMKNYWRQLLNAKLITQRKFDNLTKAERGGLSELDKAGFIKRQLVETRQITKHVAQILDSRMNTKYDENDKLIREVKVITLKSKLVSDFRKDFQFYKVREINNYHHAHDAYLNAVVGTALIKKYPKLESEFVYGDYKVYDVRKMIAKSEQEIGKATAKYFFYSNIMNFFKTEITLANGEIRKRPLIETNGETGEIVWDKGRDFATVRKVLSMPQVNIVKKTEVQTGGFSKESILPKRNSDKLIARKKDWDPKKYGGFDSPTVAYSVLVVAKVEKGKSKKLKSVKELLGITIMERSSFEKNPIDFLEAKGYKEVKKDLIIKLPKYSLFELENGRKRMLASAGELQKGNELALPSKYVNFLYLASHYEKLKGSPEDNEQKQLFVEQHKHYLDEIIEQISEFSKRVILADANLDKVLSAYNKHRDKPIREQAENIIHLFTLTNLGAPAAFKYFDTTIDRKRYTSTKEVLDATLIHQSITGLYETRIDLSQLGGDGGGSSGGSGGGGGVPWILKKPLELTIKLDLEEQQGTLLNNSILSKKGKEELKQLFEKYSALWQSWENQVGHRRIRPHKIATGTVKPTPQKQYHINPKAKPDIQIVINDLLKQGVLIQKESTMNTPVYPVPKPNGRWRMVLDYRAVNKVTPLIAVQNQHSYGILGSLFKGRYKTTIDLSNGFWAHPIVPEDYWITAFTWQGKQYCWTVLPQGFLNSPGLFTGDVVDLLQGIPNVEVYVDDVYISHDSEKEHLEYLDILFNRLKEAGYIISLKKSNIANSIVDFLGFQITNEGRGLTDTFKEKLENITAPTTLKQLQSILGLLNFARNFIPDFTELIAPLYALIPKSTKNYVPWQIEHSTTLETLITKLNGAEYLQGRKGDKTLIMKVNASYTTGYIRYYNEGEKKPISYVSIVFSKTELKFTELEKLLTTVHKGLLKALDLSMGQNIHVYSPIVSMQNIQKTPQTAKKALASRWLSWLSYLEDPRIRFFYDPQMPALKDLPAVDTGKDNKKHPSNFQHIFYTDGSAITSPTKEGHLNAGMGIVYFINKDGNLQKQQEWSISLGNHTAQFAEIAAFEFALKKCLPLGGNILVVTDSNYVAKAYNEELDVWASNGFVNNRKKPLKHISKWKSVADLKRLRPDVVVTHEPGHQKLDSSPHAYGNNLADQLATQASFKVHAGKRTADGSEFEKRTADGSEFESPKKKAKVE

SEQ ID NO: 788 - protein, 2082 aa, synthetic construct
MPAAKRVKLDGGDKKYSIGLDIGTNSVGWAVITDEYKVPSKKFKVLGNTDRHSIKKNLIGALLFDSGETAEATRLKRTARRRYTRRKNRICYLQEIFSNEMAKVDDSFFHRLEESFLVEEDKKHERHPIFGNIVDEVAYHEKYPTIYHLRKKLVDSTDKADLRLIYLALAHMIKFRGHFLIEGDLNPDNSDVDKLFIQLVQTYNQLFEENPINASGVDAKAILSARLSKSRRLENLIAQLPGEKKNGLFGNLIALSLGLTPNFKSNFDLAEDAKLQLSKDTYDDDLDNLLAQIGDQYADLFLAAKNLSDAILLSDILRVNTEITKAPLSASMIKRYDEHHQDLTLLKALVRQQLPEKYKEIFFDQSKNGYAGYIDGGASQEEFYKFIKPILEKMDGTEELLVKLNREDLLRKQRTFDNGSIPHQIHLGELHAILRRQEDFYPFLKDNREKIEKILTFRIPYYVGPLARGNSRFAWMTRKSEETITPWNFEEVVDKGASAQSFIERMTNFDKNLPNEKVLPKHSLLYEYFTVYNELTKVKYVTEGMRKPAFLSGEQKKAIVDLLFKTNRKVTVKQLKEDYFKKIECFDSVEISGVEDRFNASLGTYHDLLKIIKDKDFLDNEENEDILEDIVLTLTLFEDREMIEERLKTYAHLFDDKVMKQLKRRRYTGWGRLSRKLINGIRDKQSGKTILDFLKSDGFANRNFMQLIHDDSLTFKEDIQKAQVSGQGDSLHEHIANLAGSPAIKKGILQTVKVVDELVKVMGRHKPENIVIEMARENQTTQKGQKNSRERMKRIEEGIKELGSQILKEHPVENTQLQNEKLYLYYLQNGRDMYVDQELDINRLSDYDVDHIVPQSFLKDDSIDNKVLTRSDKARGKSDNVPSEEVVKKMKNYWRQLLNAKLITQRKFDNLTKAERGGLSELDKAGFIKRQLVETRQITKHVAQILDSRMNTKYDENDKLIREVKVITLKSKLVSDFRKDFQFYKVREINNYHHAHDAYLNAVVGTALIKKYPKLESEFVYGDYKVYDVRKMIAKSEQEIGKATAKYFFYSNIMNFFKTEITLANGEIRKRPLIETNGETGEIVWDKGRDFATVRKVLSMPQVNIVKKTEVQTGGFSKESILPKRNSDKLIARKKDWDPKKYGGFDSPTVAYSVLVVAKVEKGKSKKLKSVKELLGITIMERSSFEKNPIDFLEAKGYKEVKKDLIIKLPKYSLFELENGRKRMLASAGELQKGNELALPSKYVNFLYLASHYEKLKGSPEDNEQKQLFVEQHKHYLDEIIEQISEFSKRVILADANLDKVLSAYNKHRDKPIREQAENIIHLFTLTNLGAPAAFKYFDTTIDRKRYTSTKEVLDATLIHQSITGLYETRIDLSQLGGDGGGGSGGSGGVPWILKKPLELTIKLDLEEQQGTLLNNSILSKKGKEELKQLFEKYSALWQSWENQVGHRRIRPHKIATGTVKPTPQKQYHINPKAKPDIQIVINDLLKQGVLIQKESTMNTPVYPVPKPNGRWRMVLDYRAVNKVTPLIAVQNQHSYGILGSLFKGRYKTTIDLSNGFWAHPIVPEDYWITAFTWQGKQYCWTVLPQGFLNSPGLFTGDVVDLLQGIPNVEVYVDDVYISHDSEKEHLEYLDILFNRLKEAGYIISLKKSNIANSIVDFLGFQITNEGRGLTDTFKEKLENITAPTTLKQLQSILGLLNFARNFIPDFTELIAPLYALIPKSTKNYVPWQIEHSTTLETLITKLNGAEYLQGRKGDKTLIMKVNASYTTGYIRYYNEGEKKPISYVSIVFSKTELKFTELEKLLTTVHKGLLKALDLSMGQNIHVYSPIVSMQNIQKTPQTAKKALASRWLSWLSYLEDPRIRFFYDPQMPALKDLPAVDTGKDNKKHPSNFQHIFYTDGSAITSPTKEGHLNAGMGIVYFINKDGNLQKQQEWSISLGNHTAQFAEIAAFEFALKKCLPLGGNILVVTDSNYVAKAYNEELDVWASNGFVNNRKKPLKHISKWKSVADLKRLRPDVVVTHEPGHQKLDSSPHAYGNNLADQLATQASFKVHAGKRTADGSEFEKRTADGSEFESPKKKAKVE

SEQ ID NO: 789 - protein, 2073 aa, synthetic construct
MPAAKRVKLDGGDKKYSIGLDIGTNSVGWAVITDEYKVPSKKFKVLGNTDRHSIKKNLIGALLFDSGETAEATRLKRTARRRYTRRKNRICYLQEIFSNEMAKVDDSFFHRLEESFLVEEDKKHERHPIFGNIVDEVAYHEKYPTIYHLRKKLVDSTDKADLRLIYLALAHMIKFRGHFLIEGDLNPDNSDVDKLFIQLVQTYNQLFEENPINASGVDAKAILSARLSKSRRLENLIAQLPGEKKNGLFGNLIALSLGLTPNFKSNFDLAEDAKLQLSKDTYDDDLDNLLAQIGDQYADLFLAAKNLSDAILLSDILRVNTEITKAPLSASMIKRYDEHHQDLTLLKALVRQQLPEKYKEIFFDQSKNGYAGYIDGGASQEEFYKFIKPILEKMDGTEELLVKLNREDLLRKQRTFDNGSIPHQIHLGELHAILRRQEDFYPFLKDNREKIEKILTFRIPYYVGPLARGNSRFAWMTRKSEETITPWNFEEVVDKGASAQSFIERMTNFDKNLPNEKVLPKHSLLYEYFTVYNELTKVKYVTEGMRKPAFLSGEQKKAIVDLLFKTNRKVTVKQLKEDYFKKIECFDSVEISGVEDRFNASLGTYHDLLKIIKDKDFLDNEENEDILEDIVLTLTLFEDREMIEERLKTYAHLFDDKVMKQLKRRRYTGWGRLSRKLINGIRDKQSGKTILDFLKSDGFANRNFMQLIHDDSLTFKEDIQKAQVSGQGDSLHEHIANLAGSPAIKKGILQTVKVVDELVKVMGRHKPENIVIEMARENQTTQKGQKNSRERMKRIEEGIKELGSQILKEHPVENTQLQNEKLYLYYLQNGRDMYVDQELDINRLSDYDVDHIVPQSFLKDDSIDNKVLTRSDKARGKSDNVPSEEVVKKMKNYWRQLLNAKLITQRKFDNLTKAERGGLSELDKAGFIKRQLVETRQITKHVAQILDSRMNTKYDENDKLIREVKVITLKSKLVSDFRKDFQFYKVREINNYHHAHDAYLNAVVGTALIKKYPKLESEFVYGDYKVYDVRKMIAKSEQEIGKATAKYFFYSNIMNFFKTEITLANGEIRKRPLIETNGETGEIVWDKGRDFATVRKVLSMPQVNIVKKTEVQTGGFSKESILPKRNSDKLIARKKDWDPKKYGGFDSPTVAYSVLVVAKVEKGKSKKLKSVKELLGITIMERSSFEKNPIDFLEAKGYKEVKKDLIIKLPKYSLFELENGRKRMLASAGELQKGNELALPSKYVNFLYLASHYEKLKGSPEDNEQKQLFVEQHKHYLDEIIEQISEFSKRVILADANLDKVLSAYNKHRDKPIREQAENIIHLFTLTNLGAPAAFKYFDTTIDRKRYTSTKEVLDATLIHQSITGLYETRIDLSQLGGDGGPAPGGGGSSGGSCQTKNTLNIDEYLLQFPDQLWASLPTDIGRMLVPPITIKIKDNASLPSIRQYPLPKDKTEGLRPLISSLENQGILIKCHSPCNTPIFPIKKAGRDEYRMIHDLRAINNIVAPLTAVVASPTTVLSNLAPSLHWFTVIDLSNAFFSVPIHKDSQYLFAFTFEGHQYTWTVLPQGFIHSPTLFNQALYQSLHKIKFKISSEICIYMDDVLIASKDRDTNLKDTAVMLQHLASEGHKVSKKKLQLCQQEVVYLGQLLTPEGRKILPDRKVTVSQFQQPTTIRQIRAFLGKVGYCRHFIPEFSIHSKFLEKQLKPDTAEPFQLDDQQVEAFNKLKHAITTAPVLVVPDPAKPFQLYTSHSEHASIAVLTQKHAGRTRPIAFLSSKFDAIESGLPPCLKACASIHRSLTQADSFILGAPLIIYTTHAICTLLQRDRSQLVTASRFSKWEADLLRPELTFVACSAVSPAHLYMQSCENNIPPHDCVLLTHTISRPRPDLSDLPIPDPDMTLFSDGSYTTGRGGAAVVMHRPVTDDFIIIHQQPGGASAQTAELLALAAACHLATDKTVNIYTDSRYAYGVVHDFGHLWMHRGFVTSAGTPIKNHKEIEYLLKQIMKPKQVSVIKIEAHTKGVSMEVRGNAAADEAAKNAVFLVQRAGKRTADGSEFEKRTADGSEFESPKKKAKVE

SEQ ID NO: 790 - protein, 2094 aa, synthetic construct
MPAAKRVKLDGGDKKYSIGLDIGTNSVGWAVITDEYKVPSKKFKVLGNTDRHSIKKNLIGALLFDSGETAEATRLKRTARRRYTRRKNRICYLQEIFSNEMAKVDDSFFHRLEESFLVEEDKKHERHPIFGNIVDEVAYHEKYPTIYHLRKKLVDSTDKADLRLIYLALAHMIKFRGHFLIEGDLNPDNSDVDKLFIQLVQTYNQLFEENPINASGVDAKAILSARLSKSRRLENLIAQLPGEKKNGLFGNLIALSLGLTPNFKSNFDLAEDAKLQLSKDTYDDDLDNLLAQIGDQYADLFLAAKNLSDAILLSDILRVNTEITKAPLSASMIKRYDEHHQDLTLLKALVRQQLPEKYKEIFFDQSKNGYAGYIDGGASQEEFYKFIKPILEKMDGTEELLVKLNREDLLRKQRTFDNGSIPHQIHLGELHAILRRQEDFYPFLKDNREKIEKILTFRIPYYVGPLARGNSRFAWMTRKSEETITPWNFEEVVDKGASAQSFIERMTNFDKNLPNEKVLPKHSLLYEYFTVYNELTKVKYVTEGMRKPAFLSGEQKKAIVDLLFKTNRKVTVKQLKEDYFKKIECFDSVEISGVEDRFNASLGTYHDLLKIIKDKDFLDNEENEDILEDIVLTLTLFEDREMIEERLKTYAHLFDDKVMKQLKRRRYTGWGRLSRKLINGIRDKQSGKTILDFLKSDGFANRNFMQLIHDDSLTFKEDIQKAQVSGQGDSLHEHIANLAGSPAIKKGILQTVKVVDELVKVMGRHKPENIVIEMARENQTTQKGQKNSRERMKRIEEGIKELGSQILKEHPVENTQLQNEKLYLYYLQNGRDMYVDQELDINRLSDYDVDHIVPQSFLKDDSIDNKVLTRSDKARGKSDNVPSEEVVKKMKNYWRQLLNAKLITQRKFDNLTKAERGGLSELDKAGFIKRQLVETRQITKHVAQILDSRMNTKYDENDKLIREVKVITLKSKLVSDFRKDFQFYKVREINNYHHAHDAYLNAVVGTALIKKYPKLESEFVYGDYKVYDVRKMIAKSEQEIGKATAKYFFYSNIMNFFKTEITLANGEIRKRPLIETNGETGEIVWDKGRDFATVRKVLSMPQVNIVKKTEVQTGGFSKESILPKRNSDKLIARKKDWDPKKYGGFDSPTVAYSVLVVAKVEKGKSKKLKSVKELLGITIMERSSFEKNPIDFLEAKGYKEVKKDLIIKLPKYSLFELENGRKRMLASAGELQKGNELALPSKYVNFLYLASHYEKLKGSPEDNEQKQLFVEQHKHYLDEIIEQISEFSKRVILADANLDKVLSAYNKHRDKPIREQAENIIHLFTLTNLGAPAAFKYFDTTIDRKRYTSTKEVLDATLIHQSITGLYETRIDLSQLGGDGGGGGEAAAKPAPGGVLNLEEEYRLHEKPVPSSIDPSWLQLFPTVWAERAGMGLANQVPPVVVELRSGASPVAVRQYPMSKEAREGIRPHIQRFLDLGVLVPCQSPWNTPLLPVKKPGTNDYRPVQDLREINKRVQDIHPTVPNPYNLLSSLPPSHTWYSVLDLKDAFFCLKLHPNSQPLFAFEWRDPEKGNTGQLTWTRLPQGFKNSPTLFDEALHRDLAPFRALNPQVVLLQYVDDLLVAAPTYRDCKEGTQKLLQELSKLGYRVSAKKAQLCQKEVTYLGYLLKEGKRWLTPARKATVMKIPPPTTPRQVREFLGTAGFCRLWIPGFASLAAPLYPLTKESIPFIWTEEHQKAFDRIKEALLSAPALALPDLTKPFTLYVDERAGVARGVLTQTLGPWRRPVAYLSKKLDPVASGWPTCLKAVAAVALLLKDADKLTLGQNVTVIASHSLESIVRQPPDRWMTNARMTHYQSLLLNERVSFAPPAVLNPATLLPVESEATPVHRCSEILAEETGTRRDLKDQPLPGVPAWYTDGSSFIAEGKRRAGAAIVDGKRTVWASSLPEGTSAQKAELVALTQALRLAEGKDINIYTDSRYAFATAHIHGAIYKQRGLLTSAGKDIKNKEEILALLEAIHLPKRVAIIHCPGHQKGNDPVATGNRRADEAAKQAALSTRVLAETTKPAGKRTADGSEFEKRTADGSEFESPKKKAKVE

SEQ ID NO: 791 - protein, 2094 aa, synthetic construct
MPAAKRVKLDGGDKKYSIGLDIGTNSVGWAVITDEYKVPSKKFKVLGNTDRHSIKKNLIGALLFDSGETAEATRLKRTARRRYTRRKNRICYLQEIFSNEMAKVDDSFFHRLEESFLVEEDKKHERHPIFGNIVDEVAYHEKYPTIYHLRKKLVDSTDKADLRLIYLALAHMIKFRGHFLIEGDLNPDNSDVDKLFIQLVQTYNQLFEENPINASGVDAKAILSARLSKSRRLENLIAQLPGEKKNGLFGNLIALSLGLTPNFKSNFDLAEDAKLQLSKDTYDDDLDNLLAQIGDQYADLFLAAKNLSDAILLSDILRVNTEITKAPLSASMIKRYDEHHQDLTLLKALVRQQLPEKYKEIFFDQSKNGYAGYIDGGASQEEFYKFIKPILEKMDGTEELLVKLNREDLLRKQRTFDNGSIPHQIHLGELHAILRRQEDFYPFLKDNREKIEKILTFRIPYYVGPLARGNSRFAWMTRKSEETITPWNFEEVVDKGASAQSFIERMTNFDKNLPNEKVLPKHSLLYEYFTVYNELTKVKYVTEGMRKPAFLSGEQKKAIVDLLFKTNRKVTVKQLKEDYFKKIECFDSVEISGVEDRFNASLGTYHDLLKIIKDKDFLDNEENEDILEDIVLTLTLFEDREMIEERLKTYAHLFDDKVMKQLKRRRYTGWGRLSRKLINGIRDKQSGKTILDFLKSDGFANRNFMQLIHDDSLTFKEDIQKAQVSGQGDSLHEHIANLAGSPAIKKGILQTVKVVDELVKVMGRHKPENIVIEMARENQTTQKGQKNSRERMKRIEEGIKELGSQILKEHPVENTQLQNEKLYLYYLQNGRDMYVDQELDINRLSDYDVDHIVPQSFLKDDSIDNKVLTRSDKARGKSDNVPSEEVVKKMKNYWRQLLNAKLITQRKFDNLTKAERGGLSELDKAGFIKRQLVETRQITKHVAQILDSRMNTKYDENDKLIREVKVITLKSKLVSDFRKDFQFYKVREINNYHHAHDAYLNAVVGTALIKKYPKLESEFVYGDYKVYDVRKMIAKSEQEIGKATAKYFFYSNIMNFFKTEITLANGEIRKRPLIETNGETGEIVWDKGRDFATVRKVLSMPQVNIVKKTEVQTGGFSKESILPKRNSDKLIARKKDWDPKKYGGFDSPTVAYSVLVVAKVEKGKSKKLKSVKELLGITIMERSSFEKNPIDFLEAKGYKEVKKDLIIKLPKYSLFELENGRKRMLASAGELQKGNELALPSKYVNFLYLASHYEKLKGSPEDNEQKQLFVEQHKHYLDEIIEQISEFSKRVILADANLDKVLSAYNKHRDKPIREQAENIIHLFTLTNLGAPAAFKYFDTTIDRKRYTSTKEVLDATLIHQSITGLYETRIDLSQLGGDGGGSSGGGEAAAKGGVLNLEEEYRLHEKPVPSSIDPSWLQLFPTVWAERAGMGLANQVPPVVVELRSGASPVAVRQYPMSKEAREGIRPHIQRFLDLGVLVPCQSPWNTPLLPVKKPGTNDYRPVQDLREINKRVQDIHPTVPNPYNLLSSLPPSHTWYSVLDLKDAFFCLKLHPNSQPLFAFEWRDPEKGNTGQLTWTRLPQGFKNSPTLFDEALHRDLAPFRALNPQVVLLQYVDDLLVAAPTYRDCKEGTQKLLQELSKLGYRVSAKKAQLCQKEVTYLGYLLKEGKRWLTPARKATVMKIPPPTTPRQVREFLGTAGFCRLWIPGFASLAAPLYPLTKESIPFIWTEEHQKAFDRIKEALLSAPALALPDLTKPFTLYVDERAGVARGVLTQTLGPWRRPVAYLSKKLDPVASGWPTCLKAVAAVALLLKDADKLTLGQNVTVIASHSLESIVRQPPDRWMTNARMTHYQSLLLNERVSFAPPAVLNPATLLPVESEATPVHRCSEILAEETGTRRDLKDQPLPGVPAWYTDGSSFIAEGKRRAGAAIVDGKRTVWASSLPEGTSAQKAELVALTQALRLAEGKDINIYTDSRYAFATAHIHGAIYKQRGLLTSAGKDIKNKEEILALLEAIHLPKRVAIIHCPGHQKGNDPVATGNRRADEAAKQAALSTRVLAETTKPAGKRTADGSEFEKRTADGSEFESPKKKAKVE

SEQ ID NO: 792 - protein, 2092 aa, synthetic construct
MPAAKRVKLDGGDKKYSIGLDIGTNSVGWAVITDEYKVPSKKFKVLGNTDRHSIKKNLIGALLFDSGETAEATRLKRTARRRYTRRKNRICYLQEIFSNEMAKVDDSFFHRLEESFLVEEDKKHERHPIFGNIVDEVAYHEKYPTIYHLRKKLVDSTDKADLRLIYLALAHMIKFRGHFLIEGDLNPDNSDVDKLFIQLVQTYNQLFEENPINASGVDAKAILSARLSKSRRLENLIAQLPGEKKNGLFGNLIALSLGLTPNFKSNFDLAEDAKLQLSKDTYDDDLDNLLAQIGDQYADLFLAAKNLSDAILLSDILRVNTEITKAPLSASMIKRYDEHHQDLTLLKALVRQQLPEKYKEIFFDQSKNGYAGYIDGGASQEEFYKFIKPILEKMDGTEELLVKLNREDLLRKQRTFDNGSIPHQIHLGELHAILRRQEDFYPFLKDNREKIEKILTFRIPYYVGPLARGNSRFAWMTRKSEETITPWNFEEVVDKGASAQSFIERMTNFDKNLPNEKVLPKHSLLYEYFTVYNELTKVKYVTEGMRKPAFLSGEQKKAIVDLLFKTNRKVTVKQLKEDYFKKIECFDSVEISGVEDRFNASLGTYHDLLKIIKDKDFLDNEENEDILEDIVLTLTLFEDREMIEERLKTYAHLFDDKVMKQLKRRRYTGWGRLSRKLINGIRDKQSGKTILDFLKSDGFANRNFMQLIHDDSLTFKEDIQKAQVSGQGDSLHEHIANLAGSPAIKKGILQTVKVVDELVKVMGRHKPENIVIEMARENQTTQKGQKNSRERMKRIEEGIKELGSQILKEHPVENTQLQNEKLYLYYLQNGRDMYVDQELDINRLSDYDVDHIVPQSFLKDDSIDNKVLTRSDKARGKSDNVPSEEVVKKMKNYWRQLLNAKLITQRKFDNLTKAERGGLSELDKAGFIKRQLVETRQITKHVAQILDSRMNTKYDENDKLIREVKVITLKSKLVSDFRKDFQFYKVREINNYHHAHDAYLNAVVGTALIKKYPKLESEFVYGDYKVYDVRKMIAKSEQEIGKATAKYFFYSNIMNFFKTEITLANGEIRKRPLIETNGETGEIVWDKGRDFATVRKVLSMPQVNIVKKTEVQTGGFSKESILPKRNSDKLIARKKDWDPKKYGGFDSPTVAYSVLVVAKVEKGKSKKLKSVKELLGITIMERSSFEKNPIDFLEAKGYKEVKKDLIIKLPKYSLFELENGRKRMLASAGELQKGNELALPSKYVNFLYLASHYEKLKGSPEDNEQKQLFVEQHKHYLDEIIEQISEFSKRVILADANLDKVLSAYNKHRDKPIREQAENIIHLFTLTNLGAPAAFKYFDTTIDRKRYTSTKEVLDATLIHQSITGLYETRIDLSQLGGDGGGGSGGGGSSGGVLNLEEEYRLHEKPVPSSIDPSWLQLFPTVWAERAGMGLANQVPPVVVELRSGASPVAVRQYPMSKEAREGIRPHIQRFLDLGVLVPCQSPWNTPLLPVKKPGTNDYRPVQDLREINKRVQDIHPTVPNPYNLLSSLPPSHTWYSVLDLKDAFFCLKLHPNSQPLFAFEWRDPEKGNTGQLTWTRLPQGFKNSPTLFDEALHRDLAPFRALNPQVVLLQYVDDLLVAAPTYRDCKEGTQKLLQELSKLGYRVSAKKAQLCQKEVTYLGYLLKEGKRWLTPARKATVMKIPPPTTPRQVREFLGTAGFCRLWIPGFASLAAPLYPLTKESIPFIWTEEHQKAFDRIKEALLSAPALALPDLTKPFTLYVDERAGVARGVLTQTLGPWRRPVAYLSKKLDPVASGWPTCLKAVAAVALLLKDADKLTLGQNVTVIASHSLESIVRQPPDRWMTNARMTHYQSLLLNERVSFAPPAVLNPATLLPVESEATPVHRCSEILAEETGTRRDLKDQPLPGVPAWYTDGSSFIAEGKRRAGAAIVDGKRTVWASSLPEGTSAQKAELVALTQALRLAEGKDINIYTDSRYAFATAHIHGAIYKQRGLLTSAGKDIKNKEEILALLEAIHLPKRVAIIHCPGHQKGNDPVATGNRRADEAAKQAALSTRVLAETTKPAGKRTADGSEFEKRTADGSEFESPKKKAKVE

SEQ ID NO: 793 - protein, 2094 aa, synthetic construct
MPAAKRVKLDGGDKKYSIGLDIGTNSVGWAVITDEYKVPSKKFKVLGNTDRHSIKKNLIGALLFDSGETAEATRLKRTARRRYTRRKNRICYLQEIFSNEMAKVDDSFFHRLEESFLVEEDKKHERHPIFGNIVDEVAYHEKYPTIYHLRKKLVDSTDKADLRLIYLALAHMIKFRGHFLIEGDLNPDNSDVDKLFIQLVQTYNQLFEENPINASGVDAKAILSARLSKSRRLENLIAQLPGEKKNGLFGNLIALSLGLTPNFKSNFDLAEDAKLQLSKDTYDDDLDNLLAQIGDQYADLFLAAKNLSDAILLSDILRVNTEITKAPLSASMIKRYDEHHQDLTLLKALVRQQLPEKYKEIFFDQSKNGYAGYIDGGASQEEFYKFIKPILEKMDGTEELLVKLNREDLLRKQRTFDNGSIPHQIHLGELHAILRRQEDFYPFLKDNREKIEKILTFRIPYYVGPLARGNSRFAWMTRKSEETITPWNFEEVVDKGASAQSFIERMTNFDKNLPNEKVLPKHSLLYEYFTVYNELTKVKYVTEGMRKPAFLSGEQKKAIVDLLFKTNRKVTVKQLKEDYFKKIECFDSVEISGVEDRFNASLGTYHDLLKIIKDKDFLDNEENEDILEDIVLTLTLFEDREMIEERLKTYAHLFDDKVMKQLKRRRYTGWGRLSRKLINGIRDKQSGKTILDFLKSDGFANRNFMQLIHDDSLTFKEDIQKAQVSGQGDSLHEHIANLAGSPAIKKGILQTVKVVDELVKVMGRHKPENIVIEMARENQTTQKGQKNSRERMKRIEEGIKELGSQILKEHPVENTQLQNEKLYLYYLQNGRDMYVDQELDINRLSDYDVDHIVPQSFLKDDSIDNKVLTRSDKARGKSDNVPSEEVVKKMKNYWRQLLNAKLITQRKFDNLTKAERGGLSELDKAGFIKRQLVETRQITKHVAQILDSRMNTKYDENDKLIREVKVITLKSKLVSDFRKDFQFYKVREINNYHHAHDAYLNAVVGTALIKKYPKLESEFVYGDYKVYDVRKMIAKSEQEIGKATAKYFFYSNIMNFFKTEITLANGEIRKRPLIETNGETGEIVWDKGRDFATVRKVLSMPQVNIVKKTEVQTGGFSKESILPKRNSDKLIARKKDWDPKKYGGFDSPTVAYSVLVVAKVEKGKSKKLKSVKELLGITIMERSSFEKNPIDFLEAKGYKEVKKDLIIKLPKYSLFELENGRKRMLASAGELQKGNELALPSKYVNFLYLASHYEKLKGSPEDNEQKQLFVEQHKHYLDEIIEQISEFSKRVILADANLDKVLSAYNKHRDKPIREQAENIIHLFTLTNLGAPAAFKYFDTTIDRKRYTSTKEVLDATLIHQSITGLYETRIDLSQLGGDGGPAPGSSEAAAKGGVLNLEEEYRLHEKPVPSSIDPSWLQLFPTVWAERAGMGLANQVPPVVVELRSGASPVAVRQYPMSKEAREGIRPHIQRFLDLGVLVPCQSPWNTPLLPVKKPGTNDYRPVQDLREINKRVQDIHPTVPNPYNLLSSLPPSHTWYSVLDLKDAFFCLKLHPNSQPLFAFEWRDPEKGNTGQLTWTRLPQGFKNSPTLFDEALHRDLAPFRALNPQVVLLQYVDDLLVAAPTYRDCKEGTQKLLQELSKLGYRVSAKKAQLCQKEVTYLGYLLKEGKRWLTPARKATVMKIPPPTTPRQVREFLGTAGFCRLWIPGFASLAAPLYPLTKESIPFIWTEEHQKAFDRIKEALLSAPALALPDLTKPFTLYVDERAGVARGVLTQTLGPWRRPVAYLSKKLDPVASGWPTCLKAVAAVALLLKDADKLTLGQNVTVIASHSLESIVRQPPDRWMTNARMTHYQSLLLNERVSFAPPAVLNPATLLPVESEATPVHRCSEILAEETGTRRDLKDQPLPGVPAWYTDGSSFIAEGKRRAGAAIVDGKRTVWASSLPEGTSAQKAELVALTQALRLAEGKDINIYTDSRYAFATAHIHGAIYKQRGLLTSAGKDIKNKEEILALLEAIHLPKRVAIIHCPGHQKGNDPVATGNRRADEAAKQAALSTRVLAETTKPAGKRTADGSEFEKRTADGSEFESPKKKAKVE

SEQ ID NO: 794 - protein, 2092 aa, synthetic construct
MPAAKRVKLDGGDKKYSIGLDIGTNSVGWAVITDEYKVPSKKFKVLGNTDRHSIKKNLIGALLFDSGETAEATRLKRTARRRYTRRKNRICYLQEIFSNEMAKVDDSFFHRLEESFLVEEDKKHERHPIFGNIVDEVAYHEKYPTIYHLRKKLVDSTDKADLRLIYLALAHMIKFRGHFLIEGDLNPDNSDVDKLFIQLVQTYNQLFEENPINASGVDAKAILSARLSKSRRLENLIAQLPGEKKNGLFGNLIALSLGLTPNFKSNFDLAEDAKLQLSKDTYDDDLDNLLAQIGDQYADLFLAAKNLSDAILLSDILRVNTEITKAPLSASMIKRYDEHHQDLTLLKALVRQQLPEKYKEIFFDQSKNGYAGYIDGGASQEEFYKFIKPILEKMDGTEELLVKLNREDLLRKQRTFDNGSIPHQIHLGELHAILRRQEDFYPFLKDNREKIEKILTFRIPYYVGPLARGNSRFAWMTRKSEETITPWNFEEVVDKGASAQSFIERMTNFDKNLPNEKVLPKHSLLYEYFTVYNELTKVKYVTEGMRKPAFLSGEQKKAIVDLLFKTNRKVTVKQLKEDYFKKIECFDSVEISGVEDRFNASLGTYHDLLKIIKDKDFLDNEENEDILEDIVLTLTLFEDREMIEERLKTYAHLFDDKVMKQLKRRRYTGWGRLSRKLINGIRDKQSGKTILDFLKSDGFANRNFMQLIHDDSLTFKEDIQKAQVSGQGDSLHEHIANLAGSPAIKKGILQTVKVVDELVKVMGRHKPENIVIEMARENQTTQKGQKNSRERMKRIEEGIKELGSQILKEHPVENTQLQNEKLYLYYLQNGRDMYVDQELDINRLSDYDVDHIVPQSFLKDDSIDNKVLTRSDKARGKSDNVPSEEVVKKMKNYWRQLLNAKLITQRKFDNLTKAERGGLSELDKAGFIKRQLVETRQITKHVAQILDSRMNTKYDENDKLIREVKVITLKSKLVSDFRKDFQFYKVREINNYHHAHDAYLNAVVGTALIKKYPKLESEFVYGDYKVYDVRKMIAKSEQEIGKATAKYFFYSNIMNFFKTEITLANGEIRKRPLIETNGETGEIVWDKGRDFATVRKVLSMPQVNIVKKTEVQTGGFSKESILPKRNSDKLIARKKDWDPKKYGGFDSPTVAYSVLVVAKVEKGKSKKLKSVKELLGITIMERSSFEKNPIDFLEAKGYKEVKKDLIIKLPKYSLFELENGRKRMLASAGELQKGNELALPSKYVNFLYLASHYEKLKGSPEDNEQKQLFVEQHKHYLDEIIEQISEFSKRVILADANLDKVLSAYNKHRDKPIREQAENIIHLFTLTNLGAPAAFKYFDTTIDRKRYTSTKEVLDATLIHQSITGLYETRIDLSQLGGDGGGGSGSSPAPGGVLNLEEEYRLHEKPVPSSIDPSWLQLFPTVWAERAGMGLANQVPPVVVELRSGASPVAVRQYPMSKEAREGIRPHIQRFLDLGVLVPCQSPWNTPLLPVKKPGTNDYRPVQDLREINKRVQDIHPTVPNPYNLLSSLPPSHTWYSVLDLKDAFFCLKLHPNSQPLFAFEWRDPEKGNTGQLTWTRLPQGFKNSPTLFDEALHRDLAPFRALNPQVVLLQYVDDLLVAAPTYRDCKEGTQKLLQELSKLGYRVSAKKAQLCQKEVTYLGYLLKEGKRWLTPARKATVMKIPPPTTPRQVREFLGTAGFCRLWIPGFASLAAPLYPLTKESIPFIWTEEHQKAFDRIKEALLSAPALALPDLTKPFTLYVDERAGVARGVLTQTLGPWRRPVAYLSKKLDPVASGWPTCLKAVAAVALLLKDADKLTLGQNVTVIASHSLESIVRQPPDRWMTNARMTHYQSLLLNERVSFAPPAVLNPATLLPVESEATPVHRCSEILAEETGTRRDLKDQPLPGVPAWYTDGSSFIAEGKRRAGAAIVDGKRTVWASSLPEGTSAQKAELVALTQALRLAEGKDINIYTDSRYAFATAHIHGAIYKQRGLLTSAGKDIKNKEEILALLEAIHLPKRVAIIHCPGHQKGNDPVATGNRRADEAAKQAALSTRVLAETTKPAGKRTADGSEFEKRTADGSEFESPKKKAKVE

SEQ ID NO: 795 - protein, 2096 aa, synthetic construct
MPAAKRVKLDGGDKKYSIGLDIGTNSVGWAVITDEYKVPSKKFKVLGNTDRHSIKKNLIGALLFDSGETAEATRLKRTARRRYTRRKNRICYLQEIFSNEMAKVDDSFFHRLEESFLVEEDKKHERHPIFGNIVDEVAYHEKYPTIYHLRKKLVDSTDKADLRLIYLALAHMIKFRGHFLIEGDLNPDNSDVDKLFIQLVQTYNQLFEENPINASGVDAKAILSARLSKSRRLENLIAQLPGEKKNGLFGNLIALSLGLTPNFKSNFDLAEDAKLQLSKDTYDDDLDNLLAQIGDQYADLFLAAKNLSDAILLSDILRVNTEITKAPLSASMIKRYDEHHQDLTLLKALVRQQLPEKYKEIFFDQSKNGYAGYIDGGASQEEFYKFIKPILEKMDGTEELLVKLNREDLLRKQRTFDNGSIPHQIHLGELHAILRRQEDFYPFLKDNREKIEKILTFRIPYYVGPLARGNSRFAWMTRKSEETITPWNFEEVVDKGASAQSFIERMTNFDKNLPNEKVLPKHSLLYEYFTVYNELTKVKYVTEGMRKPAFLSGEQKKAIVDLLFKTNRKVTVKQLKEDYFKKIECFDSVEISGVEDRFNASLGTYHDLLKIIKDKDFLDNEENEDILEDIVLTLTLFEDREMIEERLKTYAHLFDDKVMKQLKRRRYTGWGRLSRKLINGIRDKQSGKTILDFLKSDGFANRNFMQLIHDDSLTFKEDIQKAQVSGQGDSLHEHIANLAGSPAIKKGILQTVKVVDELVKVMGRHKPENIVIEMARENQTTQKGQKNSRERMKRIEEGIKELGSQILKEHPVENTQLQNEKLYLYYLQNGRDMYVDQELDINRLSDYDVDHIVPQSFLKDDSIDNKVLTRSDKARGKSDNVPSEEVVKKMKNYWRQLLNAKLITQRKFDNLTKAERGGLSELDKAGFIKRQLVETRQITKHVAQILDSRMNTKYDENDKLIREVKVITLKSKLVSDFRKDFQFYKVREINNYHHAHDAYLNAVVGTALIKKYPKLESEFVYGDYKVYDVRKMIAKSEQEIGKATAKYFFYSNIMNFFKTEITLANGEIRKRPLIETNGETGEIVWDKGRDFATVRKVLSMPQVNIVKKTEVQTGGFSKESILPKRNSDKLIARKKDWDPKKYGGFDSPTVAYSVLVVAKVEKGKSKKLKSVKELLGITIMERSSFEKNPIDFLEAKGYKEVKKDLIIKLPKYSLFELENGRKRMLASAGELQKGNELALPSKYVNFLYLASHYEKLKGSPEDNEQKQLFVEQHKHYLDEIIEQISEFSKRVILADANLDKVLSAYNKHRDKPIREQAENIIHLFTLTNLGAPAAFKYFDTTIDRKRYTSTKEVLDATLIHQSITGLYETRIDLSQLGGDGGPAPAPAPAPAPAPGGVLNLEEEYRLHEKPVPSSIDPSWLQLFPTVWAERAGMGLANQVPPVVVELRSGASPVAVRQYPMSKEAREGIRPHIQRFLDLGVLVPCQSPWNTPLLPVKKPGTNDYRPVQDLREINKRVQDIHPTVPNPYNLLSSLPPSHTWYSVLDLKDAFFCLKLHPNSQPLFAFEWRDPEKGNTGQLTWTRLPQGFKNSPTLFDEALHRDLAPFRALNPQVVLLQYVDDLLVAAPTYRDCKEGTQKLLQELSKLGYRVSAKKAQLCQKEVTYLGYLLKEGKRWLTPARKATVMKIPPPTTPRQVREFLGTAGFCRLWIPGFASLAAPLYPLTKESIPFIWTEEHQKAFDRIKEALLSAPALALPDLTKPFTLYVDERAGVARGVLTQTLGPWRRPVAYLSKKLDPVASGWPTCLKAVAAVALLLKDADKLTLGQNVTVIASHSLESIVRQPPDRWMTNARMTHYQSLLLNERVSFAPPAVLNPATLLPVESEATPVHRCSEILAEETGTRRDLKDQPLPGVPAWYTDGSSFIAEGKRRAGAAIVDGKRTVWASSLPEGTSAQKAELVALTQALRLAEGKDINIYTDSRYAFATAHIHGAIYKQRGLLTSAGKDIKNKEEILALLEAIHLPKRVAIIHCPGHQKGNDPVATGNRRADEAAKQAALSTRVLAETTKPAGKRTADGSEFEKRTADGSEFESPKKKAKVE

SEQ ID NO: 796 - protein, 2094 aa, synthetic construct
MPAAKRVKLDGGDKKYSIGLDIGTNSVGWAVITDEYKVPSKKFKVLGNTDRHSIKKNLIGALLFDSGETAEATRLKRTARRRYTRRKNRICYLQEIFSNEMAKVDDSFFHRLEESFLVEEDKKHERHPIFGNIVDEVAYHEKYPTIYHLRKKLVDSTDKADLRLIYLALAHMIKFRGHFLIEGDLNPDNSDVDKLFIQLVQTYNQLFEENPINASGVDAKAILSARLSKSRRLENLIAQLPGEKKNGLFGNLIALSLGLTPNFKSNFDLAEDAKLQLSKDTYDDDLDNLLAQIGDQYADLFLAAKNLSDAILLSDILRVNTEITKAPLSASMIKRYDEHHQDLTLLKALVRQQLPEKYKEIFFDQSKNGYAGYIDGGASQEEFYKFIKPILEKMDGTEELLVKLNREDLLRKQRTFDNGSIPHQIHLGELHAILRRQEDFYPFLKDNREKIEKILTFRIPYYVGPLARGNSRFAWMTRKSEETITPWNFEEVVDKGASAQSFIERMTNFDKNLPNEKVLPKHSLLYEYFTVYNELTKVKYVTEGMRKPAFLSGEQKKAIVDLLFKTNRKVTVKQLKEDYFKKIECFDSVEISGVEDRFNASLGTYHDLLKIIKDKDFLDNEENEDILEDIVLTLTLFEDREMIEERLKTYAHLFDDKVMKQLKRRRYTGWGRLSRKLINGIRDKQSGKTILDFLKSDGFANRNFMQLIHDDSLTFKEDIQKAQVSGQGDSLHEHIANLAGSPAIKKGILQTVKVVDELVKVMGRHKPENIVIEMARENQTTQKGQKNSRERMKRIEEGIKELGSQILKEHPVENTQLQNEKLYLYYLQNGRDMYVDQELDINRLSDYDVDHIVPQSFLKDDSIDNKVLTRSDKARGKSDNVPSEEVVKKMKNYWRQLLNAKLITQRKFDNLTKAERGGLSELDKAGFIKRQLVETRQITKHVAQILDSRMNTKYDENDKLIREVKVITLKSKLVSDFRKDFQFYKVREINNYHHAHDAYLNAVVGTALIKKYPKLESEFVYGDYKVYDVRKMIAKSEQEIGKATAKYFFYSNIMNFFKTEITLANGEIRKRPLIETNGETGEIVWDKGRDFATVRKVLSMPQVNIVKKTEVQTGGFSKESILPKRNSDKLIARKKDWDPKKYGGFDSPTVAYSVLVVAKVEKGKSKKLKSVKELLGITIMERSSFEKNPIDFLEAKGYKEVKKDLIIKLPKYSLFELENGRKRMLASAGELQKGNELALPSKYVNFLYLASHYEKLKGSPEDNEQKQLFVEQHKHYLDEIIEQISEFSKRVILADANLDKVLSAYNKHRDKPIREQAENIIHLFTLTNLGAPAAFKYFDTTIDRKRYTSTKEVLDATLIHQSITGLYETRIDLSQLGGDGGGGSGGGEAAAKGGVLNLEEEYRLHEKPVPSSIDPSWLQLFPTVWAERAGMGLANQVPPVVVELRSGASPVAVRQYPMSKEAREGIRPHIQRFLDLGVLVPCQSPWNTPLLPVKKPGTNDYRPVQDLREINKRVQDIHPTVPNPYNLLSSLPPSHTWYSVLDLKDAFFCLKLHPNSQPLFAFEWRDPEKGNTGQLTWTRLPQGFKNSPTLFDEALHRDLAPFRALNPQVVLLQYVDDLLVAAPTYRDCKEGTQKLLQELSKLGYRVSAKKAQLCQKEVTYLGYLLKEGKRWLTPARKATVMKIPPPTTPRQVREFLGTAGFCRLWIPGFASLAAPLYPLTKESIPFIWTEEHQKAFDRIKEALLSAPALALPDLTKPFTLYVDERAGVARGVLTQTLGPWRRPVAYLSKKLDPVASGWPTCLKAVAAVALLLKDADKLTLGQNVTVIASHSLESIVRQPPDRWMTNARMTHYQSLLLNERVSFAPPAVLNPATLLPVESEATPVHRCSEILAEETGTRRDLKDQPLPGVPAWYTDGSSFIAEGKRRAGAAIVDGKRTVWASSLPEGTSAQKAELVALTQALRLAEGKDINIYTDSRYAFATAHIHGAIYKQRGLLTSAGKDIKNKEEILALLEAIHLPKRVAIIHCPGHQKGNDPVATGNRRADEAAKQAALSTRVLAETTKPAGKRTADGSEFEKRTADGSEFESPKKKAKVE

SEQ ID NO: 797 - protein, 2092 aa, synthetic construct
MPAAKRVKLDGGDKKYSIGLDIGTNSVGWAVITDEYKVPSKKFKVLGNTDRHSIKKNLIGALLFDSGETAEATRLKRTARRRYTRRKNRICYLQEIFSNEMAKVDDSFFHRLEESFLVEEDKKHERHPIFGNIVDEVAYHEKYPTIYHLRKKLVDSTDKADLRLIYLALAHMIKFRGHFLIEGDLNPDNSDVDKLFIQLVQTYNQLFEENPINASGVDAKAILSARLSKSRRLENLIAQLPGEKKNGLFGNLIALSLGLTPNFKSNFDLAEDAKLQLSKDTYDDDLDNLLAQIGDQYADLFLAAKNLSDAILLSDILRVNTEITKAPLSASMIKRYDEHHQDLTLLKALVRQQLPEKYKEIFFDQSKNGYAGYIDGGASQEEFYKFIKPILEKMDGTEELLVKLNREDLLRKQRTFDNGSIPHQIHLGELHAILRRQEDFYPFLKDNREKIEKILTFRIPYYVGPLARGNSRFAWMTRKSEETITPWNFEEVVDKGASAQSFIERMTNFDKNLPNEKVLPKHSLLYEYFTVYNELTKVKYVTEGMRKPAFLSGEQKKAIVDLLFKTNRKVTVKQLKEDYFKKIECFDSVEISGVEDRFNASLGTYHDLLKIIKDKDFLDNEENEDILEDIVLTLTLFEDREMIEERLKTYAHLFDDKVMKQLKRRRYTGWGRLSRKLINGIRDKQSGKTILDFLKSDGFANRNFMQLIHDDSLTFKEDIQKAQVSGQGDSLHEHIANLAGSPAIKKGILQTVKVVDELVKVMGRHKPENIVIEMARENQTTQKGQKNSRERMKRIEEGIKELGSQILKEHPVENTQLQNEKLYLYYLQNGRDMYVDQELDINRLSDYDVDHIVPQSFLKDDSIDNKVLTRSDKARGKSDNVPSEEVVKKMKNYWRQLLNAKLITQRKFDNLTKAERGGLSELDKAGFIKRQLVETRQITKHVAQILDSRMNTKYDENDKLIREVKVITLKSKLVSDFRKDFQFYKVREINNYHHAHDAYLNAVVGTALIKKYPKLESEFVYGDYKVYDVRKMIAKSEQEIGKATAKYFFYSNIMNFFKTEITLANGEIRKRPLIETNGETGEIVWDKGRDFATVRKVLSMPQVNIVKKTEVQTGGFSKESILPKRNSDKLIARKKDWDPKKYGGFDSPTVAYSVLVVAKVEKGKSKKLKSVKELLGITIMERSSFEKNPIDFLEAKGYKEVKKDLIIKLPKYSLFELENGRKRMLASAGELQKGNELALPSKYVNFLYLASHYEKLKGSPEDNEQKQLFVEQHKHYLDEIIEQISEFSKRVILADANLDKVLSAYNKHRDKPIREQAENIIHLFTLTNLGAPAAFKYFDTTIDRKRYTSTKEVLDATLIHQSITGLYETRIDLSQLGGDGGGGGPAPGSSGGVLNLEEEYRLHEKPVPSSIDPSWLQLFPTVWAERAGMGLANQVPPVVVELRSGASPVAVRQYPMSKEAREGIRPHIQRFLDLGVLVPCQSPWNTPLLPVKKPGTNDYRPVQDLREINKRVQDIHPTVPNPYNLLSSLPPSHTWYSVLDLKDAFFCLKLHPNSQPLFAFEWRDPEKGNTGQLTWTRLPQGFKNSPTLFDEALHRDLAPFRALNPQVVLLQYVDDLLVAAPTYRDCKEGTQKLLQELSKLGYRVSAKKAQLCQKEVTYLGYLLKEGKRWLTPARKATVMKIPPPTTPRQVREFLGTAGFCRLWIPGFASLAAPLYPLTKESIPFIWTEEHQKAFDRIKEALLSAPALALPDLTKPFTLYVDERAGVARGVLTQTLGPWRRPVAYLSKKLDPVASGWPTCLKAVAAVALLLKDADKLTLGQNVTVIASHSLESIVRQPPDRWMTNARMTHYQSLLLNERVSFAPPAVLNPATLLPVESEATPVHRCSEILAEETGTRRDLKDQPLPGVPAWYTDGSSFIAEGKRRAGAAIVDGKRTVWASSLPEGTSAQKAELVALTQALRLAEGKDINIYTDSRYAFATAHIHGAIYKQRGLLTSAGKDIKNKEEILALLEAIHLPKRVAIIHCPGHQKGNDPVATGNRRADEAAKQAALSTRVLAETTKPAGKRTADGSEFEKRTADGSEFESPKKKAKVE

SEQ ID NO: 798 - protein, 2094 aa, synthetic construct
MPAAKRVKLDGGDKKYSIGLDIGTNSVGWAVITDEYKVPSKKFKVLGNTDRHSIKKNLIGALLFDSGETAEATRLKRTARRRYTRRKNRICYLQEIFSNEMAKVDDSFFHRLEESFLVEEDKKHERHPIFGNIVDEVAYHEKYPTIYHLRKKLVDSTDKADLRLIYLALAHMIKFRGHFLIEGDLNPDNSDVDKLFIQLVQTYNQLFEENPINASGVDAKAILSARLSKSRRLENLIAQLPGEKKNGLFGNLIALSLGLTPNFKSNFDLAEDAKLQLSKDTYDDDLDNLLAQIGDQYADLFLAAKNLSDAILLSDILRVNTEITKAPLSASMIKRYDEHHQDLTLLKALVRQQLPEKYKEIFFDQSKNGYAGYIDGGASQEEFYKFIKPILEKMDGTEELLVKLNREDLLRKQRTFDNGSIPHQIHLGELHAILRRQEDFYPFLKDNREKIEKILTFRIPYYVGPLARGNSRFAWMTRKSEETITPWNFEEVVDKGASAQSFIERMTNFDKNLPNEKVLPKHSLLYEYFTVYNELTKVKYVTEGMRKPAFLSGEQKKAIVDLLFKTNRKVTVKQLKEDYFKKIECFDSVEISGVEDRFNASLGTYHDLLKIIKDKDFLDNEENEDILEDIVLTLTLFEDREMIEERLKTYAHLFDDKVMKQLKRRRYTGWGRLSRKLINGIRDKQSGKTILDFLKSDGFANRNFMQLIHDDSLTFKEDIQKAQVSGQGDSLHEHIANLAGSPAIKKGILQTVKVVDELVKVMGRHKPENIVIEMARENQTTQKGQKNSRERMKRIEEGIKELGSQILKEHPVENTQLQNEKLYLYYLQNGRDMYVDQELDINRLSDYDVDHIVPQSFLKDDSIDNKVLTRSDKARGKSDNVPSEEVVKKMKNYWRQLLNAKLITQRKFDNLTKAERGGLSELDKAGFIKRQLVETRQITKHVAQILDSRMNTKYDENDKLIREVKVITLKSKLVSDFRKDFQFYKVREINNYHHAHDAYLNAVVGTALIKKYPKLESEFVYGDYKVYDVRKMIAKSEQEIGKATAKYFFYSNIMNFFKTEITLANGEIRKRPLIETNGETGEIVWDKGRDFATVRKVLSMPQVNIVKKTEVQTGGFSKESILPKRNSDKLIARKKDWDPKKYGGFDSPTVAYSVLVVAKVEKGKSKKLKSVKELLGITIMERSSFEKNPIDFLEAKGYKEVKKDLIIKLPKYSLFELENGRKRMLASAGELQKGNELALPSKYVNFLYLASHYEKLKGSPEDNEQKQLFVEQHKHYLDEIIEQISEFSKRVILADANLDKVLSAYNKHRDKPIREQAENIIHLFTLTNLGAPAAFKYFDTTIDRKRYTSTKEVLDATLIHQSITGLYETRIDLSQLGGDGGGGGGGSEAAAKGGVLNLEEEYRLHEKPVPSSIDPSWLQLFPTVWAERAGMGLANQVPPVVVELRSGASPVAVRQYPMSKEAREGIRPHIQRFLDLGVLVPCQSPWNTPLLPVKKPGTNDYRPVQDLREINKRVQDIHPTVPNPYNLLSSLPPSHTWYSVLDLKDAFFCLKLHPNSQPLFAFEWRDPEKGNTGQLTWTRLPQGFKNSPTLFDEALHRDLAPFRALNPQVVLLQYVDDLLVAAPTYRDCKEGTQKLLQELSKLGYRVSAKKAQLCQKEVTYLGYLLKEGKRWLTPARKATVMKIPPPTTPRQVREFLGTAGFCRLWIPGFASLAAPLYPLTKESIPFIWTEEHQKAFDRIKEALLSAPALALPDLTKPFTLYVDERAGVARGVLTQTLGPWRRPVAYLSKKLDPVASGWPTCLKAVAAVALLLKDADKLTLGQNVTVIASHSLESIVRQPPDRWMTNARMTHYQSLLLNERVSFAPPAVLNPATLLPVESEATPVHRCSEILAEETGTRRDLKDQPLPGVPAWYTDGSSFIAEGKRRAGAAIVDGKRTVWASSLPEGTSAQKAELVALTQALRLAEGKDINIYTDSRYAFATAHIHGAIYKQRGLLTSAGKDIKNKEEILALLEAIHLPKRVAIIHCPGHQKGNDPVATGNRRADEAAKQAALSTRVLAETTKPAGKRTADGSEFEKRTADGSEFESPKKKAKVE

SEQ ID NO: 799 - protein, 2108 aa, synthetic construct
MPAAKRVKLDGGDKKYSIGLDIGTNSVGWAVITDEYKVPSKKFKVLGNTDRHSIKKNLIGALLFDSGETAEATRLKRTARRRYTRRKNRICYLQEIFSNEMAKVDDSFFHRLEESFLVEEDKKHERHPIFGNIVDEVAYHEKYPTIYHLRKKLVDSTDKADLRLIYLALAHMIKFRGHFLIEGDLNPDNSDVDKLFIQLVQTYNQLFEENPINASGVDAKAILSARLSKSRRLENLIAQLPGEKKNGLFGNLIALSLGLTPNFKSNFDLAEDAKLQLSKDTYDDDLDNLLAQIGDQYADLFLAAKNLSDAILLSDILRVNTEITKAPLSASMIKRYDEHHQDLTLLKALVRQQLPEKYKEIFFDQSKNGYAGYIDGGASQEEFYKFIKPILEKMDGTEELLVKLNREDLLRKQRTFDNGSIPHQIHLGELHAILRRQEDFYPFLKDNREKIEKILTFRIPYYVGPLARGNSRFAWMTRKSEETITPWNFEEVVDKGASAQSFIERMTNFDKNLPNEKVLPKHSLLYEYFTVYNELTKVKYVTEGMRKPAFLSGEQKKAIVDLLFKTNRKVTVKQLKEDYFKKIECFDSVEISGVEDRFNASLGTYHDLLKIIKDKDFLDNEENEDILEDIVLTLTLFEDREMIEERLKTYAHLFDDKVMKQLKRRRYTGWGRLSRKLINGIRDKQSGKTILDFLKSDGFANRNFMQLIHDDSLTFKEDIQKAQVSGQGDSLHEHIANLAGSPAIKKGILQTVKVVDELVKVMGRHKPENIVIEMARENQTTQKGQKNSRERMKRIEEGIKELGSQILKEHPVENTQLQNEKLYLYYLQNGRDMYVDQELDINRLSDYDVDHIVPQSFLKDDSIDNKVLTRSDKARGKSDNVPSEEVVKKMKNYWRQLLNAKLITQRKFDNLTKAERGGLSELDKAGFIKRQLVETRQITKHVAQILDSRMNTKYDENDKLIREVKVITLKSKLVSDFRKDFQFYKVREINNYHHAHDAYLNAVVGTALIKKYPKLESEFVYGDYKVYDVRKMIAKSEQEIGKATAKYFFYSNIMNFFKTEITLANGEIRKRPLIETNGETGEIVWDKGRDFATVRKVLSMPQVNIVKKTEVQTGGFSKESILPKRNSDKLIARKKDWDPKKYGGFDSPTVAYSVLVVAKVEKGKSKKLKSVKELLGITIMERSSFEKNPIDFLEAKGYKEVKKDLIIKLPKYSLFELENGRKRMLASAGELQKGNELALPSKYVNFLYLASHYEKLKGSPEDNEQKQLFVEQHKHYLDEIIEQISEFSKRVILADANLDKVLSAYNKHRDKPIREQAENIIHLFTLTNLGAPAAFKYFDTTIDRKRYTSTKEVLDATLIHQSITGLYETRIDLSQLGGDGGEAAAKEAAAKEAAAKEAAAKEAAAKGGVLNLEEEYRLHEKPVPSSIDPSWLQLFPTVWAERAGMGLANQVPPVVVELRSGASPVAVRQYPMSKEAREGIRPHIQRFLDLGVLVPCQSPWNTPLLPVKKPGTNDYRPVQDLREINKRVQDIHPTVPNPYNLLSSLPPSHTWYSVLDLKDAFFCLKLHPNSQPLFAFEWRDPEKGNTGQLTWTRLPQGFKNSPTLFNEALHRDLAPFRALNPQVVLLQYVDDLLVAAPTYRDCKEGTQKLLQELSKLGYRVSAKKAQLCQKEVTYLGYLLKEGKRWLTPARKATVMKIPPPTTPRQVREFLGTAGFCRLWIPGFASLAAPLYPLTKPSIPFIWTEEHQKAFDRIKEALLSAPALALPDLTKPFTLYVDERAGVARGVLTQTLGPWRRPVAYLSKKLDPVASGWPTCLKAVAAVALLLKDADKLTLGQNVTVIASHSLESIVRQPPDRWMTNARMTHYQSLLLNERVSFAPPAVLNPATLLPVESEATPVHRCSEILAEETGTRRDLKDQPLPGVPAWYTDGSSFIAEGKRRAGAAIVDGKRTVWASSLPEGTSAQKAELVALTQALRLAEGKDINIYTDSRYAFATAHIHGAIYKQRGWLTSAGKDIKNKEEILALLEAIHLPKRVAIIHCPGHQKGNDPVATGNRRADEAAKQAALSTRVLAETTKPAGKRTADGSEFEKRTADGSEFESPKKKAKVE

SEQ ID NO: 800 - protein, 2094 aa, synthetic construct
MPAAKRVKLDGGDKKYSIGLDIGTNSVGWAVITDEYKVPSKKFKVLGNTDRHSIKKNLIGALLFDSGETAEATRLKRTARRRYTRRKNRICYLQEIFSNEMAKVDDSFFHRLEESFLVEEDKKHERHPIFGNIVDEVAYHEKYPTIYHLRKKLVDSTDKADLRLIYLALAHMIKFRGHFLIEGDLNPDNSDVDKLFIQLVQTYNQLFEENPINASGVDAKAILSARLSKSRRLENLIAQLPGEKKNGLFGNLIALSLGLTPNFKSNFDLAEDAKLQLSKDTYDDDLDNLLAQIGDQYADLFLAAKNLSDAILLSDILRVNTEITKAPLSASMIKRYDEHHQDLTLLKALVRQQLPEKYKEIFFDQSKNGYAGYIDGGASQEEFYKFIKPILEKMDGTEELLVKLNREDLLRKQRTFDNGSIPHQIHLGELHAILRRQEDFYPFLKDNREKIEKILTFRIPYYVGPLARGNSRFAWMTRKSEETITPWNFEEVVDKGASAQSFIERMTNFDKNLPNEKVLPKHSLLYEYFTVYNELTKVKYVTEGMRKPAFLSGEQKKAIVDLLFKTNRKVTVKQLKEDYFKKIECFDSVEISGVEDRFNASLGTYHDLLKIIKDKDFLDNEENEDILEDIVLTLTLFEDREMIEERLKTYAHLFDDKVMKQLKRRRYTGWGRLSRKLINGIRDKQSGKTILDFLKSDGFANRNFMQLIHDDSLTFKEDIQKAQVSGQGDSLHEHIANLAGSPAIKKGILQTVKVVDELVKVMGRHKPENIVIEMARENQTTQKGQKNSRERMKRIEEGIKELGSQILKEHPVENTQLQNEKLYLYYLQNGRDMYVDQELDINRLSDYDVDHIVPQSFLKDDSIDNKVLTRSDKARGKSDNVPSEEVVKKMKNYWRQLLNAKLITQRKFDNLTKAERGGLSELDKAGFIKRQLVETRQITKHVAQILDSRMNTKYDENDKLIREVKVITLKSKLVSDFRKDFQFYKVREINNYHHAHDAYLNAVVGTALIKKYPKLESEFVYGDYKVYDVRKMIAKSEQEIGKATAKYFFYSNIMNFFKTEITLANGEIRKRPLIETNGETGEIVWDKGRDFATVRKVLSMPQVNIVKKTEVQTGGFSKESILPKRNSDKLIARKKDWDPKKYGGFDSPTVAYSVLVVAKVEKGKSKKLKSVKELLGITIMERSSFEKNPIDFLEAKGYKEVKKDLIIKLPKYSLFELENGRKRMLASAGELQKGNELALPSKYVNFLYLASHYEKLKGSPEDNEQKQLFVEQHKHYLDEIIEQISEFSKRVILADANLDKVLSAYNKHRDKPIREQAENIIHLFTLTNLGAPAAFKYFDTTIDRKRYTSTKEVLDATLIHQSITGLYETRIDLSQLGGDGGGGGGGSEAAAKGGVLNLEEEYRLHEKPVPSSIDPSWLQLFPTVWAERAGMGLANQVPPVVVELRSGASPVAVRQYPMSKEAREGIRPHIQRFLDLGVLVPCQSPWNTPLLPVKKPGTNDYRPVQDLREINKRVQDIHPTVPNPYNLLSSLPPSHTWYSVLDLKDAFFCLKLHPNSQPLFAFEWRDPEKGNTGQLTWTRLPQGFKNSPTLFNEALHRDLAPFRALNPQVVLLQYVDDLLVAAPTYRDCKEGTQKLLQELSKLGYRVSAKKAQLCQKEVTYLGYLLKEGKRWLTPARKATVMKIPPPTTPRQVREFLGTAGFCRLWIPGFASLAAPLYPLTKPSIPFIWTEEHQKAFDRIKEALLSAPALALPDLTKPFTLYVDERAGVARGVLTQTLGPWRRPVAYLSKKLDPVASGWPTCLKAVAAVALLLKDADKLTLGQNVTVIASHSLESIVRQPPDRWMTNARMTHYQSLLLNERVSFAPPAVLNPATLLPVESEATPVHRCSEILAEETGTRRDLKDQPLPGVPAWYTDGSSFIAEGKRRAGAAIVDGKRTVWASSLPEGTSAQKAELVALTQALRLAEGKDINIYTDSRYAFATAHIHGAIYKQRGWLTSAGKDIKNKEEILALLEAIHLPKRVAIIHCPGHQKGNDPVATGNRRADEAAKQAALSTRVLAETTKPAGKRTADGSEFEKRTADGSEFESPKKKAKVE

SEQ ID NO: 801 - protein, 2129 aa, synthetic construct
MPAAKRVKLDGGDKKYSIGLDIGTNSVGWAVITDEYKVPSKKFKVLGNTDRHSIKKNLIGALLFDSGETAEATRLKRTARRRYTRRKNRICYLQEIFSNEMAKVDDSFFHRLEESFLVEEDKKHERHPIFGNIVDEVAYHEKYPTIYHLRKKLVDSTDKADLRLIYLALAHMIKFRGHFLIEGDLNPDNSDVDKLFIQLVQTYNQLFEENPINASGVDAKAILSARLSKSRRLENLIAQLPGEKKNGLFGNLIALSLGLTPNFKSNFDLAEDAKLQLSKDTYDDDLDNLLAQIGDQYADLFLAAKNLSDAILLSDILRVNTEITKAPLSASMIKRYDEHHQDLTLLKALVRQQLPEKYKEIFFDQSKNGYAGYIDGGASQEEFYKFIKPILEKMDGTEELLVKLNREDLLRKQRTFDNGSIPHQIHLGELHAILRRQEDFYPFLKDNREKIEKILTFRIPYYVGPLARGNSRFAWMTRKSEETITPWNFEEVVDKGASAQSFIERMTNFDKNLPNEKVLPKHSLLYEYFTVYNELTKVKYVTEGMRKPAFLSGEQKKAIVDLLFKTNRKVTVKQLKEDYFKKIECFDSVEISGVEDRFNASLGTYHDLLKIIKDKDFLDNEENEDILEDIVLTLTLFEDREMIEERLKTYAHLFDDKVMKQLKRRRYTGWGRLSRKLINGIRDKQSGKTILDFLKSDGFANRNFMQLIHDDSLTFKEDIQKAQVSGQGDSLHEHIANLAGSPAIKKGILQTVKVVDELVKVMGRHKPENIVIEMARENQTTQKGQKNSRERMKRIEEGIKELGSQILKEHPVENTQLQNEKLYLYYLQNGRDMYVDQELDINRLSDYDVDHIVPQSFLKDDSIDNKVLTRSDKARGKSDNVPSEEVVKKMKNYWRQLLNAKLITQRKFDNLTKAERGGLSELDKAGFIKRQLVETRQITKHVAQILDSRMNTKYDENDKLIREVKVITLKSKLVSDFRKDFQFYKVREINNYHHAHDAYLNAVVGTALIKKYPKLESEFVYGDYKVYDVRKMIAKSEQEIGKATAKYFFYSNIMNFFKTEITLANGEIRKRPLIETNGETGEIVWDKGRDFATVRKVLSMPQVNIVKKTEVQTGGFSKESILPKRNSDKLIARKKDWDPKKYGGFDSPTVAYSVLVVAKVEKGKSKKLKSVKELLGITIMERSSFEKNPIDFLEAKGYKEVKKDLIIKLPKYSLFELENGRKRMLASAGELQKGNELALPSKYVNFLYLASHYEKLKGSPEDNEQKQLFVEQHKHYLDEIIEQISEFSKRVILADANLDKVLSAYNKHRDKPIREQAENIIHLFTLTNLGAPAAFKYFDTTIDRKRYTSTKEVLDATLIHQSITGLYETRIDLSQLGGDGGAEAAAKEAAAKEAAAKEAAAKALEAEAAAKEAAAKEAAAKEAAAKAGGVLNLEEEYRLHEKPVPSSIDPSWLQLFPTVWAERAGMGLANQVPPVVVELRSGASPVAVRQYPMSKEAREGIRPHIQRFLDLGVLVPCQSPWNTPLLPVKKPGTNDYRPVQDLREINKRVQDIHPTVPNPYNLLSSLPPSHTWYSVLDLKDAFFCLKLHPNSQPLFAFEWRDPEKGNTGQLTWTRLPQGFKNSPTLFNEALHRDLAPFRALNPQVVLLQYVDDLLVAAPTYRDCKEGTQKLLQELSKLGYRVSAKKAQLCQKEVTYLGYLLKEGKRWLTPARKATVMKIPPPTTPRQVREFLGTAGFCRLWIPGFASLAAPLYPLTKPSIPFIWTEEHQKAFDRIKEALLSAPALALPDLTKPFTLYVDERAGVARGVLTQTLGPWRRPVAYLSKKLDPVASGWPTCLKAVAAVALLLKDADKLTLGQNVTVIASHSLESIVRQPPDRWMTNARMTHYQSLLLNERVSFAPPAVLNPATLLPVESEATPVHRCSEILAEETGTRRDLKDQPLPGVPAWYTDGSSFIAEGKRRAGAAIVDGKRTVWASSLPEGTSAQKAELVALTQALRLAEGKDINIYTDSRYAFATAHIHGAIYKQRGWLTSAGKDIKNKEEILALLEAIHLPKRVAIIHCPGHQKGNDPVATGNRRADEAAKQAALSTRVLAETTKPAGKRTADGSEFEKRTADGSEFESPKKKAKVE

SEQ ID NO: 802 - protein, 2090 aa, synthetic construct
MPAAKRVKLDGGDKKYSIGLDIGTNSVGWAVITDEYKVPSKKFKVLGNTDRHSIKKNLIGALLFDSGETAEATRLKRTARRRYTRRKNRICYLQEIFSNEMAKVDDSFFHRLEESFLVEEDKKHERHPIFGNIVDEVAYHEKYPTIYHLRKKLVDSTDKADLRLIYLALAHMIKFRGHFLIEGDLNPDNSDVDKLFIQLVQTYNQLFEENPINASGVDAKAILSARLSKSRRLENLIAQLPGEKKNGLFGNLIALSLGLTPNFKSNFDLAEDAKLQLSKDTYDDDLDNLLAQIGDQYADLFLAAKNLSDAILLSDILRVNTEITKAPLSASMIKRYDEHHQDLTLLKALVRQQLPEKYKEIFFDQSKNGYAGYIDGGASQEEFYKFIKPILEKMDGTEELLVKLNREDLLRKQRTFDNGSIPHQIHLGELHAILRRQEDFYPFLKDNREKIEKILTFRIPYYVGPLARGNSRFAWMTRKSEETITPWNFEEVVDKGASAQSFIERMTNFDKNLPNEKVLPKHSLLYEYFTVYNELTKVKYVTEGMRKPAFLSGEQKKAIVDLLFKTNRKVTVKQLKEDYFKKIECFDSVEISGVEDRFNASLGTYHDLLKIIKDKDFLDNEENEDILEDIVLTLTLFEDREMIEERLKTYAHLFDDKVMKQLKRRRYTGWGRLSRKLINGIRDKQSGKTILDFLKSDGFANRNFMQLIHDDSLTFKEDIQKAQVSGQGDSLHEHIANLAGSPAIKKGILQTVKVVDELVKVMGRHKPENIVIEMARENQTTQKGQKNSRERMKRIEEGIKELGSQILKEHPVENTQLQNEKLYLYYLQNGRDMYVDQELDINRLSDYDVDHIVPQSFLKDDSIDNKVLTRSDKARGKSDNVPSEEVVKKMKNYWRQLLNAKLITQRKFDNLTKAERGGLSELDKAGFIKRQLVETRQITKHVAQILDSRMNTKYDENDKLIREVKVITLKSKLVSDFRKDFQFYKVREINNYHHAHDAYLNAVVGTALIKKYPKLESEFVYGDYKVYDVRKMIAKSEQEIGKATAKYFFYSNIMNFFKTEITLANGEIRKRPLIETNGETGEIVWDKGRDFATVRKVLSMPQVNIVKKTEVQTGGFSKESILPKRNSDKLIARKKDWDPKKYGGFDSPTVAYSVLVVAKVEKGKSKKLKSVKELLGITIMERSSFEKNPIDFLEAKGYKEVKKDLIIKLPKYSLFELENGRKRMLASAGELQKGNELALPSKYVNFLYLASHYEKLKGSPEDNEQKQLFVEQHKHYLDEIIEQISEFSKRVILADANLDKVLSAYNKHRDKPIREQAENIIHLFTLTNLGAPAAFKYFDTTIDRKRYTSTKEVLDATLIHQSITGLYETRIDLSQLGGDGGGGGGGGGGGVLNLEEEYRLHEKPVPSSIDPSWLQLFPTVWAERAGMGLANQVPPVVVELRSGASPVAVRQYPMSKEAREGIRPHIQRFLDLGVLVPCQSPWNTPLLPVKKPGTNDYRPVQDLREINKRVQDIHPTVPNPYNLLSSLPPSHTWYSVLDLKDAFFCLKLHPNSQPLFAFEWRDPEKGNTGQLTWTRLPQGFKNSPTLFNEALHRDLAPFRALNPQVVLLQYVDDLLVAAPTYRDCKEGTQKLLQELSKLGYRVSAKKAQLCQKEVTYLGYLLKEGKRWLTPARKATVMKIPPPTTPRQVREFLGTAGFCRLWIPGFASLAAPLYPLTKPSIPFIWTEEHQKAFDRIKEALLSAPALALPDLTKPFTLYVDERAGVARGVLTQTLGPWRRPVAYLSKKLDPVASGWPTCLKAVAAVALLLKDADKLTLGQNVTVIASHSLESIVRQPPDRWMTNARMTHYQSLLLNERVSFAPPAVLNPATLLPVESEATPVHRCSEILAEETGTRRDLKDQPLPGVPAWYTDGSSFIAEGKRRAGAAIVDGKRTVWASSLPEGTSAQKAELVALTQALRLAEGKDINIYTDSRYAFATAHIHGAIYKQRGWLTSAGKDIKNKEEILALLEAIHLPKRVAIIHCPGHQKGNDPVATGNRRADEAAKQAALSTRVLAETTKPAGKRTADGSEFEKRTADGSEFESPKKKAKVE

SEQ ID NO: 803 - protein, 2086 aa, synthetic construct
MPAAKRVKLDGGDKKYSIGLDIGTNSVGWAVITDEYKVPSKKFKVLGNTDRHSIKKNLIGALLFDSGETAEATRLKRTARRRYTRRKNRICYLQEIFSNEMAKVDDSFFHRLEESFLVEEDKKHERHPIFGNIVDEVAYHEKYPTIYHLRKKLVDSTDKADLRLIYLALAHMIKFRGHFLIEGDLNPDNSDVDKLFIQLVQTYNQLFEENPINASGVDAKAILSARLSKSRRLENLIAQLPGEKKNGLFGNLIALSLGLTPNFKSNFDLAEDAKLQLSKDTYDDDLDNLLAQIGDQYADLFLAAKNLSDAILLSDILRVNTEITKAPLSASMIKRYDEHHQDLTLLKALVRQQLPEKYKEIFFDQSKNGYAGYIDGGASQEEFYKFIKPILEKMDGTEELLVKLNREDLLRKQRTFDNGSIPHQIHLGELHAILRRQEDFYPFLKDNREKIEKILTFRIPYYVGPLARGNSRFAWMTRKSEETITPWNFEEVVDKGASAQSFIERMTNFDKNLPNEKVLPKHSLLYEYFTVYNELTKVKYVTEGMRKPAFLSGEQKKAIVDLLFKTNRKVTVKQLKEDYFKKIECFDSVEISGVEDRFNASLGTYHDLLKIIKDKDFLDNEENEDILEDIVLTLTLFEDREMIEERLKTYAHLFDDKVMKQLKRRRYTGWGRLSRKLINGIRDKQSGKTILDFLKSDGFANRNFMQLIHDDSLTFKEDIQKAQVSGQGDSLHEHIANLAGSPAIKKGILQTVKVVDELVKVMGRHKPENIVIEMARENQTTQKGQKNSRERMKRIEEGIKELGSQILKEHPVENTQLQNEKLYLYYLQNGRDMYVDQELDINRLSDYDVDHIVPQSFLKDDSIDNKVLTRSDKARGKSDNVPSEEVVKKMKNYWRQLLNAKLITQRKFDNLTKAERGGLSELDKAGFIKRQLVETRQITKHVAQILDSRMNTKYDENDKLIREVKVITLKSKLVSDFRKDFQFYKVREINNYHHAHDAYLNAVVGTALIKKYPKLESEFVYGDYKVYDVRKMIAKSEQEIGKATAKYFFYSNIMNFFKTEITLANGEIRKRPLIETNGETGEIVWDKGRDFATVRKVLSMPQVNIVKKTEVQTGGFSKESILPKRNSDKLIARKKDWDPKKYGGFDSPTVAYSVLVVAKVEKGKSKKLKSVKELLGITIMERSSFEKNPIDFLEAKGYKEVKKDLIIKLPKYSLFELENGRKRMLASAGELQKGNELALPSKYVNFLYLASHYEKLKGSPEDNEQKQLFVEQHKHYLDEIIEQISEFSKRVILADANLDKVLSAYNKHRDKPIREQAENIIHLFTLTNLGAPAAFKYFDTTIDRKRYTSTKEVLDATLIHQSITGLYETRIDLSQLGGDGGGSSGGVLNLEEEYRLHEKPVPSSIDPSWLQLFPTVWAERAGMGLANQVPPVVVELRSGASPVAVRQYPMSKEAREGIRPHIQRFLDLGVLVPCQSPWNTPLLPVKKPGTNDYRPVQDLREINKRVQDIHPTVPNPYNLLSSLPPSHTWYSVLDLKDAFFCLKLHPNSQPLFAFEWRDPEKGNTGQLTWTRLPQGFKNSPTLFNEALHRDLAPFRALNPQVVLLQYVDDLLVAAPTYRDCKEGTQKLLQELSKLGYRVSAKKAQLCQKEVTYLGYLLKEGKRWLTPARKATVMKIPPPTTPRQVREFLGTAGFCRLWIPGFASLAAPLYPLTKPSIPFIWTEEHQKAFDRIKEALLSAPALALPDLTKPFTLYVDERAGVARGVLTQTLGPWRRPVAYLSKKLDPVASGWPTCLKAVAAVALLLKDADKLTLGQNVTVIASHSLESIVRQPPDRWMTNARMTHYQSLLLNERVSFAPPAVLNPATLLPVESEATPVHRCSEILAEETGTRRDLKDQPLPGVPAWYTDGSSFIAEGKRRAGAAIVDGKRTVWASSLPEGTSAQKAELVALTQALRLAEGKDINIYTDSRYAFATAHIHGAIYKQRGWLTSAGKDIKNKEEILALLEAIHLPKRVAIIHCPGHQKGNDPVATGNRRADEAAKQAALSTRVLAETTKPAGKRTADGSEFEKRTADGSEFESPKKKAKVE

SEQ ID NO: 804 - protein, 2092 aa, synthetic construct
MPAAKRVKLDGGDKKYSIGLDIGTNSVGWAVITDEYKVPSKKFKVLGNTDRHSIKKNLIGALLFDSGETAEATRLKRTARRRYTRRKNRICYLQEIFSNEMAKVDDSFFHRLEESFLVEEDKKHERHPIFGNIVDEVAYHEKYPTIYHLRKKLVDSTDKADLRLIYLALAHMIKFRGHFLIEGDLNPDNSDVDKLFIQLVQTYNQLFEENPINASGVDAKAILSARLSKSRRLENLIAQLPGEKKNGLFGNLIALSLGLTPNFKSNFDLAEDAKLQLSKDTYDDDLDNLLAQIGDQYADLFLAAKNLSDAILLSDILRVNTEITKAPLSASMIKRYDEHHQDLTLLKALVRQQLPEKYKEIFFDQSKNGYAGYIDGGASQEEFYKFIKPILEKMDGTEELLVKLNREDLLRKQRTFDNGSIPHQIHLGELHAILRRQEDFYPFLKDNREKIEKILTFRIPYYVGPLARGNSRFAWMTRKSEETITPWNFEEVVDKGASAQSFIERMTNFDKNLPNEKVLPKHSLLYEYFTVYNELTKVKYVTEGMRKPAFLSGEQKKAIVDLLFKTNRKVTVKQLKEDYFKKIECFDSVEISGVEDRFNASLGTYHDLLKIIKDKDFLDNEENEDILEDIVLTLTLFEDREMIEERLKTYAHLFDDKVMKQLKRRRYTGWGRLSRKLINGIRDKQSGKTILDFLKSDGFANRNFMQLIHDDSLTFKEDIQKAQVSGQGDSLHEHIANLAGSPAIKKGILQTVKVVDELVKVMGRHKPENIVIEMARENQTTQKGQKNSRERMKRIEEGIKELGSQILKEHPVENTQLQNEKLYLYYLQNGRDMYVDQELDINRLSDYDVDHIVPQSFLKDDSIDNKVLTRSDKARGKSDNVPSEEVVKKMKNYWRQLLNAKLITQRKFDNLTKAERGGLSELDKAGFIKRQLVETRQITKHVAQILDSRMNTKYDENDKLIREVKVITLKSKLVSDFRKDFQFYKVREINNYHHAHDAYLNAVVGTALIKKYPKLESEFVYGDYKVYDVRKMIAKSEQEIGKATAKYFFYSNIMNFFKTEITLANGEIRKRPLIETNGETGEIVWDKGRDFATVRKVLSMPQVNIVKKTEVQTGGFSKESILPKRNSDKLIARKKDWDPKKYGGFDSPTVAYSVLVVAKVEKGKSKKLKSVKELLGITIMERSSFEKNPIDFLEAKGYKEVKKDLIIKLPKYSLFELENGRKRMLASAGELQKGNELALPSKYVNFLYLASHYEKLKGSPEDNEQKQLFVEQHKHYLDEIIEQISEFSKRVILADANLDKVLSAYNKHRDKPIREQAENIIHLFTLTNLGAPAAFKYFDTTIDRKRYTSTKEVLDATLIHQSITGLYETRIDLSQLGGDGGGGGGSSGGSGGVLNLEEEYRLHEKPVPSSIDPSWLQLFPTVWAERAGMGLANQVPPVVVELRSGASPVAVRQYPMSKEAREGIRPHIQRFLDLGVLVPCQSPWNTPLLPVKKPGTNDYRPVQDLREINKRVQDIHPTVPNPYNLLSSLPPSHTWYSVLDLKDAFFCLKLHPNSQPLFAFEWRDPEKGNTGQLTWTRLPQGFKNSPTLFNEALHRDLAPFRALNPQVVLLQYVDDLLVAAPTYRDCKEGTQKLLQELSKLGYRVSAKKAQLCQKEVTYLGYLLKEGKRWLTPARKATVMKIPPPTTPRQVREFLGTAGFCRLWIPGFASLAAPLYPLTKPSIPFIWTEEHQKAFDRIKEALLSAPALALPDLTKPFTLYVDERAGVARGVLTQTLGPWRRPVAYLSKKLDPVASGWPTCLKAVAAVALLLKDADKLTLGQNVTVIASHSLESIVRQPPDRWMTNARMTHYQSLLLNERVSFAPPAVLNPATLLPVESEATPVHRCSEILAEETGTRRDLKDQPLPGVPAWYTDGSSFIAEGKRRAGAAIVDGKRTVWASSLPEGTSAQKAELVALTQALRLAEGKDINIYTDSRYAFATAHIHGAIYKQRGWLTSAGKDIKNKEEILALLEAIHLPKRVAIIHCPGHQKGNDPVATGNRRADEAAKQAALSTRVLAETTKPAGKRTADGSEFEKRTADGSEFESPKKKAKVE

SEQ ID NO: 805 - protein, 2089 aa, synthetic construct
MPAAKRVKLDGGDKKYSIGLDIGTNSVGWAVITDEYKVPSKKFKVLGNTDRHSIKKNLIGALLFDSGETAEATRLKRTARRRYTRRKNRICYLQEIFSNEMAKVDDSFFHRLEESFLVEEDKKHERHPIFGNIVDEVAYHEKYPTIYHLRKKLVDSTDKADLRLIYLALAHMIKFRGHFLIEGDLNPDNSDVDKLFIQLVQTYNQLFEENPINASGVDAKAILSARLSKSRRLENLIAQLPGEKKNGLFGNLIALSLGLTPNFKSNFDLAEDAKLQLSKDTYDDDLDNLLAQIGDQYADLFLAAKNLSDAILLSDILRVNTEITKAPLSASMIKRYDEHHQDLTLLKALVRQQLPEKYKEIFFDQSKNGYAGYIDGGASQEEFYKFIKPILEKMDGTEELLVKLNREDLLRKQRTFDNGSIPHQIHLGELHAILRRQEDFYPFLKDNREKIEKILTFRIPYYVGPLARGNSRFAWMTRKSEETITPWNFEEVVDKGASAQSFIERMTNFDKNLPNEKVLPKHSLLYEYFTVYNELTKVKYVTEGMRKPAFLSGEQKKAIVDLLFKTNRKVTVKQLKEDYFKKIECFDSVEISGVEDRFNASLGTYHDLLKIIKDKDFLDNEENEDILEDIVLTLTLFEDREMIEERLKTYAHLFDDKVMKQLKRRRYTGWGRLSRKLINGIRDKQSGKTILDFLKSDGFANRNFMQLIHDDSLTFKEDIQKAQVSGQGDSLHEHIANLAGSPAIKKGILQTVKVVDELVKVMGRHKPENIVIEMARENQTTQKGQKNSRERMKRIEEGIKELGSQILKEHPVENTQLQNEKLYLYYLQNGRDMYVDQELDINRLSDYDVDHIVPQSFLKDDSIDNKVLTRSDKARGKSDNVPSEEVVKKMKNYWRQLLNAKLITQRKFDNLTKAERGGLSELDKAGFIKRQLVETRQITKHVAQILDSRMNTKYDENDKLIREVKVITLKSKLVSDFRKDFQFYKVREINNYHHAHDAYLNAVVGTALIKKYPKLESEFVYGDYKVYDVRKMIAKSEQEIGKATAKYFFYSNIMNFFKTEITLANGEIRKRPLIETNGETGEIVWDKGRDFATVRKVLSMPQVNIVKKTEVQTGGFSKESILPKRNSDKLIARKKDWDPKKYGGFDSPTVAYSVLVVAKVEKGKSKKLKSVKELLGITIMERSSFEKNPIDFLEAKGYKEVKKDLIIKLPKYSLFELENGRKRMLASAGELQKGNELALPSKYVNFLYLASHYEKLKGSPEDNEQKQLFVEQHKHYLDEIIEQISEFSKRVILADANLDKVLSAYNKHRDKPIREQAENIIHLFTLTNLGAPAAFKYFDTTIDRKRYTSTKEVLDATLIHQSITGLYETRIDLSQLGGDGGGGGGGGGGVLNLEEEYRLHEKPVPSSIDPSWLQLFPTVWAERAGMGLANQVPPVVVELRSGASPVAVRQYPMSKEAREGIRPHIQRFLDLGVLVPCQSPWNTPLLPVKKPGTNDYRPVQDLREINKRVQDIHPTVPNPYNLLSSLPPSHTWYSVLDLKDAFFCLKLHPNSQPLFAFEWRDPEKGNTGQLTWTRLPQGFKNSPTLFNEALHRDLAPFRALNPQVVLLQYVDDLLVAAPTYRDCKEGTQKLLQELSKLGYRVSAKKAQLCQKEVTYLGYLLKEGKRWLTPARKATVMKIPPPTTPRQVREFLGTAGFCRLWIPGFASLAAPLYPLTKPSIPFIWTEEHQKAFDRIKEALLSAPALALPDLTKPFTLYVDERAGVARGVLTQTLGPWRRPVAYLSKKLDPVASGWPTCLKAVAAVALLLKDADKLTLGQNVTVIASHSLESIVRQPPDRWMTNARMTHYQSLLLNERVSFAPPAVLNPATLLPVESEATPVHRCSEILAEETGTRRDLKDQPLPGVPAWYTDGSSFIAEGKRRAGAAIVDGKRTVWASSLPEGTSAQKAELVALTQALRLAEGKDINIYTDSRYAFATAHIHGAIYKQRGWLTSAGKDIKNKEEILALLEAIHLPKRVAIIHCPGHQKGNDPVATGNRRADEAAKQAALSTRVLAETTKPAGKRTADGSEFEKRTADGSEFESPKKKAKVE

SEQ ID NO: 806 - protein, 2099 aa, synthetic construct
MPAAKRVKLDGGDKKYSIGLDIGTNSVGWAVITDEYKVPSKKFKVLGNTDRHSIKKNLIGALLFDSGETAEATRLKRTARRRYTRRKNRICYLQEIFSNEMAKVDDSFFHRLEESFLVEEDKKHERHPIFGNIVDEVAYHEKYPTIYHLRKKLVDSTDKADLRLIYLALAHMIKFRGHFLIEGDLNPDNSDVDKLFIQLVQTYNQLFEENPINASGVDAKAILSARLSKSRRLENLIAQLPGEKKNGLFGNLIALSLGLTPNFKSNFDLAEDAKLQLSKDTYDDDLDNLLAQIGDQYADLFLAAKNLSDAILLSDILRVNTEITKAPLSASMIKRYDEHHQDLTLLKALVRQQLPEKYKEIFFDQSKNGYAGYIDGGASQEEFYKFIKPILEKMDGTEELLVKLNREDLLRKQRTFDNGSIPHQIHLGELHAILRRQEDFYPFLKDNREKIEKILTFRIPYYVGPLARGNSRFAWMTRKSEETITPWNFEEVVDKGASAQSFIERMTNFDKNLPNEKVLPKHSLLYEYFTVYNELTKVKYVTEGMRKPAFLSGEQKKAIVDLLFKTNRKVTVKQLKEDYFKKIECFDSVEISGVEDRFNASLGTYHDLLKIIKDKDFLDNEENEDILEDIVLTLTLFEDREMIEERLKTYAHLFDDKVMKQLKRRRYTGWGRLSRKLINGIRDKQSGKTILDFLKSDGFANRNFMQLIHDDSLTFKEDIQKAQVSGQGDSLHEHIANLAGSPAIKKGILQTVKVVDELVKVMGRHKPENIVIEMARENQTTQKGQKNSRERMKRIEEGIKELGSQILKEHPVENTQLQNEKLYLYYLQNGRDMYVDQELDINRLSDYDVDHIVPQSFLKDDSIDNKVLTRSDKARGKSDNVPSEEVVKKMKNYWRQLLNAKLITQRKFDNLTKAERGGLSELDKAGFIKRQLVETRQITKHVAQILDSRMNTKYDENDKLIREVKVITLKSKLVSDFRKDFQFYKVREINNYHHAHDAYLNAVVGTALIKKYPKLESEFVYGDYKVYDVRKMIAKSEQEIGKATAKYFFYSNIMNFFKTEITLANGEIRKRPLIETNGETGEIVWDKGRDFATVRKVLSMPQVNIVKKTEVQTGGFSKESILPKRNSDKLIARKKDWDPKKYGGFDSPTVAYSVLVVAKVEKGKSKKLKSVKELLGITIMERSSFEKNPIDFLEAKGYKEVKKDLIIKLPKYSLFELENGRKRMLASAGELQKGNELALPSKYVNFLYLASHYEKLKGSPEDNEQKQLFVEQHKHYLDEIIEQISEFSKRVILADANLDKVLSAYNKHRDKPIREQAENIIHLFTLTNLGAPAAFKYFDTTIDRKRYTSTKEVLDATLIHQSITGLYETRIDLSQLGGDGGSGSETPGTSESATPESGGVLNLEEEYRLHEKPVPSSIDPSWLQLFPTVWAERAGMGLANQVPPVVVELRSGASPVAVRQYPMSKEAREGIRPHIQRFLDLGVLVPCQSPWNTPLLPVKKPGTNDYRPVQDLREINKRVQDIHPTVPNPYNLLSSLPPSHTWYSVLDLKDAFFCLKLHPNSQPLFAFEWRDPEKGNTGQLTWTRLPQGFKNSPTLFNEALHRDLAPFRALNPQVVLLQYVDDLLVAAPTYRDCKEGTQKLLQELSKLGYRVSAKKAQLCQKEVTYLGYLLKEGKRWLTPARKATVMKIPPPTTPRQVREFLGTAGFCRLWIPGFASLAAPLYPLTKPSIPFIWTEEHQKAFDRIKEALLSAPALALPDLTKPFTLYVDERAGVARGVLTQTLGPWRRPVAYLSKKLDPVASGWPTCLKAVAAVALLLKDADKLTLGQNVTVIASHSLESIVRQPPDRWMTNARMTHYQSLLLNERVSFAPPAVLNPATLLPVESEATPVHRCSEILAEETGTRRDLKDQPLPGVPAWYTDGSSFIAEGKRRAGAAIVDGKRTVWASSLPEGTSAQKAELVALTQALRLAEGKDINIYTDSRYAFATAHIHGAIYKQRGWLTSAGKDIKNKEEILALLEAIHLPKRVAIIHCPGHQKGNDPVATGNRRADEAAKQAALSTRVLAETTKPAGKRTADGSEFEKRTADGSEFESPKKKAKVE

SEQ ID NO: 807 - protein, 2094 aa, synthetic construct
MPAAKRVKLDGGDKKYSIGLDIGTNSVGWAVITDEYKVPSKKFKVLGNTDRHSIKKNLIGALLFDSGETAEATRLKRTARRRYTRRKNRICYLQEIFSNEMAKVDDSFFHRLEESFLVEEDKKHERHPIFGNIVDEVAYHEKYPTIYHLRKKLVDSTDKADLRLIYLALAHMIKFRGHFLIEGDLNPDNSDVDKLFIQLVQTYNQLFEENPINASGVDAKAILSARLSKSRRLENLIAQLPGEKKNGLFGNLIALSLGLTPNFKSNFDLAEDAKLQLSKDTYDDDLDNLLAQIGDQYADLFLAAKNLSDAILLSDILRVNTEITKAPLSASMIKRYDEHHQDLTLLKALVRQQLPEKYKEIFFDQSKNGYAGYIDGGASQEEFYKFIKPILEKMDGTEELLVKLNREDLLRKQRTFDNGSIPHQIHLGELHAILRRQEDFYPFLKDNREKIEKILTFRIPYYVGPLARGNSRFAWMTRKSEETITPWNFEEVVDKGASAQSFIERMTNFDKNLPNEKVLPKHSLLYEYFTVYNELTKVKYVTEGMRKPAFLSGEQKKAIVDLLFKTNRKVTVKQLKEDYFKKIECFDSVEISGVEDRFNASLGTYHDLLKIIKDKDFLDNEENEDILEDIVLTLTLFEDREMIEERLKTYAHLFDDKVMKQLKRRRYTGWGRLSRKLINGIRDKQSGKTILDFLKSDGFANRNFMQLIHDDSLTFKEDIQKAQVSGQGDSLHEHIANLAGSPAIKKGILQTVKVVDELVKVMGRHKPENIVIEMARENQTTQKGQKNSRERMKRIEEGIKELGSQILKEHPVENTQLQNEKLYLYYLQNGRDMYVDQELDINRLSDYDVDHIVPQSFLKDDSIDNKVLTRSDKARGKSDNVPSEEVVKKMKNYWRQLLNAKLITQRKFDNLTKAERGGLSELDKAGFIKRQLVETRQITKHVAQILDSRMNTKYDENDKLIREVKVITLKSKLVSDFRKDFQFYKVREINNYHHAHDAYLNAVVGTALIKKYPKLESEFVYGDYKVYDVRKMIAKSEQEIGKATAKYFFYSNIMNFFKTEITLANGEIRKRPLIETNGETGEIVWDKGRDFATVRKVLSMPQVNIVKKTEVQTGGFSKESILPKRNSDKLIARKKDWDPKKYGGFDSPTVAYSVLVVAKVEKGKSKKLKSVKELLGITIMERSSFEKNPIDFLEAKGYKEVKKDLIIKLPKYSLFELENGRKRMLASAGELQKGNELALPSKYVNFLYLASHYEKLKGSPEDNEQKQLFVEQHKHYLDEIIEQISEFSKRVILADANLDKVLSAYNKHRDKPIREQAENIIHLFTLTNLGAPAAFKYFDTTIDRKRYTSTKEVLDATLIHQSITGLYETRIDLSQLGGDGGGGGGSSEAAAKGGVLNLEEEYRLHEKPVPSSIDPSWLQLFPTVWAERAGMGLANQVPPVVVELRSGASPVAVRQYPMSKEAREGIRPHIQRFLDLGVLVPCQSPWNTPLLPVKKPGTNDYRPVQDLREINKRVQDIHPTVPNPYNLLSSLPPSHTWYSVLDLKDAFFCLKLHPNSQPLFAFEWRDPEKGNTGQLTWTRLPQGFKNSPTLFNEALHRDLAPFRALNPQVVLLQYVDDLLVAAPTYRDCKEGTQKLLQELSKLGYRVSAKKAQLCQKEVTYLGYLLKEGKRWLTPARKATVMKIPPPTTPRQVREFLGTAGFCRLWIPGFASLAAPLYPLTKPSIPFIWTEEHQKAFDRIKEALLSAPALALPDLTKPFTLYVDERAGVARGVLTQTLGPWRRPVAYLSKKLDPVASGWPTCLKAVAAVALLLKDADKLTLGQNVTVIASHSLESIVRQPPDRWMTNARMTHYQSLLLNERVSFAPPAVLNPATLLPVESEATPVHRCSEILAEETGTRRDLKDQPLPGVPAWYTDGSSFIAEGKRRAGAAIVDGKRTVWASSLPEGTSAQKAELVALTQALRLAEGKDINIYTDSRYAFATAHIHGAIYKQRGWLTSAGKDIKNKEEILALLEAIHLPKRVAIIHCPGHQKGNDPVATGNRRADEAAKQAALSTRVLAETTKPAGKRTADGSEFEKRTADGSEFESPKKKAKVE

SEQ ID NO: 808 - protein, 2093 aa, synthetic construct
MPAAKRVKLDGGDKKYSIGLDIGTNSVGWAVITDEYKVPSKKFKVLGNTDRHSIKKNLIGALLFDSGETAEATRLKRTARRRYTRRKNRICYLQEIFSNEMAKVDDSFFHRLEESFLVEEDKKHERHPIFGNIVDEVAYHEKYPTIYHLRKKLVDSTDKADLRLIYLALAHMIKFRGHFLIEGDLNPDNSDVDKLFIQLVQTYNQLFEENPINASGVDAKAILSARLSKSRRLENLIAQLPGEKKNGLFGNLIALSLGLTPNFKSNFDLAEDAKLQLSKDTYDDDLDNLLAQIGDQYADLFLAAKNLSDAILLSDILRVNTEITKAPLSASMIKRYDEHHQDLTLLKALVRQQLPEKYKEIFFDQSKNGYAGYIDGGASQEEFYKFIKPILEKMDGTEELLVKLNREDLLRKQRTFDNGSIPHQIHLGELHAILRRQEDFYPFLKDNREKIEKILTFRIPYYVGPLARGNSRFAWMTRKSEETITPWNFEEVVDKGASAQSFIERMTNFDKNLPNEKVLPKHSLLYEYFTVYNELTKVKYVTEGMRKPAFLSGEQKKAIVDLLFKTNRKVTVKQLKEDYFKKIECFDSVEISGVEDRFNASLGTYHDLLKIIKDKDFLDNEENEDILEDIVLTLTLFEDREMIEERLKTYAHLFDDKVMKQLKRRRYTGWGRLSRKLINGIRDKQSGKTILDFLKSDGFANRNFMQLIHDDSLTFKEDIQKAQVSGQGDSLHEHIANLAGSPAIKKGILQTVKVVDELVKVMGRHKPENIVIEMARENQTTQKGQKNSRERMKRIEEGIKELGSQILKEHPVENTQLQNEKLYLYYLQNGRDMYVDQELDINRLSDYDVDHIVPQSFLKDDSIDNKVLTRSDKARGKSDNVPSEEVVKKMKNYWRQLLNAKLITQRKFDNLTKAERGGLSELDKAGFIKRQLVETRQITKHVAQILDSRMNTKYDENDKLIREVKVITLKSKLVSDFRKDFQFYKVREINNYHHAHDAYLNAVVGTALIKKYPKLESEFVYGDYKVYDVRKMIAKSEQEIGKATAKYFFYSNIMNFFKTEITLANGEIRKRPLIETNGETGEIVWDKGRDFATVRKVLSMPQVNIVKKTEVQTGGFSKESILPKRNSDKLIARKKDWDPKKYGGFDSPTVAYSVLVVAKVEKGKSKKLKSVKELLGITIMERSSFEKNPIDFLEAKGYKEVKKDLIIKLPKYSLFELENGRKRMLASAGELQKGNELALPSKYVNFLYLASHYEKLKGSPEDNEQKQLFVEQHKHYLDEIIEQISEFSKRVILADANLDKVLSAYNKHRDKPIREQAENIIHLFTLTNLGAPAAFKYFDTTIDRKRYTSTKEVLDATLIHQSITGLYETRIDLSQLGGDGGGGGGSGGGGSGGVLNLEEEYRLHEKPVPSSIDPSWLQLFPTVWAERAGMGLANQVPPVVVELRSGASPVAVRQYPMSKEAREGIRPHIQRFLDLGVLVPCQSPWNTPLLPVKKPGTNDYRPVQDLREINKRVQDIHPTVPNPYNLLSSLPPSHTWYSVLDLKDAFFCLKLHPNSQPLFAFEWRDPEKGNTGQLTWTRLPQGFKNSPTLFNEALHRDLAPFRALNPQVVLLQYVDDLLVAAPTYRDCKEGTQKLLQELSKLGYRVSAKKAQLCQKEVTYLGYLLKEGKRWLTPARKATVMKIPPPTTPRQVREFLGTAGFCRLWIPGFASLAAPLYPLTKPSIPFIWTEEHQKAFDRIKEALLSAPALALPDLTKPFTLYVDERAGVARGVLTQTLGPWRRPVAYLSKKLDPVASGWPTCLKAVAAVALLLKDADKLTLGQNVTVIASHSLESIVRQPPDRWMTNARMTHYQSLLLNERVSFAPPAVLNPATLLPVESEATPVHRCSEILAEETGTRRDLKDQPLPGVPAWYTDGSSFIAEGKRRAGAAIVDGKRTVWASSLPEGTSAQKAELVALTQALRLAEGKDINIYTDSRYAFATAHIHGAIYKQRGWLTSAGKDIKNKEEILALLEAIHLPKRVAIIHCPGHQKGNDPVATGNRRADEAAKQAALSTRVLAETTKPAGKRTADGSEFEKRTADGSEFESPKKKAKVE

SEQ ID NO: 809 - protein, 2094 aa, synthetic construct
MPAAKRVKLDGGDKKYSIGLDIGTNSVGWAVITDEYKVPSKKFKVLGNTDRHSIKKNLIGALLFDSGETAEATRLKRTARRRYTRRKNRICYLQEIFSNEMAKVDDSFFHRLEESFLVEEDKKHERHPIFGNIVDEVAYHEKYPTIYHLRKKLVDSTDKADLRLIYLALAHMIKFRGHFLIEGDLNPDNSDVDKLFIQLVQTYNQLFEENPINASGVDAKAILSARLSKSRRLENLIAQLPGEKKNGLFGNLIALSLGLTPNFKSNFDLAEDAKLQLSKDTYDDDLDNLLAQIGDQYADLFLAAKNLSDAILLSDILRVNTEITKAPLSASMIKRYDEHHQDLTLLKALVRQQLPEKYKEIFFDQSKNGYAGYIDGGASQEEFYKFIKPILEKMDGTEELLVKLNREDLLRKQRTFDNGSIPHQIHLGELHAILRRQEDFYPFLKDNREKIEKILTFRIPYYVGPLARGNSRFAWMTRKSEETITPWNFEEVVDKGASAQSFIERMTNFDKNLPNEKVLPKHSLLYEYFTVYNELTKVKYVTEGMRKPAFLSGEQKKAIVDLLFKTNRKVTVKQLKEDYFKKIECFDSVEISGVEDRFNASLGTYHDLLKIIKDKDFLDNEENEDILEDIVLTLTLFEDREMIEERLKTYAHLFDDKVMKQLKRRRYTGWGRLSRKLINGIRDKQSGKTILDFLKSDGFANRNFMQLIHDDSLTFKEDIQKAQVSGQGDSLHEHIANLAGSPAIKKGILQTVKVVDELVKVMGRHKPENIVIEMARENQTTQKGQKNSRERMKRIEEGIKELGSQILKEHPVENTQLQNEKLYLYYLQNGRDMYVDQELDINRLSDYDVDHIVPQSFLKDDSIDNKVLTRSDKARGKSDNVPSEEVVKKMKNYWRQLLNAKLITQRKFDNLTKAERGGLSELDKAGFIKRQLVETRQITKHVAQILDSRMNTKYDENDKLIREVKVITLKSKLVSDFRKDFQFYKVREINNYHHAHDAYLNAVVGTALIKKYPKLESEFVYGDYKVYDVRKMIAKSEQEIGKATAKYFFYSNIMNFFKTEITLANGEIRKRPLIETNGETGEIVWDKGRDFATVRKVLSMPQVNIVKKTEVQTGGFSKESILPKRNSDKLIARKKDWDPKKYGGFDSPTVAYSVLVVAKVEKGKSKKLKSVKELLGITIMERSSFEKNPIDFLEAKGYKEVKKDLIIKLPKYSLFELENGRKRMLASAGELQKGNELALPSKYVNFLYLASHYEKLKGSPEDNEQKQLFVEQHKHYLDEIIEQISEFSKRVILADANLDKVLSAYNKHRDKPIREQAENIIHLFTLTNLGAPAAFKYFDTTIDRKRYTSTKEVLDATLIHQSITGLYETRIDLSQLGGDGGGSSGGSEAAAKGGVLNLEEEYRLHEKPVPSSIDPSWLQLFPTVWAERAGMGLANQVPPVVVELRSGASPVAVRQYPMSKEAREGIRPHIQRFLDLGVLVPCQSPWNTPLLPVKKPGTNDYRPVQDLREINKRVQDIHPTVPNPYNLLSSLPPSHTWYSVLDLKDAFFCLKLHPNSQPLFAFEWRDPEKGNTGQLTWTRLPQGFKNSPTLFNEALHRDLAPFRALNPQVVLLQYVDDLLVAAPTYRDCKEGTQKLLQELSKLGYRVSAKKAQLCQKEVTYLGYLLKEGKRWLTPARKATVMKIPPPTTPRQVREFLGTAGFCRLWIPGFASLAAPLYPLTKPSIPFIWTEEHQKAFDRIKEALLSAPALALPDLTKPFTLYVDERAGVARGVLTQTLGPWRRPVAYLSKKLDPVASGWPTCLKAVAAVALLLKDADKLTLGQNVTVIASHSLESIVRQPPDRWMTNARMTHYQSLLLNERVSFAPPAVLNPATLLPVESEATPVHRCSEILAEETGTRRDLKDQPLPGVPAWYTDGSSFIAEGKRRAGAAIVDGKRTVWASSLPEGTSAQKAELVALTQALRLAEGKDINIYTDSRYAFATAHIHGAIYKQRGWLTSAGKDIKNKEEILALLEAIHLPKRVAIIHCPGHQKGNDPVATGNRRADEAAKQAALSTRVLAETTKPAGKRTADGSEFEKRTADGSEFESPKKKAKVE

SEQ ID NO: 810 - protein, 2089 aa, synthetic construct
MPAAKRVKLDGGDKKYSIGLDIGTNSVGWAVITDEYKVPSKKFKVLGNTDRHSIKKNLIGALLFDSGETAEATRLKRTARRRYTRRKNRICYLQEIFSNEMAKVDDSFFHRLEESFLVEEDKKHERHPIFGNIVDEVAYHEKYPTIYHLRKKLVDSTDKADLRLIYLALAHMIKFRGHFLIEGDLNPDNSDVDKLFIQLVQTYNQLFEENPINASGVDAKAILSARLSKSRRLENLIAQLPGEKKNGLFGNLIALSLGLTPNFKSNFDLAEDAKLQLSKDTYDDDLDNLLAQIGDQYADLFLAAKNLSDAILLSDILRVNTEITKAPLSASMIKRYDEHHQDLTLLKALVRQQLPEKYKEIFFDQSKNGYAGYIDGGASQEEFYKFIKPILEKMDGTEELLVKLNREDLLRKQRTFDNGSIPHQIHLGELHAILRRQEDFYPFLKDNREKIEKILTFRIPYYVGPLARGNSRFAWMTRKSEETITPWNFEEVVDKGASAQSFIERMTNFDKNLPNEKVLPKHSLLYEYFTVYNELTKVKYVTEGMRKPAFLSGEQKKAIVDLLFKTNRKVTVKQLKEDYFKKIECFDSVEISGVEDRFNASLGTYHDLLKIIKDKDFLDNEENEDILEDIVLTLTLFEDREMIEERLKTYAHLFDDKVMKQLKRRRYTGWGRLSRKLINGIRDKQSGKTILDFLKSDGFANRNFMQLIHDDSLTFKEDIQKAQVSGQGDSLHEHIANLAGSPAIKKGILQTVKVVDELVKVMGRHKPENIVIEMARENQTTQKGQKNSRERMKRIEEGIKELGSQILKEHPVENTQLQNEKLYLYYLQNGRDMYVDQELDINRLSDYDVDHIVPQSFLKDDSIDNKVLTRSDKARGKSDNVPSEEVVKKMKNYWRQLLNAKLITQRKFDNLTKAERGGLSELDKAGFIKRQLVETRQITKHVAQILDSRMNTKYDENDKLIREVKVITLKSKLVSDFRKDFQFYKVREINNYHHAHDAYLNAVVGTALIKKYPKLESEFVYGDYKVYDVRKMIAKSEQEIGKATAKYFFYSNIMNFFKTEITLANGEIRKRPLIETNGETGEIVWDKGRDFATVRKVLSMPQVNIVKKTEVQTGGFSKESILPKRNSDKLIARKKDWDPKKYGGFDSPTVAYSVLVVAKVEKGKSKKLKSVKELLGITIMERSSFEKNPIDFLEAKGYKEVKKDLIIKLPKYSLFELENGRKRMLASAGELQKGNELALPSKYVNFLYLASHYEKLKGSPEDNEQKQLFVEQHKHYLDEIIEQISEFSKRVILADANLDKVLSAYNKHRDKPIREQAENIIHLFTLTNLGAPAAFKYFDTTIDRKRYTSTKEVLDATLIHQSITGLYETRIDLSQLGGDGGPAPGGGGGVLNLEEEYRLHEKPVPSSIDPSWLQLFPTVWAERAGMGLANQVPPVVVELRSGASPVAVRQYPMSKEAREGIRPHIQRFLDLGVLVPCQSPWNTPLLPVKKPGTNDYRPVQDLREINKRVQDIHPTVPNPYNLLSSLPPSHTWYSVLDLKDAFFCLKLHPNSQPLFAFEWRDPEKGNTGQLTWTRLPQGFKNSPTLFNEALHRDLAPFRALNPQVVLLQYVDDLLVAAPTYRDCKEGTQKLLQELSKLGYRVSAKKAQLCQKEVTYLGYLLKEGKRWLTPARKATVMKIPPPTTPRQVREFLGTAGFCRLWIPGFASLAAPLYPLTKPSIPFIWTEEHQKAFDRIKEALLSAPALALPDLTKPFTLYVDERAGVARGVLTQTLGPWRRPVAYLSKKLDPVASGWPTCLKAVAAVALLLKDADKLTLGQNVTVIASHSLESIVRQPPDRWMTNARMTHYQSLLLNERVSFAPPAVLNPATLLPVESEATPVHRCSEILAEETGTRRDLKDQPLPGVPAWYTDGSSFIAEGKRRAGAAIVDGKRTVWASSLPEGTSAQKAELVALTQALRLAEGKDINIYTDSRYAFATAHIHGAIYKQRGWLTSAGKDIKNKEEILALLEAIHLPKRVAIIHCPGHQKGNDPVATGNRRADEAAKQAALSTRVLAETTKPAGKRTADGSEFEKRTADGSEFESPKKKAKVE

SEQ ID NO: 811 - protein, 2094 aa, synthetic construct
MPAAKRVKLDGGDKKYSIGLDIGTNSVGWAVITDEYKVPSKKFKVLGNTDRHSIKKNLIGALLFDSGETAEATRLKRTARRRYTRRKNRICYLQEIFSNEMAKVDDSFFHRLEESFLVEEDKKHERHPIFGNIVDEVAYHEKYPTIYHLRKKLVDSTDKADLRLIYLALAHMIKFRGHFLIEGDLNPDNSDVDKLFIQLVQTYNQLFEENPINASGVDAKAILSARLSKSRRLENLIAQLPGEKKNGLFGNLIALSLGLTPNFKSNFDLAEDAKLQLSKDTYDDDLDNLLAQIGDQYADLFLAAKNLSDAILLSDILRVNTEITKAPLSASMIKRYDEHHQDLTLLKALVRQQLPEKYKEIFFDQSKNGYAGYIDGGASQEEFYKFIKPILEKMDGTEELLVKLNREDLLRKQRTFDNGSIPHQIHLGELHAILRRQEDFYPFLKDNREKIEKILTFRIPYYVGPLARGNSRFAWMTRKSEETITPWNFEEVVDKGASAQSFIERMTNFDKNLPNEKVLPKHSLLYEYFTVYNELTKVKYVTEGMRKPAFLSGEQKKAIVDLLFKTNRKVTVKQLKEDYFKKIECFDSVEISGVEDRFNASLGTYHDLLKIIKDKDFLDNEENEDILEDIVLTLTLFEDREMIEERLKTYAHLFDDKVMKQLKRRRYTGWGRLSRKLINGIRDKQSGKTILDFLKSDGFANRNFMQLIHDDSLTFKEDIQKAQVSGQGDSLHEHIANLAGSPAIKKGILQTVKVVDELVKVMGRHKPENIVIEMARENQTTQKGQKNSRERMKRIEEGIKELGSQILKEHPVENTQLQNEKLYLYYLQNGRDMYVDQELDINRLSDYDVDHIVPQSFLKDDSIDNKVLTRSDKARGKSDNVPSEEVVKKMKNYWRQLLNAKLITQRKFDNLTKAERGGLSELDKAGFIKRQLVETRQITKHVAQILDSRMNTKYDENDKLIREVKVITLKSKLVSDFRKDFQFYKVREINNYHHAHDAYLNAVVGTALIKKYPKLESEFVYGDYKVYDVRKMIAKSEQEIGKATAKYFFYSNIMNFFKTEITLANGEIRKRPLIETNGETGEIVWDKGRDFATVRKVLSMPQVNIVKKTEVQTGGFSKESILPKRNSDKLIARKKDWDPKKYGGFDSPTVAYSVLVVAKVEKGKSKKLKSVKELLGITIMERSSFEKNPIDFLEAKGYKEVKKDLIIKLPKYSLFELENGRKRMLASAGELQKGNELALPSKYVNFLYLASHYEKLKGSPEDNEQKQLFVEQHKHYLDEIIEQISEFSKRVILADANLDKVLSAYNKHRDKPIREQAENIIHLFTLTNLGAPAAFKYFDTTIDRKRYTSTKEVLDATLIHQSITGLYETRIDLSQLGGDGGGGGEAAAKGSSGGVLNLEEEYRLHEKPVPSSIDPSWLQLFPTVWAERAGMGLANQVPPVVVELRSGASPVAVRQYPMSKEAREGIRPHIQRFLDLGVLVPCQSPWNTPLLPVKKPGTNDYRPVQDLREINKRVQDIHPTVPNPYNLLSSLPPSHTWYSVLDLKDAFFCLKLHPNSQPLFAFEWRDPEKGNTGQLTWTRLPQGFKNSPTLFNEALHRDLAPFRALNPQVVLLQYVDDLLVAAPTYRDCKEGTQKLLQELSKLGYRVSAKKAQLCQKEVTYLGYLLKEGKRWLTPARKATVMKIPPPTTPRQVREFLGTAGFCRLWIPGFASLAAPLYPLTKPSIPFIWTEEHQKAFDRIKEALLSAPALALPDLTKPFTLYVDERAGVARGVLTQTLGPWRRPVAYLSKKLDPVASGWPTCLKAVAAVALLLKDADKLTLGQNVTVIASHSLESIVRQPPDRWMTNARMTHYQSLLLNERVSFAPPAVLNPATLLPVESEATPVHRCSEILAEETGTRRDLKDQPLPGVPAWYTDGSSFIAEGKRRAGAAIVDGKRTVWASSLPEGTSAQKAELVALTQALRLAEGKDINIYTDSRYAFATAHIHGAIYKQRGWLTSAGKDIKNKEEILALLEAIHLPKRVAIIHCPGHQKGNDPVATGNRRADEAAKQAALSTRVLAETTKPAGKRTADGSEFEKRTADGSEFESPKKKAKVE

SEQ ID NO: 812 - protein, 2094 aa, synthetic construct
MPAAKRVKLDGGDKKYSIGLDIGTNSVGWAVITDEYKVPSKKFKVLGNTDRHSIKKNLIGALLFDSGETAEATRLKRTARRRYTRRKNRICYLQEIFSNEMAKVDDSFFHRLEESFLVEEDKKHERHPIFGNIVDEVAYHEKYPTIYHLRKKLVDSTDKADLRLIYLALAHMIKFRGHFLIEGDLNPDNSDVDKLFIQLVQTYNQLFEENPINASGVDAKAILSARLSKSRRLENLIAQLPGEKKNGLFGNLIALSLGLTPNFKSNFDLAEDAKLQLSKDTYDDDLDNLLAQIGDQYADLFLAAKNLSDAILLSDILRVNTEITKAPLSASMIKRYDEHHQDLTLLKALVRQQLPEKYKEIFFDQSKNGYAGYIDGGASQEEFYKFIKPILEKMDGTEELLVKLNREDLLRKQRTFDNGSIPHQIHLGELHAILRRQEDFYPFLKDNREKIEKILTFRIPYYVGPLARGNSRFAWMTRKSEETITPWNFEEVVDKGASAQSFIERMTNFDKNLPNEKVLPKHSLLYEYFTVYNELTKVKYVTEGMRKPAFLSGEQKKAIVDLLFKTNRKVTVKQLKEDYFKKIECFDSVEISGVEDRFNASLGTYHDLLKIIKDKDFLDNEENEDILEDIVLTLTLFEDREMIEERLKTYAHLFDDKVMKQLKRRRYTGWGRLSRKLINGIRDKQSGKTILDFLKSDGFANRNFMQLIHDDSLTFKEDIQKAQVSGQGDSLHEHIANLAGSPAIKKGILQTVKVVDELVKVMGRHKPENIVIEMARENQTTQKGQKNSRERMKRIEEGIKELGSQILKEHPVENTQLQNEKLYLYYLQNGRDMYVDQELDINRLSDYDVDHIVPQSFLKDDSIDNKVLTRSDKARGKSDNVPSEEVVKKMKNYWRQLLNAKLITQRKFDNLTKAERGGLSELDKAGFIKRQLVETRQITKHVAQILDSRMNTKYDENDKLIREVKVITLKSKLVSDFRKDFQFYKVREINNYHHAHDAYLNAVVGTALIKKYPKLESEFVYGDYKVYDVRKMIAKSEQEIGKATAKYFFYSNIMNFFKTEITLANGEIRKRPLIETNGETGEIVWDKGRDFATVRKVLSMPQVNIVKKTEVQTGGFSKESILPKRNSDKLIARKKDWDPKKYGGFDSPTVAYSVLVVAKVEKGKSKKLKSVKELLGITIMERSSFEKNPIDFLEAKGYKEVKKDLIIKLPKYSLFELENGRKRMLASAGELQKGNELALPSKYVNFLYLASHYEKLKGSPEDNEQKQLFVEQHKHYLDEIIEQISEFSKRVILADANLDKVLSAYNKHRDKPIREQAENIIHLFTLTNLGAPAAFKYFDTTIDRKRYTSTKEVLDATLIHQSITGLYETRIDLSQLGGDGGEAAAKGSSPAPGGVLNLEEEYRLHEKPVPSSIDPSWLQLFPTVWAERAGMGLANQVPPVVVELRSGASPVAVRQYPMSKEAREGIRPHIQRFLDLGVLVPCQSPWNTPLLPVKKPGTNDYRPVQDLREINKRVQDIHPTVPNPYNLLSSLPPSHTWYSVLDLKDAFFCLKLHPNSQPLFAFEWRDPEKGNTGQLTWTRLPQGFKNSPTLFNEALHRDLAPFRALNPQVVLLQYVDDLLVAAPTYRDCKEGTQKLLQELSKLGYRVSAKKAQLCQKEVTYLGYLLKEGKRWLTPARKATVMKIPPPTTPRQVREFLGTAGFCRLWIPGFASLAAPLYPLTKPSIPFIWTEEHQKAFDRIKEALLSAPALALPDLTKPFTLYVDERAGVARGVLTQTLGPWRRPVAYLSKKLDPVASGWPTCLKAVAAVALLLKDADKLTLGQNVTVIASHSLESIVRQPPDRWMTNARMTHYQSLLLNERVSFAPPAVLNPATLLPVESEATPVHRCSEILAEETGTRRDLKDQPLPGVPAWYTDGSSFIAEGKRRAGAAIVDGKRTVWASSLPEGTSAQKAELVALTQALRLAEGKDINIYTDSRYAFATAHIHGAIYKQRGWLTSAGKDIKNKEEILALLEAIHLPKRVAIIHCPGHQKGNDPVATGNRRADEAAKQAALSTRVLAETTKPAGKRTADGSEFEKRTADGSEFESPKKKAKVE

SEQ ID NO: 813 - protein, 2098 aa, synthetic construct
MPAAKRVKLDGGDKKYSIGLDIGTNSVGWAVITDEYKVPSKKFKVLGNTDRHSIKKNLIGALLFDSGETAEATRLKRTARRRYTRRKNRICYLQEIFSNEMAKVDDSFFHRLEESFLVEEDKKHERHPIFGNIVDEVAYHEKYPTIYHLRKKLVDSTDKADLRLIYLALAHMIKFRGHFLIEGDLNPDNSDVDKLFIQLVQTYNQLFEENPINASGVDAKAILSARLSKSRRLENLIAQLPGEKKNGLFGNLIALSLGLTPNFKSNFDLAEDAKLQLSKDTYDDDLDNLLAQIGDQYADLFLAAKNLSDAILLSDILRVNTEITKAPLSASMIKRYDEHHQDLTLLKALVRQQLPEKYKEIFFDQSKNGYAGYIDGGASQEEFYKFIKPILEKMDGTEELLVKLNREDLLRKQRTFDNGSIPHQIHLGELHAILRRQEDFYPFLKDNREKIEKILTFRIPYYVGPLARGNSRFAWMTRKSEETITPWNFEEVVDKGASAQSFIERMTNFDKNLPNEKVLPKHSLLYEYFTVYNELTKVKYVTEGMRKPAFLSGEQKKAIVDLLFKTNRKVTVKQLKEDYFKKIECFDSVEISGVEDRFNASLGTYHDLLKIIKDKDFLDNEENEDILEDIVLTLTLFEDREMIEERLKTYAHLFDDKVMKQLKRRRYTGWGRLSRKLINGIRDKQSGKTILDFLKSDGFANRNFMQLIHDDSLTFKEDIQKAQVSGQGDSLHEHIANLAGSPAIKKGILQTVKVVDELVKVMGRHKPENIVIEMARENQTTQKGQKNSRERMKRIEEGIKELGSQILKEHPVENTQLQNEKLYLYYLQNGRDMYVDQELDINRLSDYDVDHIVPQSFLKDDSIDNKVLTRSDKARGKSDNVPSEEVVKKMKNYWRQLLNAKLITQRKFDNLTKAERGGLSELDKAGFIKRQLVETRQITKHVAQILDSRMNTKYDENDKLIREVKVITLKSKLVSDFRKDFQFYKVREINNYHHAHDAYLNAVVGTALIKKYPKLESEFVYGDYKVYDVRKMIAKSEQEIGKATAKYFFYSNIMNFFKTEITLANGEIRKRPLIETNGETGEIVWDKGRDFATVRKVLSMPQVNIVKKTEVQTGGFSKESILPKRNSDKLIARKKDWDPKKYGGFDSPTVAYSVLVVAKVEKGKSKKLKSVKELLGITIMERSSFEKNPIDFLEAKGYKEVKKDLIIKLPKYSLFELENGRKRMLASAGELQKGNELALPSKYVNFLYLASHYEKLKGSPEDNEQKQLFVEQHKHYLDEIIEQISEFSKRVILADANLDKVLSAYNKHRDKPIREQAENIIHLFTLTNLGAPAAFKYFDTTIDRKRYTSTKEVLDATLIHQSITGLYETRIDLSQLGGDGGGSSGSSGSSGSSGSSGGVLNLEEEYRLHEKPVPSSIDPSWLQLFPTVWAERAGMGLANQVPPVVVELRSGASPVAVRQYPMSKEAREGIRPHIQRFLDLGVLVPCQSPWNTPLLPVKKPGTNDYRPVQDLREINKRVQDIHPTVPNPYNLLSSLPPSHTWYSVLDLKDAFFCLKLHPNSQPLFAFEWRDPEKGNTGQLTWTRLPQGFKNSPTLFNEALHRDLAPFRALNPQVVLLQYVDDLLVAAPTYRDCKEGTQKLLQELSKLGYRVSAKKAQLCQKEVTYLGYLLKEGKRWLTPARKATVMKIPPPTTPRQVREFLGTAGFCRLWIPGFASLAAPLYPLTKPSIPFIWTEEHQKAFDRIKEALLSAPALALPDLTKPFTLYVDERAGVARGVLTQTLGPWRRPVAYLSKKLDPVASGWPTCLKAVAAVALLLKDADKLTLGQNVTVIASHSLESIVRQPPDRWMTNARMTHYQSLLLNERVSFAPPAVLNPATLLPVESEATPVHRCSEILAEETGTRRDLKDQPLPGVPAWYTDGSSFIAEGKRRAGAAIVDGKRTVWASSLPEGTSAQKAELVALTQALRLAEGKDINIYTDSRYAFATAHIHGAIYKQRGWLTSAGKDIKNKEEILALLEAIHLPKRVAIIHCPGHQKGNDPVATGNRRADEAAKQAALSTRVLAETTKPAGKRTADGSEFEKRTADGSEFESPKKKAKVE

SEQ ID NO: 814 - protein, 2094 aa, synthetic construct
MPAAKRVKLDGGDKKYSIGLDIGTNSVGWAVITDEYKVPSKKFKVLGNTDRHSIKKNLIGALLFDSGETAEATRLKRTARRRYTRRKNRICYLQEIFSNEMAKVDDSFFHRLEESFLVEEDKKHERHPIFGNIVDEVAYHEKYPTIYHLRKKLVDSTDKADLRLIYLALAHMIKFRGHFLIEGDLNPDNSDVDKLFIQLVQTYNQLFEENPINASGVDAKAILSARLSKSRRLENLIAQLPGEKKNGLFGNLIALSLGLTPNFKSNFDLAEDAKLQLSKDTYDDDLDNLLAQIGDQYADLFLAAKNLSDAILLSDILRVNTEITKAPLSASMIKRYDEHHQDLTLLKALVRQQLPEKYKEIFFDQSKNGYAGYIDGGASQEEFYKFIKPILEKMDGTEELLVKLNREDLLRKQRTFDNGSIPHQIHLGELHAILRRQEDFYPFLKDNREKIEKILTFRIPYYVGPLARGNSRFAWMTRKSEETITPWNFEEVVDKGASAQSFIERMTNFDKNLPNEKVLPKHSLLYEYFTVYNELTKVKYVTEGMRKPAFLSGEQKKAIVDLLFKTNRKVTVKQLKEDYFKKIECFDSVEISGVEDRFNASLGTYHDLLKIIKDKDFLDNEENEDILEDIVLTLTLFEDREMIEERLKTYAHLFDDKVMKQLKRRRYTGWGRLSRKLINGIRDKQSGKTILDFLKSDGFANRNFMQLIHDDSLTFKEDIQKAQVSGQGDSLHEHIANLAGSPAIKKGILQTVKVVDELVKVMGRHKPENIVIEMARENQTTQKGQKNSRERMKRIEEGIKELGSQILKEHPVENTQLQNEKLYLYYLQNGRDMYVDQELDINRLSDYDVDHIVPQSFLKDDSIDNKVLTRSDKARGKSDNVPSEEVVKKMKNYWRQLLNAKLITQRKFDNLTKAERGGLSELDKAGFIKRQLVETRQITKHVAQILDSRMNTKYDENDKLIREVKVITLKSKLVSDFRKDFQFYKVREINNYHHAHDAYLNAVVGTALIKKYPKLESEFVYGDYKVYDVRKMIAKSEQEIGKATAKYFFYSNIMNFFKTEITLANGEIRKRPLIETNGETGEIVWDKGRDFATVRKVLSMPQVNIVKKTEVQTGGFSKESILPKRNSDKLIARKKDWDPKKYGGFDSPTVAYSVLVVAKVEKGKSKKLKSVKELLGITIMERSSFEKNPIDFLEAKGYKEVKKDLIIKLPKYSLFELENGRKRMLASAGELQKGNELALPSKYVNFLYLASHYEKLKGSPEDNEQKQLFVEQHKHYLDEIIEQISEFSKRVILADANLDKVLSAYNKHRDKPIREQAENIIHLFTLTNLGAPAAFKYFDTTIDRKRYTSTKEVLDATLIHQSITGLYETRIDLSQLGGDGGPAPAPAPAPAPGGVLNLEEEYRLHEKPVPSSIDPSWLQLFPTVWAERAGMGLANQVPPVVVELRSGASPVAVRQYPMSKEAREGIRPHIQRFLDLGVLVPCQSPWNTPLLPVKKPGTNDYRPVQDLREINKRVQDIHPTVPNPYNLLSSLPPSHTWYSVLDLKDAFFCLKLHPNSQPLFAFEWRDPEKGNTGQLTWTRLPQGFKNSPTLFNEALHRDLAPFRALNPQVVLLQYVDDLLVAAPTYRDCKEGTQKLLQELSKLGYRVSAKKAQLCQKEVTYLGYLLKEGKRWLTPARKATVMKIPPPTTPRQVREFLGTAGFCRLWIPGFASLAAPLYPLTKPSIPFIWTEEHQKAFDRIKEALLSAPALALPDLTKPFTLYVDERAGVARGVLTQTLGPWRRPVAYLSKKLDPVASGWPTCLKAVAAVALLLKDADKLTLGQNVTVIASHSLESIVRQPPDRWMTNARMTHYQSLLLNERVSFAPPAVLNPATLLPVESEATPVHRCSEILAEETGTRRDLKDQPLPGVPAWYTDGSSFIAEGKRRAGAAIVDGKRTVWASSLPEGTSAQKAELVALTQALRLAEGKDINIYTDSRYAFATAHIHGAIYKQRGWLTSAGKDIKNKEEILALLEAIHLPKRVAIIHCPGHQKGNDPVATGNRRADEAAKQAALSTRVLAETTKPAGKRTADGSEFEKRTADGSEFESPKKKAKVE

SEQ ID NO: 815 - protein, 2086 aa, synthetic construct
MPAAKRVKLDGGDKKYSIGLDIGTNSVGWAVITDEYKVPSKKFKVLGNTDRHSIKKNLIGALLFDSGETAEATRLKRTARRRYTRRKNRICYLQEIFSNEMAKVDDSFFHRLEESFLVEEDKKHERHPIFGNIVDEVAYHEKYPTIYHLRKKLVDSTDKADLRLIYLALAHMIKFRGHFLIEGDLNPDNSDVDKLFIQLVQTYNQLFEENPINASGVDAKAILSARLSKSRRLENLIAQLPGEKKNGLFGNLIALSLGLTPNFKSNFDLAEDAKLQLSKDTYDDDLDNLLAQIGDQYADLFLAAKNLSDAILLSDILRVNTEITKAPLSASMIKRYDEHHQDLTLLKALVRQQLPEKYKEIFFDQSKNGYAGYIDGGASQEEFYKFIKPILEKMDGTEELLVKLNREDLLRKQRTFDNGSIPHQIHLGELHAILRRQEDFYPFLKDNREKIEKILTFRIPYYVGPLARGNSRFAWMTRKSEETITPWNFEEVVDKGASAQSFIERMTNFDKNLPNEKVLPKHSLLYEYFTVYNELTKVKYVTEGMRKPAFLSGEQKKAIVDLLFKTNRKVTVKQLKEDYFKKIECFDSVEISGVEDRFNASLGTYHDLLKIIKDKDFLDNEENEDILEDIVLTLTLFEDREMIEERLKTYAHLFDDKVMKQLKRRRYTGWGRLSRKLINGIRDKQSGKTILDFLKSDGFANRNFMQLIHDDSLTFKEDIQKAQVSGQGDSLHEHIANLAGSPAIKKGILQTVKVVDELVKVMGRHKPENIVIEMARENQTTQKGQKNSRERMKRIEEGIKELGSQILKEHPVENTQLQNEKLYLYYLQNGRDMYVDQELDINRLSDYDVDHIVPQSFLKDDSIDNKVLTRSDKARGKSDNVPSEEVVKKMKNYWRQLLNAKLITQRKFDNLTKAERGGLSELDKAGFIKRQLVETRQITKHVAQILDSRMNTKYDENDKLIREVKVITLKSKLVSDFRKDFQFYKVREINNYHHAHDAYLNAVVGTALIKKYPKLESEFVYGDYKVYDVRKMIAKSEQEIGKATAKYFFYSNIMNFFKTEITLANGEIRKRPLIETNGETGEIVWDKGRDFATVRKVLSMPQVNIVKKTEVQTGGFSKESILPKRNSDKLIARKKDWDPKKYGGFDSPTVAYSVLVVAKVEKGKSKKLKSVKELLGITIMERSSFEKNPIDFLEAKGYKEVKKDLIIKLPKYSLFELENGRKRMLASAGELQKGNELALPSKYVNFLYLASHYEKLKGSPEDNEQKQLFVEQHKHYLDEIIEQISEFSKRVILADANLDKVLSAYNKHRDKPIREQAENIIHLFTLTNLGAPAAFKYFDTTIDRKRYTSTKEVLDATLIHQSITGLYETRIDLSQLGGDGGGGGGGVLNLEEEYRLHEKPVPSSIDPSWLQLFPTVWAERAGMGLANQVPPVVVELRSGASPVAVRQYPMSKEAREGIRPHIQRFLDLGVLVPCQSPWNTPLLPVKKPGTNDYRPVQDLREINKRVQDIHPTVPNPYNLLSSLPPSHTWYSVLDLKDAFFCLKLHPNSQPLFAFEWRDPEKGNTGQLTWTRLPQGFKNSPTLFNEALHRDLAPFRALNPQVVLLQYVDDLLVAAPTYRDCKEGTQKLLQELSKLGYRVSAKKAQLCQKEVTYLGYLLKEGKRWLTPARKATVMKIPPPTTPRQVREFLGTAGFCRLWIPGFASLAAPLYPLTKPSIPFIWTEEHQKAFDRIKEALLSAPALALPDLTKPFTLYVDERAGVARGVLTQTLGPWRRPVAYLSKKLDPVASGWPTCLKAVAAVALLLKDADKLTLGQNVTVIASHSLESIVRQPPDRWMTNARMTHYQSLLLNERVSFAPPAVLNPATLLPVESEATPVHRCSEILAEETGTRRDLKDQPLPGVPAWYTDGSSFIAEGKRRAGAAIVDGKRTVWASSLPEGTSAQKAELVALTQALRLAEGKDINIYTDSRYAFATAHIHGAIYKQRGWLTSAGKDIKNKEEILALLEAIHLPKRVAIIHCPGHQKGNDPVATGNRRADEAAKQAALSTRVLAETTKPAGKRTADGSEFEKRTADGSEFESPKKKAKVE

SEQ ID NO: 816 - protein, 2087 aa, synthetic construct
MPAAKRVKLDGGDKKYSIGLDIGTNSVGWAVITDEYKVPSKKFKVLGNTDRHSIKKNLIGALLFDSGETAEATRLKRTARRRYTRRKNRICYLQEIFSNEMAKVDDSFFHRLEESFLVEEDKKHERHPIFGNIVDEVAYHEKYPTIYHLRKKLVDSTDKADLRLIYLALAHMIKFRGHFLIEGDLNPDNSDVDKLFIQLVQTYNQLFEENPINASGVDAKAILSARLSKSRRLENLIAQLPGEKKNGLFGNLIALSLGLTPNFKSNFDLAEDAKLQLSKDTYDDDLDNLLAQIGDQYADLFLAAKNLSDAILLSDILRVNTEITKAPLSASMIKRYDEHHQDLTLLKALVRQQLPEKYKEIFFDQSKNGYAGYIDGGASQEEFYKFIKPILEKMDGTEELLVKLNREDLLRKQRTFDNGSIPHQIHLGELHAILRRQEDFYPFLKDNREKIEKILTFRIPYYVGPLARGNSRFAWMTRKSEETITPWNFEEVVDKGASAQSFIERMTNFDKNLPNEKVLPKHSLLYEYFTVYNELTKVKYVTEGMRKPAFLSGEQKKAIVDLLFKTNRKVTVKQLKEDYFKKIECFDSVEISGVEDRFNASLGTYHDLLKIIKDKDFLDNEENEDILEDIVLTLTLFEDREMIEERLKTYAHLFDDKVMKQLKRRRYTGWGRLSRKLINGIRDKQSGKTILDFLKSDGFANRNFMQLIHDDSLTFKEDIQKAQVSGQGDSLHEHIANLAGSPAIKKGILQTVKVVDELVKVMGRHKPENIVIEMARENQTTQKGQKNSRERMKRIEEGIKELGSQILKEHPVENTQLQNEKLYLYYLQNGRDMYVDQELDINRLSDYDVDHIVPQSFLKDDSIDNKVLTRSDKARGKSDNVPSEEVVKKMKNYWRQLLNAKLITQRKFDNLTKAERGGLSELDKAGFIKRQLVETRQITKHVAQILDSRMNTKYDENDKLIREVKVITLKSKLVSDFRKDFQFYKVREINNYHHAHDAYLNAVVGTALIKKYPKLESEFVYGDYKVYDVRKMIAKSEQEIGKATAKYFFYSNIMNFFKTEITLANGEIRKRPLIETNGETGEIVWDKGRDFATVRKVLSMPQVNIVKKTEVQTGGFSKESILPKRNSDKLIARKKDWDPKKYGGFDSPTVAYSVLVVAKVEKGKSKKLKSVKELLGITIMERSSFEKNPIDFLEAKGYKEVKKDLIIKLPKYSLFELENGRKRMLASAGELQKGNELALPSKYVNFLYLASHYEKLKGSPEDNEQKQLFVEQHKHYLDEIIEQISEFSKRVILADANLDKVLSAYNKHRDKPIREQAENIIHLFTLTNLGAPAAFKYFDTTIDRKRYTSTKEVLDATLIHQSITGLYETRIDLSQLGGDGGGGGGGGVLNLEEEYRLHEKPVPSSIDPSWLQLFPTVWAERAGMGLANQVPPVVVELRSGASPVAVRQYPMSKEAREGIRPHIQRFLDLGVLVPCQSPWNTPLLPVKKPGTNDYRPVQDLREINKRVQDIHPTVPNPYNLLSSLPPSHTWYSVLDLKDAFFCLKLHPNSQPLFAFEWRDPEKGNTGQLTWTRLPQGFKNSPTLFNEALHRDLAPFRALNPQVVLLQYVDDLLVAAPTYRDCKEGTQKLLQELSKLGYRVSAKKAQLCQKEVTYLGYLLKEGKRWLTPARKATVMKIPPPTTPRQVREFLGTAGFCRLWIPGFASLAAPLYPLTKPSIPFIWTEEHQKAFDRIKEALLSAPALALPDLTKPFTLYVDERAGVARGVLTQTLGPWRRPVAYLSKKLDPVASGWPTCLKAVAAVALLLKDADKLTLGQNVTVIASHSLESIVRQPPDRWMTNARMTHYQSLLLNERVSFAPPAVLNPATLLPVESEATPVHRCSEILAEETGTRRDLKDQPLPGVPAWYTDGSSFIAEGKRRAGAAIVDGKRTVWASSLPEGTSAQKAELVALTQALRLAEGKDINIYTDSRYAFATAHIHGAIYKQRGWLTSAGKDIKNKEEILALLEAIHLPKRVAIIHCPGHQKGNDPVATGNRRADEAAKQAALSTRVLAETTKPAGKRTADGSEFEKRTADGSEFESPKKKAKVE

SEQ ID NO: 817 - protein, 2091 aa, synthetic construct
MPAAKRVKLDGGDKKYSIGLDIGTNSVGWAVITDEYKVPSKKFKVLGNTDRHSIKKNLIGALLFDSGETAEATRLKRTARRRYTRRKNRICYLQEIFSNEMAKVDDSFFHRLEESFLVEEDKKHERHPIFGNIVDEVAYHEKYPTIYHLRKKLVDSTDKADLRLIYLALAHMIKFRGHFLIEGDLNPDNSDVDKLFIQLVQTYNQLFEENPINASGVDAKAILSARLSKSRRLENLIAQLPGEKKNGLFGNLIALSLGLTPNFKSNFDLAEDAKLQLSKDTYDDDLDNLLAQIGDQYADLFLAAKNLSDAILLSDILRVNTEITKAPLSASMIKRYDEHHQDLTLLKALVRQQLPEKYKEIFFDQSKNGYAGYIDGGASQEEFYKFIKPILEKMDGTEELLVKLNREDLLRKQRTFDNGSIPHQIHLGELHAILRRQEDFYPFLKDNREKIEKILTFRIPYYVGPLARGNSRFAWMTRKSEETITPWNFEEVVDKGASAQSFIERMTNFDKNLPNEKVLPKHSLLYEYFTVYNELTKVKYVTEGMRKPAFLSGEQKKAIVDLLFKTNRKVTVKQLKEDYFKKIECFDSVEISGVEDRFNASLGTYHDLLKIIKDKDFLDNEENEDILEDIVLTLTLFEDREMIEERLKTYAHLFDDKVMKQLKRRRYTGWGRLSRKLINGIRDKQSGKTILDFLKSDGFANRNFMQLIHDDSLTFKEDIQKAQVSGQGDSLHEHIANLAGSPAIKKGILQTVKVVDELVKVMGRHKPENIVIEMARENQTTQKGQKNSRERMKRIEEGIKELGSQILKEHPVENTQLQNEKLYLYYLQNGRDMYVDQELDINRLSDYDVDHIVPQSFLKDDSIDNKVLTRSDKARGKSDNVPSEEVVKKMKNYWRQLLNAKLITQRKFDNLTKAERGGLSELDKAGFIKRQLVETRQITKHVAQILDSRMNTKYDENDKLIREVKVITLKSKLVSDFRKDFQFYKVREINNYHHAHDAYLNAVVGTALIKKYPKLESEFVYGDYKVYDVRKMIAKSEQEIGKATAKYFFYSNIMNFFKTEITLANGEIRKRPLIETNGETGEIVWDKGRDFATVRKVLSMPQVNIVKKTEVQTGGFSKESILPKRNSDKLIARKKDWDPKKYGGFDSPTVAYSVLVVAKVEKGKSKKLKSVKELLGITIMERSSFEKNPIDFLEAKGYKEVKKDLIIKLPKYSLFELENGRKRMLASAGELQKGNELALPSKYVNFLYLASHYEKLKGSPEDNEQKQLFVEQHKHYLDEIIEQISEFSKRVILADANLDKVLSAYNKHRDKPIREQAENIIHLFTLTNLGAPAAFKYFDTTIDRKRYTSTKEVLDATLIHQSITGLYETRIDLSQLGGDGGEAAAKGGGGGVLNLEEEYRLHEKPVPSSIDPSWLQLFPTVWAERAGMGLANQVPPVVVELRSGASPVAVRQYPMSKEAREGIRPHIQRFLDLGVLVPCQSPWNTPLLPVKKPGTNDYRPVQDLREINKRVQDIHPTVPNPYNLLSSLPPSHTWYSVLDLKDAFFCLKLHPNSQPLFAFEWRDPEKGNTGQLTWTRLPQGFKNSPTLFNEALHRDLAPFRALNPQVVLLQYVDDLLVAAPTYRDCKEGTQKLLQELSKLGYRVSAKKAQLCQKEVTYLGYLLKEGKRWLTPARKATVMKIPPPTTPRQVREFLGTAGFCRLWIPGFASLAAPLYPLTKPSIPFIWTEEHQKAFDRIKEALLSAPALALPDLTKPFTLYVDERAGVARGVLTQTLGPWRRPVAYLSKKLDPVASGWPTCLKAVAAVALLLKDADKLTLGQNVTVIASHSLESIVRQPPDRWMTNARMTHYQSLLLNERVSFAPPAVLNPATLLPVESEATPVHRCSEILAEETGTRRDLKDQPLPGVPAWYTDGSSFIAEGKRRAGAAIVDGKRTVWASSLPEGTSAQKAELVALTQALRLAEGKDINIYTDSRYAFATAHIHGAIYKQRGWLTSAGKDIKNKEEILALLEAIHLPKRVAIIHCPGHQKGNDPVATGNRRADEAAKQAALSTRVLAETTKPAGKRTADGSEFEKRTADGSEFESPKKKAKVE

SEQ ID NO: 818 - protein, 2101 aa, synthetic construct
MPAAKRVKLDGGDKKYSIGLDIGTNSVGWAVITDEYKVPSKKFKVLGNTDRHSIKKNLIGALLFDSGETAEATRLKRTARRRYTRRKNRICYLQEIFSNEMAKVDDSFFHRLEESFLVEEDKKHERHPIFGNIVDEVAYHEKYPTIYHLRKKLVDSTDKADLRLIYLALAHMIKFRGHFLIEGDLNPDNSDVDKLFIQLVQTYNQLFEENPINASGVDAKAILSARLSKSRRLENLIAQLPGEKKNGLFGNLIALSLGLTPNFKSNFDLAEDAKLQLSKDTYDDDLDNLLAQIGDQYADLFLAAKNLSDAILLSDILRVNTEITKAPLSASMIKRYDEHHQDLTLLKALVRQQLPEKYKEIFFDQSKNGYAGYIDGGASQEEFYKFIKPILEKMDGTEELLVKLNREDLLRKQRTFDNGSIPHQIHLGELHAILRRQEDFYPFLKDNREKIEKILTFRIPYYVGPLARGNSRFAWMTRKSEETITPWNFEEVVDKGASAQSFIERMTNFDKNLPNEKVLPKHSLLYEYFTVYNELTKVKYVTEGMRKPAFLSGEQKKAIVDLLFKTNRKVTVKQLKEDYFKKIECFDSVEISGVEDRFNASLGTYHDLLKIIKDKDFLDNEENEDILEDIVLTLTLFEDREMIEERLKTYAHLFDDKVMKQLKRRRYTGWGRLSRKLINGIRDKQSGKTILDFLKSDGFANRNFMQLIHDDSLTFKEDIQKAQVSGQGDSLHEHIANLAGSPAIKKGILQTVKVVDELVKVMGRHKPENIVIEMARENQTTQKGQKNSRERMKRIEEGIKELGSQILKEHPVENTQLQNEKLYLYYLQNGRDMYVDQELDINRLSDYDVDHIVPQSFLKDDSIDNKVLTRSDKARGKSDNVPSEEVVKKMKNYWRQLLNAKLITQRKFDNLTKAERGGLSELDKAGFIKRQLVETRQITKHVAQILDSRMNTKYDENDKLIREVKVITLKSKLVSDFRKDFQFYKVREINNYHHAHDAYLNAVVGTALIKKYPKLESEFVYGDYKVYDVRKMIAKSEQEIGKATAKYFFYSNIMNFFKTEITLANGEIRKRPLIETNGETGEIVWDKGRDFATVRKVLSMPQVNIVKKTEVQTGGFSKESILPKRNSDKLIARKKDWDPKKYGGFDSPTVAYSVLVVAKVEKGKSKKLKSVKELLGITIMERSSFEKNPIDFLEAKGYKEVKKDLIIKLPKYSLFELENGRKRMLASAGELQKGNELALPSKYVNFLYLASHYEKLKGSPEDNEQKQLFVEQHKHYLDEIIEQISEFSKRVILADANLDKVLSAYNKHRDKPIREQAENIIHLFTLTNLGAPAAFKYFDTTIDRKRYTSTKEVLDATLIHQSITGLYETRIDLSQLGGDGGGSSGSSGSSGSSGSSGSSGGVLNLEEEYRLHEKPVPSSIDPSWLQLFPTVWAERAGMGLANQVPPVVVELRSGASPVAVRQYPMSKEAREGIRPHIQRFLDLGVLVPCQSPWNTPLLPVKKPGTNDYRPVQDLREINKRVQDIHPTVPNPYNLLSSLPPSHTWYSVLDLKDAFFCLKLHPNSQPLFAFEWRDPEKGNTGQLTWTRLPQGFKNSPTLFNEALHRDLAPFRALNPQVVLLQYVDDLLVAAPTYRDCKEGTQKLLQELSKLGYRVSAKKAQLCQKEVTYLGYLLKEGKRWLTPARKATVMKIPPPTTPRQVREFLGTAGFCRLWIPGFASLAAPLYPLTKPSIPFIWTEEHQKAFDRIKEALLSAPALALPDLTKPFTLYVDERAGVARGVLTQTLGPWRRPVAYLSKKLDPVASGWPTCLKAVAAVALLLKDADKLTLGQNVTVIASHSLESIVRQPPDRWMTNARMTHYQSLLLNERVSFAPPAVLNPATLLPVESEATPVHRCSEILAEETGTRRDLKDQPLPGVPAWYTDGSSFIAEGKRRAGAAIVDGKRTVWASSLPEGTSAQKAELVALTQALRLAEGKDINIYTDSRYAFATAHIHGAIYKQRGWLTSAGKDIKNKEEILALLEAIHLPKRVAIIHCPGHQKGNDPVATGNRRADEAAKQAALSTRVLAETTKPAGKRTADGSEFEKRTADGSEFESPKKKAKVE

SEQ ID NO: 819 - protein, 2091 aa, synthetic construct
MPAAKRVKLDGGDKKYSIGLDIGTNSVGWAVITDEYKVPSKKFKVLGNTDRHSIKKNLIGALLFDSGETAEATRLKRTARRRYTRRKNRICYLQEIFSNEMAKVDDSFFHRLEESFLVEEDKKHERHPIFGNIVDEVAYHEKYPTIYHLRKKLVDSTDKADLRLIYLALAHMIKFRGHFLIEGDLNPDNSDVDKLFIQLVQTYNQLFEENPINASGVDAKAILSARLSKSRRLENLIAQLPGEKKNGLFGNLIALSLGLTPNFKSNFDLAEDAKLQLSKDTYDDDLDNLLAQIGDQYADLFLAAKNLSDAILLSDILRVNTEITKAPLSASMIKRYDEHHQDLTLLKALVRQQLPEKYKEIFFDQSKNGYAGYIDGGASQEEFYKFIKPILEKMDGTEELLVKLNREDLLRKQRTFDNGSIPHQIHLGELHAILRRQEDFYPFLKDNREKIEKILTFRIPYYVGPLARGNSRFAWMTRKSEETITPWNFEEVVDKGASAQSFIERMTNFDKNLPNEKVLPKHSLLYEYFTVYNELTKVKYVTEGMRKPAFLSGEQKKAIVDLLFKTNRKVTVKQLKEDYFKKIECFDSVEISGVEDRFNASLGTYHDLLKIIKDKDFLDNEENEDILEDIVLTLTLFEDREMIEERLKTYAHLFDDKVMKQLKRRRYTGWGRLSRKLINGIRDKQSGKTILDFLKSDGFANRNFMQLIHDDSLTFKEDIQKAQVSGQGDSLHEHIANLAGSPAIKKGILQTVKVVDELVKVMGRHKPENIVIEMARENQTTQKGQKNSRERMKRIEEGIKELGSQILKEHPVENTQLQNEKLYLYYLQNGRDMYVDQELDINRLSDYDVDHIVPQSFLKDDSIDNKVLTRSDKARGKSDNVPSEEVVKKMKNYWRQLLNAKLITQRKFDNLTKAERGGLSELDKAGFIKRQLVETRQITKHVAQILDSRMNTKYDENDKLIREVKVITLKSKLVSDFRKDFQFYKVREINNYHHAHDAYLNAVVGTALIKKYPKLESEFVYGDYKVYDVRKMIAKSEQEIGKATAKYFFYSNIMNFFKTEITLANGEIRKRPLIETNGETGEIVWDKGRDFATVRKVLSMPQVNIVKKTEVQTGGFSKESILPKRNSDKLIARKKDWDPKKYGGFDSPTVAYSVLVVAKVEKGKSKKLKSVKELLGITIMERSSFEKNPIDFLEAKGYKEVKKDLIIKLPKYSLFELENGRKRMLASAGELQKGNELALPSKYVNFLYLASHYEKLKGSPEDNEQKQLFVEQHKHYLDEIIEQISEFSKRVILADANLDKVLSAYNKHRDKPIREQAENIIHLFTLTNLGAPAAFKYFDTTIDRKRYTSTKEVLDATLIHQSITGLYETRIDLSQLGGDGGPAPEAAAKGGVLNLEEEYRLHEKPVPSSIDPSWLQLFPTVWAERAGMGLANQVPPVVVELRSGASPVAVRQYPMSKEAREGIRPHIQRFLDLGVLVPCQSPWNTPLLPVKKPGTNDYRPVQDLREINKRVQDIHPTVPNPYNLLSSLPPSHTWYSVLDLKDAFFCLKLHPNSQPLFAFEWRDPEKGNTGQLTWTRLPQGFKNSPTLFNEALHRDLAPFRALNPQVVLLQYVDDLLVAAPTYRDCKEGTQKLLQELSKLGYRVSAKKAQLCQKEVTYLGYLLKEGKRWLTPARKATVMKIPPPTTPRQVREFLGTAGFCRLWIPGFASLAAPLYPLTKPSIPFIWTEEHQKAFDRIKEALLSAPALALPDLTKPFTLYVDERAGVARGVLTQTLGPWRRPVAYLSKKLDPVASGWPTCLKAVAAVALLLKDADKLTLGQNVTVIASHSLESIVRQPPDRWMTNARMTHYQSLLLNERVSFAPPAVLNPATLLPVESEATPVHRCSEILAEETGTRRDLKDQPLPGVPAWYTDGSSFIAEGKRRAGAAIVDGKRTVWASSLPEGTSAQKAELVALTQALRLAEGKDINIYTDSRYAFATAHIHGAIYKQRGWLTSAGKDIKNKEEILALLEAIHLPKRVAIIHCPGHQKGNDPVATGNRRADEAAKQAALSTRVLAETTKPAGKRTADGSEFEKRTADGSEFESPKKKAKVE

SEQ ID NO: 820 - protein, 2094 aa, synthetic construct
MPAAKRVKLDGGDKKYSIGLDIGTNSVGWAVITDEYKVPSKKFKVLGNTDRHSIKKNLIGALLFDSGETAEATRLKRTARRRYTRRKNRICYLQEIFSNEMAKVDDSFFHRLEESFLVEEDKKHERHPIFGNIVDEVAYHEKYPTIYHLRKKLVDSTDKADLRLIYLALAHMIKFRGHFLIEGDLNPDNSDVDKLFIQLVQTYNQLFEENPINASGVDAKAILSARLSKSRRLENLIAQLPGEKKNGLFGNLIALSLGLTPNFKSNFDLAEDAKLQLSKDTYDDDLDNLLAQIGDQYADLFLAAKNLSDAILLSDILRVNTEITKAPLSASMIKRYDEHHQDLTLLKALVRQQLPEKYKEIFFDQSKNGYAGYIDGGASQEEFYKFIKPILEKMDGTEELLVKLNREDLLRKQRTFDNGSIPHQIHLGELHAILRRQEDFYPFLKDNREKIEKILTFRIPYYVGPLARGNSRFAWMTRKSEETITPWNFEEVVDKGASAQSFIERMTNFDKNLPNEKVLPKHSLLYEYFTVYNELTKVKYVTEGMRKPAFLSGEQKKAIVDLLFKTNRKVTVKQLKEDYFKKIECFDSVEISGVEDRFNASLGTYHDLLKIIKDKDFLDNEENEDILEDIVLTLTLFEDREMIEERLKTYAHLFDDKVMKQLKRRRYTGWGRLSRKLINGIRDKQSGKTILDFLKSDGFANRNFMQLIHDDSLTFKEDIQKAQVSGQGDSLHEHIANLAGSPAIKKGILQTVKVVDELVKVMGRHKPENIVIEMARENQTTQKGQKNSRERMKRIEEGIKELGSQILKEHPVENTQLQNEKLYLYYLQNGRDMYVDQELDINRLSDYDVDHIVPQSFLKDDSIDNKVLTRSDKARGKSDNVPSEEVVKKMKNYWRQLLNAKLITQRKFDNLTKAERGGLSELDKAGFIKRQLVETRQITKHVAQILDSRMNTKYDENDKLIREVKVITLKSKLVSDFRKDFQFYKVREINNYHHAHDAYLNAVVGTALIKKYPKLESEFVYGDYKVYDVRKMIAKSEQEIGKATAKYFFYSNIMNFFKTEITLANGEIRKRPLIETNGETGEIVWDKGRDFATVRKVLSMPQVNIVKKTEVQTGGFSKESILPKRNSDKLIARKKDWDPKKYGGFDSPTVAYSVLVVAKVEKGKSKKLKSVKELLGITIMERSSFEKNPIDFLEAKGYKEVKKDLIIKLPKYSLFELENGRKRMLASAGELQKGNELALPSKYVNFLYLASHYEKLKGSPEDNEQKQLFVEQHKHYLDEIIEQISEFSKRVILADANLDKVLSAYNKHRDKPIREQAENIIHLFTLTNLGAPAAFKYFDTTIDRKRYTSTKEVLDATLIHQSITGLYETRIDLSQLGGDGGEAAAKGGSGSSGGVLNLEEEYRLHEKPVPSSIDPSWLQLFPTVWAERAGMGLANQVPPVVVELRSGASPVAVRQYPMSKEAREGIRPHIQRFLDLGVLVPCQSPWNTPLLPVKKPGTNDYRPVQDLREINKRVQDIHPTVPNPYNLLSSLPPSHTWYSVLDLKDAFFCLKLHPNSQPLFAFEWRDPEKGNTGQLTWTRLPQGFKNSPTLFNEALHRDLAPFRALNPQVVLLQYVDDLLVAAPTYRDCKEGTQKLLQELSKLGYRVSAKKAQLCQKEVTYLGYLLKEGKRWLTPARKATVMKIPPPTTPRQVREFLGTAGFCRLWIPGFASLAAPLYPLTKPSIPFIWTEEHQKAFDRIKEALLSAPALALPDLTKPFTLYVDERAGVARGVLTQTLGPWRRPVAYLSKKLDPVASGWPTCLKAVAAVALLLKDADKLTLGQNVTVIASHSLESIVRQPPDRWMTNARMTHYQSLLLNERVSFAPPAVLNPATLLPVESEATPVHRCSEILAEETGTRRDLKDQPLPGVPAWYTDGSSFIAEGKRRAGAAIVDGKRTVWASSLPEGTSAQKAELVALTQALRLAEGKDINIYTDSRYAFATAHIHGAIYKQRGWLTSAGKDIKNKEEILALLEAIHLPKRVAIIHCPGHQKGNDPVATGNRRADEAAKQAALSTRVLAETTKPAGKRTADGSEFEKRTADGSEFESPKKKAKVE

SEQ ID NO: 821 - protein, 2092 aa, synthetic construct
MPAAKRVKLDGGDKKYSIGLDIGTNSVGWAVITDEYKVPSKKFKVLGNTDRHSIKKNLIGALLFDSGETAEATRLKRTARRRYTRRKNRICYLQEIFSNEMAKVDDSFFHRLEESFLVEEDKKHERHPIFGNIVDEVAYHEKYPTIYHLRKKLVDSTDKADLRLIYLALAHMIKFRGHFLIEGDLNPDNSDVDKLFIQLVQTYNQLFEENPINASGVDAKAILSARLSKSRRLENLIAQLPGEKKNGLFGNLIALSLGLTPNFKSNFDLAEDAKLQLSKDTYDDDLDNLLAQIGDQYADLFLAAKNLSDAILLSDILRVNTEITKAPLSASMIKRYDEHHQDLTLLKALVRQQLPEKYKEIFFDQSKNGYAGYIDGGASQEEFYKFIKPILEKMDGTEELLVKLNREDLLRKQRTFDNGSIPHQIHLGELHAILRRQEDFYPFLKDNREKIEKILTFRIPYYVGPLARGNSRFAWMTRKSEETITPWNFEEVVDKGASAQSFIERMTNFDKNLPNEKVLPKHSLLYEYFTVYNELTKVKYVTEGMRKPAFLSGEQKKAIVDLLFKTNRKVTVKQLKEDYFKKIECFDSVEISGVEDRFNASLGTYHDLLKIIKDKDFLDNEENEDILEDIVLTLTLFEDREMIEERLKTYAHLFDDKVMKQLKRRRYTGWGRLSRKLINGIRDKQSGKTILDFLKSDGFANRNFMQLIHDDSLTFKEDIQKAQVSGQGDSLHEHIANLAGSPAIKKGILQTVKVVDELVKVMGRHKPENIVIEMARENQTTQKGQKNSRERMKRIEEGIKELGSQILKEHPVENTQLQNEKLYLYYLQNGRDMYVDQELDINRLSDYDVDHIVPQSFLKDDSIDNKVLTRSDKARGKSDNVPSEEVVKKMKNYWRQLLNAKLITQRKFDNLTKAERGGLSELDKAGFIKRQLVETRQITKHVAQILDSRMNTKYDENDKLIREVKVITLKSKLVSDFRKDFQFYKVREINNYHHAHDAYLNAVVGTALIKKYPKLESEFVYGDYKVYDVRKMIAKSEQEIGKATAKYFFYSNIMNFFKTEITLANGEIRKRPLIETNGETGEIVWDKGRDFATVRKVLSMPQVNIVKKTEVQTGGFSKESILPKRNSDKLIARKKDWDPKKYGGFDSPTVAYSVLVVAKVEKGKSKKLKSVKELLGITIMERSSFEKNPIDFLEAKGYKEVKKDLIIKLPKYSLFELENGRKRMLASAGELQKGNELALPSKYVNFLYLASHYEKLKGSPEDNEQKQLFVEQHKHYLDEIIEQISEFSKRVILADANLDKVLSAYNKHRDKPIREQAENIIHLFTLTNLGAPAAFKYFDTTIDRKRYTSTKEVLDATLIHQSITGLYETRIDLSQLGGDGGPAPAPAPAPGGVLNLEEEYRLHEKPVPSSIDPSWLQLFPTVWAERAGMGLANQVPPVVVELRSGASPVAVRQYPMSKEAREGIRPHIQRFLDLGVLVPCQSPWNTPLLPVKKPGTNDYRPVQDLREINKRVQDIHPTVPNPYNLLSSLPPSHTWYSVLDLKDAFFCLKLHPNSQPLFAFEWRDPEKGNTGQLTWTRLPQGFKNSPTLFNEALHRDLAPFRALNPQVVLLQYVDDLLVAAPTYRDCKEGTQKLLQELSKLGYRVSAKKAQLCQKEVTYLGYLLKEGKRWLTPARKATVMKIPPPTTPRQVREFLGTAGFCRLWIPGFASLAAPLYPLTKPSIPFIWTEEHQKAFDRIKEALLSAPALALPDLTKPFTLYVDERAGVARGVLTQTLGPWRRPVAYLSKKLDPVASGWPTCLKAVAAVALLLKDADKLTLGQNVTVIASHSLESIVRQPPDRWMTNARMTHYQSLLLNERVSFAPPAVLNPATLLPVESEATPVHRCSEILAEETGTRRDLKDQPLPGVPAWYTDGSSFIAEGKRRAGAAIVDGKRTVWASSLPEGTSAQKAELVALTQALRLAEGKDINIYTDSRYAFATAHIHGAIYKQRGWLTSAGKDIKNKEEILALLEAIHLPKRVAIIHCPGHQKGNDPVATGNRRADEAAKQAALSTRVLAETTKPAGKRTADGSEFEKRTADGSEFESPKKKAKVE

SEQ ID NO: 822 - protein, 2094 aa, synthetic construct
MPAAKRVKLDGGDKKYSIGLDIGTNSVGWAVITDEYKVPSKKFKVLGNTDRHSIKKNLIGALLFDSGETAEATRLKRTARRRYTRRKNRICYLQEIFSNEMAKVDDSFFHRLEESFLVEEDKKHERHPIFGNIVDEVAYHEKYPTIYHLRKKLVDSTDKADLRLIYLALAHMIKFRGHFLIEGDLNPDNSDVDKLFIQLVQTYNQLFEENPINASGVDAKAILSARLSKSRRLENLIAQLPGEKKNGLFGNLIALSLGLTPNFKSNFDLAEDAKLQLSKDTYDDDLDNLLAQIGDQYADLFLAAKNLSDAILLSDILRVNTEITKAPLSASMIKRYDEHHQDLTLLKALVRQQLPEKYKEIFFDQSKNGYAGYIDGGASQEEFYKFIKPILEKMDGTEELLVKLNREDLLRKQRTFDNGSIPHQIHLGELHAILRRQEDFYPFLKDNREKIEKILTFRIPYYVGPLARGNSRFAWMTRKSEETITPWNFEEVVDKGASAQSFIERMTNFDKNLPNEKVLPKHSLLYEYFTVYNELTKVKYVTEGMRKPAFLSGEQKKAIVDLLFKTNRKVTVKQLKEDYFKKIECFDSVEISGVEDRFNASLGTYHDLLKIIKDKDFLDNEENEDILEDIVLTLTLFEDREMIEERLKTYAHLFDDKVMKQLKRRRYTGWGRLSRKLINGIRDKQSGKTILDFLKSDGFANRNFMQLIHDDSLTFKEDIQKAQVSGQGDSLHEHIANLAGSPAIKKGILQTVKVVDELVKVMGRHKPENIVIEMARENQTTQKGQKNSRERMKRIEEGIKELGSQILKEHPVENTQLQNEKLYLYYLQNGRDMYVDQELDINRLSDYDVDHIVPQSFLKDDSIDNKVLTRSDKARGKSDNVPSEEVVKKMKNYWRQLLNAKLITQRKFDNLTKAERGGLSELDKAGFIKRQLVETRQITKHVAQILDSRMNTKYDENDKLIREVKVITLKSKLVSDFRKDFQFYKVREINNYHHAHDAYLNAVVGTALIKKYPKLESEFVYGDYKVYDVRKMIAKSEQEIGKATAKYFFYSNIMNFFKTEITLANGEIRKRPLIETNGETGEIVWDKGRDFATVRKVLSMPQVNIVKKTEVQTGGFSKESILPKRNSDKLIARKKDWDPKKYGGFDSPTVAYSVLVVAKVEKGKSKKLKSVKELLGITIMERSSFEKNPIDFLEAKGYKEVKKDLIIKLPKYSLFELENGRKRMLASAGELQKGNELALPSKYVNFLYLASHYEKLKGSPEDNEQKQLFVEQHKHYLDEIIEQISEFSKRVILADANLDKVLSAYNKHRDKPIREQAENIIHLFTLTNLGAPAAFKYFDTTIDRKRYTSTKEVLDATLIHQSITGLYETRIDLSQLGGDGGEAAAKGGGPAPGGVLNLEEEYRLHEKPVPSSIDPSWLQLFPTVWAERAGMGLANQVPPVVVELRSGASPVAVRQYPMSKEAREGIRPHIQRFLDLGVLVPCQSPWNTPLLPVKKPGTNDYRPVQDLREINKRVQDIHPTVPNPYNLLSSLPPSHTWYSVLDLKDAFFCLKLHPNSQPLFAFEWRDPEKGNTGQLTWTRLPQGFKNSPTLFNEALHRDLAPFRALNPQVVLLQYVDDLLVAAPTYRDCKEGTQKLLQELSKLGYRVSAKKAQLCQKEVTYLGYLLKEGKRWLTPARKATVMKIPPPTTPRQVREFLGTAGFCRLWIPGFASLAAPLYPLTKPSIPFIWTEEHQKAFDRIKEALLSAPALALPDLTKPFTLYVDERAGVARGVLTQTLGPWRRPVAYLSKKLDPVASGWPTCLKAVAAVALLLKDADKLTLGQNVTVIASHSLESIVRQPPDRWMTNARMTHYQSLLLNERVSFAPPAVLNPATLLPVESEATPVHRCSEILAEETGTRRDLKDQPLPGVPAWYTDGSSFIAEGKRRAGAAIVDGKRTVWASSLPEGTSAQKAELVALTQALRLAEGKDINIYTDSRYAFATAHIHGAIYKQRGWLTSAGKDIKNKEEILALLEAIHLPKRVAIIHCPGHQKGNDPVATGNRRADEAAKQAALSTRVLAETTKPAGKRTADGSEFEKRTADGSEFESPKKKAKVE

SEQ ID NO: 823 - protein, 2088 aa, synthetic construct
MPAAKRVKLDGGDKKYSIGLDIGTNSVGWAVITDEYKVPSKKFKVLGNTDRHSIKKNLIGALLFDSGETAEATRLKRTARRRYTRRKNRICYLQEIFSNEMAKVDDSFFHRLEESFLVEEDKKHERHPIFGNIVDEVAYHEKYPTIYHLRKKLVDSTDKADLRLIYLALAHMIKFRGHFLIEGDLNPDNSDVDKLFIQLVQTYNQLFEENPINASGVDAKAILSARLSKSRRLENLIAQLPGEKKNGLFGNLIALSLGLTPNFKSNFDLAEDAKLQLSKDTYDDDLDNLLAQIGDQYADLFLAAKNLSDAILLSDILRVNTEITKAPLSASMIKRYDEHHQDLTLLKALVRQQLPEKYKEIFFDQSKNGYAGYIDGGASQEEFYKFIKPILEKMDGTEELLVKLNREDLLRKQRTFDNGSIPHQIHLGELHAILRRQEDFYPFLKDNREKIEKILTFRIPYYVGPLARGNSRFAWMTRKSEETITPWNFEEVVDKGASAQSFIERMTNFDKNLPNEKVLPKHSLLYEYFTVYNELTKVKYVTEGMRKPAFLSGEQKKAIVDLLFKTNRKVTVKQLKEDYFKKIECFDSVEISGVEDRFNASLGTYHDLLKIIKDKDFLDNEENEDILEDIVLTLTLFEDREMIEERLKTYAHLFDDKVMKQLKRRRYTGWGRLSRKLINGIRDKQSGKTILDFLKSDGFANRNFMQLIHDDSLTFKEDIQKAQVSGQGDSLHEHIANLAGSPAIKKGILQTVKVVDELVKVMGRHKPENIVIEMARENQTTQKGQKNSRERMKRIEEGIKELGSQILKEHPVENTQLQNEKLYLYYLQNGRDMYVDQELDINRLSDYDVDHIVPQSFLKDDSIDNKVLTRSDKARGKSDNVPSEEVVKKMKNYWRQLLNAKLITQRKFDNLTKAERGGLSELDKAGFIKRQLVETRQITKHVAQILDSRMNTKYDENDKLIREVKVITLKSKLVSDFRKDFQFYKVREINNYHHAHDAYLNAVVGTALIKKYPKLESEFVYGDYKVYDVRKMIAKSEQEIGKATAKYFFYSNIMNFFKTEITLANGEIRKRPLIETNGETGEIVWDKGRDFATVRKVLSMPQVNIVKKTEVQTGGFSKESILPKRNSDKLIARKKDWDPKKYGGFDSPTVAYSVLVVAKVEKGKSKKLKSVKELLGITIMERSSFEKNPIDFLEAKGYKEVKKDLIIKLPKYSLFELENGRKRMLASAGELQKGNELALPSKYVNFLYLASHYEKLKGSPEDNEQKQLFVEQHKHYLDEIIEQISEFSKRVILADANLDKVLSAYNKHRDKPIREQAENIIHLFTLTNLGAPAAFKYFDTTIDRKRYTSTKEVLDATLIHQSITGLYETRIDLSQLGGDGGEAAAKGGVLNLEEEYRLHEKPVPSSIDPSWLQLFPTVWAERAGMGLANQVPPVVVELRSGASPVAVRQYPMSKEAREGIRPHIQRFLDLGVLVPCQSPWNTPLLPVKKPGTNDYRPVQDLREINKRVQDIHPTVPNPYNLLSSLPPSHTWYSVLDLKDAFFCLKLHPNSQPLFAFEWRDPEKGNTGQLTWTRLPQGFKNSPTLFNEALHRDLAPFRALNPQVVLLQYVDDLLVAAPTYRDCKEGTQKLLQELSKLGYRVSAKKAQLCQKEVTYLGYLLKEGKRWLTPARKATVMKIPPPTTPRQVREFLGTAGFCRLWIPGFASLAAPLYPLTKPSIPFIWTEEHQKAFDRIKEALLSAPALALPDLTKPFTLYVDERAGVARGVLTQTLGPWRRPVAYLSKKLDPVASGWPTCLKAVAAVALLLKDADKLTLGQNVTVIASHSLESIVRQPPDRWMTNARMTHYQSLLLNERVSFAPPAVLNPATLLPVESEATPVHRCSEILAEETGTRRDLKDQPLPGVPAWYTDGSSFIAEGKRRAGAAIVDGKRTVWASSLPEGTSAQKAELVALTQALRLAEGKDINIYTDSRYAFATAHIHGAIYKQRGWLTSAGKDIKNKEEILALLEAIHLPKRVAIIHCPGHQKGNDPVATGNRRADEAAKQAALSTRVLAETTKPAGKRTADGSEFEKRTADGSEFESPKKKAKVE

SEQ ID NO: 824 - protein, 2095 aa, synthetic construct
MPAAKRVKLDGGDKKYSIGLDIGTNSVGWAVITDEYKVPSKKFKVLGNTDRHSIKKNLIGALLFDSGETAEATRLKRTARRRYTRRKNRICYLQEIFSNEMAKVDDSFFHRLEESFLVEEDKKHERHPIFGNIVDEVAYHEKYPTIYHLRKKLVDSTDKADLRLIYLALAHMIKFRGHFLIEGDLNPDNSDVDKLFIQLVQTYNQLFEENPINASGVDAKAILSARLSKSRRLENLIAQLPGEKKNGLFGNLIALSLGLTPNFKSNFDLAEDAKLQLSKDTYDDDLDNLLAQIGDQYADLFLAAKNLSDAILLSDILRVNTEITKAPLSASMIKRYDEHHQDLTLLKALVRQQLPEKYKEIFFDQSKNGYAGYIDGGASQEEFYKFIKPILEKMDGTEELLVKLNREDLLRKQRTFDNGSIPHQIHLGELHAILRRQEDFYPFLKDNREKIEKILTFRIPYYVGPLARGNSRFAWMTRKSEETITPWNFEEVVDKGASAQSFIERMTNFDKNLPNEKVLPKHSLLYEYFTVYNELTKVKYVTEGMRKPAFLSGEQKKAIVDLLFKTNRKVTVKQLKEDYFKKIECFDSVEISGVEDRFNASLGTYHDLLKIIKDKDFLDNEENEDILEDIVLTLTLFEDREMIEERLKTYAHLFDDKVMKQLKRRRYTGWGRLSRKLINGIRDKQSGKTILDFLKSDGFANRNFMQLIHDDSLTFKEDIQKAQVSGQGDSLHEHIANLAGSPAIKKGILQTVKVVDELVKVMGRHKPENIVIEMARENQTTQKGQKNSRERMKRIEEGIKELGSQILKEHPVENTQLQNEKLYLYYLQNGRDMYVDQELDINRLSDYDVDHIVPQSFLKDDSIDNKVLTRSDKARGKSDNVPSEEVVKKMKNYWRQLLNAKLITQRKFDNLTKAERGGLSELDKAGFIKRQLVETRQITKHVAQILDSRMNTKYDENDKLIREVKVITLKSKLVSDFRKDFQFYKVREINNYHHAHDAYLNAVVGTALIKKYPKLESEFVYGDYKVYDVRKMIAKSEQEIGKATAKYFFYSNIMNFFKTEITLANGEIRKRPLIETNGETGEIVWDKGRDFATVRKVLSMPQVNIVKKTEVQTGGFSKESILPKRNSDKLIARKKDWDPKKYGGFDSPTVAYSVLVVAKVEKGKSKKLKSVKELLGITIMERSSFEKNPIDFLEAKGYKEVKKDLIIKLPKYSLFELENGRKRMLASAGELQKGNELALPSKYVNFLYLASHYEKLKGSPEDNEQKQLFVEQHKHYLDEIIEQISEFSKRVILADANLDKVLSAYNKHRDKPIREQAENIIHLFTLTNLGAPAAFKYFDTTIDRKRYTSTKEVLDATLIHQSITGLYETRIDLSQLGGDGGGGSGGSGGSGGSGGVLNLEEEYRLHEKPVPSSIDPSWLQLFPTVWAERAGMGLANQVPPVVVELRSGASPVAVRQYPMSKEAREGIRPHIQRFLDLGVLVPCQSPWNTPLLPVKKPGTNDYRPVQDLREINKRVQDIHPTVPNPYNLLSSLPPSHTWYSVLDLKDAFFCLKLHPNSQPLFAFEWRDPEKGNTGQLTWTRLPQGFKNSPTLFNEALHRDLAPFRALNPQVVLLQYVDDLLVAAPTYRDCKEGTQKLLQELSKLGYRVSAKKAQLCQKEVTYLGYLLKEGKRWLTPARKATVMKIPPPTTPRQVREFLGTAGFCRLWIPGFASLAAPLYPLTKPSIPFIWTEEHQKAFDRIKEALLSAPALALPDLTKPFTLYVDERAGVARGVLTQTLGPWRRPVAYLSKKLDPVASGWPTCLKAVAAVALLLKDADKLTLGQNVTVIASHSLESIVRQPPDRWMTNARMTHYQSLLLNERVSFAPPAVLNPATLLPVESEATPVHRCSEILAEETGTRRDLKDQPLPGVPAWYTDGSSFIAEGKRRAGAAIVDGKRTVWASSLPEGTSAQKAELVALTQALRLAEGKDINIYTDSRYAFATAHIHGAIYKQRGWLTSAGKDIKNKEEILALLEAIHLPKRVAIIHCPGHQKGNDPVATGNRRADEAAKQAALSTRVLAETTKPAGKRTADGSEFEKRTADGSEFESPKKKAKVE

SEQ ID NO: 825 - protein, 2094 aa, synthetic construct
MPAAKRVKLDGGDKKYSIGLDIGTNSVGWAVITDEYKVPSKKFKVLGNTDRHSIKKNLIGALLFDSGETAEATRLKRTARRRYTRRKNRICYLQEIFSNEMAKVDDSFFHRLEESFLVEEDKKHERHPIFGNIVDEVAYHEKYPTIYHLRKKLVDSTDKADLRLIYLALAHMIKFRGHFLIEGDLNPDNSDVDKLFIQLVQTYNQLFEENPINASGVDAKAILSARLSKSRRLENLIAQLPGEKKNGLFGNLIALSLGLTPNFKSNFDLAEDAKLQLSKDTYDDDLDNLLAQIGDQYADLFLAAKNLSDAILLSDILRVNTEITKAPLSASMIKRYDEHHQDLTLLKALVRQQLPEKYKEIFFDQSKNGYAGYIDGGASQEEFYKFIKPILEKMDGTEELLVKLNREDLLRKQRTFDNGSIPHQIHLGELHAILRRQEDFYPFLKDNREKIEKILTFRIPYYVGPLARGNSRFAWMTRKSEETITPWNFEEVVDKGASAQSFIERMTNFDKNLPNEKVLPKHSLLYEYFTVYNELTKVKYVTEGMRKPAFLSGEQKKAIVDLLFKTNRKVTVKQLKEDYFKKIECFDSVEISGVEDRFNASLGTYHDLLKIIKDKDFLDNEENEDILEDIVLTLTLFEDREMIEERLKTYAHLFDDKVMKQLKRRRYTGWGRLSRKLINGIRDKQSGKTILDFLKSDGFANRNFMQLIHDDSLTFKEDIQKAQVSGQGDSLHEHIANLAGSPAIKKGILQTVKVVDELVKVMGRHKPENIVIEMARENQTTQKGQKNSRERMKRIEEGIKELGSQILKEHPVENTQLQNEKLYLYYLQNGRDMYVDQELDINRLSDYDVDHIVPQSFLKDDSIDNKVLTRSDKARGKSDNVPSEEVVKKMKNYWRQLLNAKLITQRKFDNLTKAERGGLSELDKAGFIKRQLVETRQITKHVAQILDSRMNTKYDENDKLIREVKVITLKSKLVSDFRKDFQFYKVREINNYHHAHDAYLNAVVGTALIKKYPKLESEFVYGDYKVYDVRKMIAKSEQEIGKATAKYFFYSNIMNFFKTEITLANGEIRKRPLIETNGETGEIVWDKGRDFATVRKVLSMPQVNIVKKTEVQTGGFSKESILPKRNSDKLIARKKDWDPKKYGGFDSPTVAYSVLVVAKVEKGKSKKLKSVKELLGITIMERSSFEKNPIDFLEAKGYKEVKKDLIIKLPKYSLFELENGRKRMLASAGELQKGNELALPSKYVNFLYLASHYEKLKGSPEDNEQKQLFVEQHKHYLDEIIEQISEFSKRVILADANLDKVLSAYNKHRDKPIREQAENIIHLFTLTNLGAPAAFKYFDTTIDRKRYTSTKEVLDATLIHQSITGLYETRIDLSQLGGDGGGGSGSSEAAAKGGVLNLEEEYRLHEKPVPSSIDPSWLQLFPTVWAERAGMGLANQVPPVVVELRSGASPVAVRQYPMSKEAREGIRPHIQRFLDLGVLVPCQSPWNTPLLPVKKPGTNDYRPVQDLREINKRVQDIHPTVPNPYNLLSSLPPSHTWYSVLDLKDAFFCLKLHPNSQPLFAFEWRDPEKGNTGQLTWTRLPQGFKNSPTLFNEALHRDLAPFRALNPQVVLLQYVDDLLVAAPTYRDCKEGTQKLLQELSKLGYRVSAKKAQLCQKEVTYLGYLLKEGKRWLTPARKATVMKIPPPTTPRQVREFLGTAGFCRLWIPGFASLAAPLYPLTKPSIPFIWTEEHQKAFDRIKEALLSAPALALPDLTKPFTLYVDERAGVARGVLTQTLGPWRRPVAYLSKKLDPVASGWPTCLKAVAAVALLLKDADKLTLGQNVTVIASHSLESIVRQPPDRWMTNARMTHYQSLLLNERVSFAPPAVLNPATLLPVESEATPVHRCSEILAEETGTRRDLKDQPLPGVPAWYTDGSSFIAEGKRRAGAAIVDGKRTVWASSLPEGTSAQKAELVALTQALRLAEGKDINIYTDSRYAFATAHIHGAIYKQRGWLTSAGKDIKNKEEILALLEAIHLPKRVAIIHCPGHQKGNDPVATGNRRADEAAKQAALSTRVLAETTKPAGKRTADGSEFEKRTADGSEFESPKKKAKVE

SEQ ID NO: 826 - protein, 2094 aa, synthetic construct
MPAAKRVKLDGGDKKYSIGLDIGTNSVGWAVITDEYKVPSKKFKVLGNTDRHSIKKNLIGALLFDSGETAEATRLKRTARRRYTRRKNRICYLQEIFSNEMAKVDDSFFHRLEESFLVEEDKKHERHPIFGNIVDEVAYHEKYPTIYHLRKKLVDSTDKADLRLIYLALAHMIKFRGHFLIEGDLNPDNSDVDKLFIQLVQTYNQLFEENPINASGVDAKAILSARLSKSRRLENLIAQLPGEKKNGLFGNLIALSLGLTPNFKSNFDLAEDAKLQLSKDTYDDDLDNLLAQIGDQYADLFLAAKNLSDAILLSDILRVNTEITKAPLSASMIKRYDEHHQDLTLLKALVRQQLPEKYKEIFFDQSKNGYAGYIDGGASQEEFYKFIKPILEKMDGTEELLVKLNREDLLRKQRTFDNGSIPHQIHLGELHAILRRQEDFYPFLKDNREKIEKILTFRIPYYVGPLARGNSRFAWMTRKSEETITPWNFEEVVDKGASAQSFIERMTNFDKNLPNEKVLPKHSLLYEYFTVYNELTKVKYVTEGMRKPAFLSGEQKKAIVDLLFKTNRKVTVKQLKEDYFKKIECFDSVEISGVEDRFNASLGTYHDLLKIIKDKDFLDNEENEDILEDIVLTLTLFEDREMIEERLKTYAHLFDDKVMKQLKRRRYTGWGRLSRKLINGIRDKQSGKTILDFLKSDGFANRNFMQLIHDDSLTFKEDIQKAQVSGQGDSLHEHIANLAGSPAIKKGILQTVKVVDELVKVMGRHKPENIVIEMARENQTTQKGQKNSRERMKRIEEGIKELGSQILKEHPVENTQLQNEKLYLYYLQNGRDMYVDQELDINRLSDYDVDHIVPQSFLKDDSIDNKVLTRSDKARGKSDNVPSEEVVKKMKNYWRQLLNAKLITQRKFDNLTKAERGGLSELDKAGFIKRQLVETRQITKHVAQILDSRMNTKYDENDKLIREVKVITLKSKLVSDFRKDFQFYKVREINNYHHAHDAYLNAVVGTALIKKYPKLESEFVYGDYKVYDVRKMIAKSEQEIGKATAKYFFYSNIMNFFKTEITLANGEIRKRPLIETNGETGEIVWDKGRDFATVRKVLSMPQVNIVKKTEVQTGGFSKESILPKRNSDKLIARKKDWDPKKYGGFDSPTVAYSVLVVAKVEKGKSKKLKSVKELLGITIMERSSFEKNPIDFLEAKGYKEVKKDLIIKLPKYSLFELENGRKRMLASAGELQKGNELALPSKYVNFLYLASHYEKLKGSPEDNEQKQLFVEQHKHYLDEIIEQISEFSKRVILADANLDKVLSAYNKHRDKPIREQAENIIHLFTLTNLGAPAAFKYFDTTIDRKRYTSTKEVLDATLIHQSITGLYETRIDLSQLGGDGGEAAAKGGGGSSGGVLNLEEEYRLHEKPVPSSIDPSWLQLFPTVWAERAGMGLANQVPPVVVELRSGASPVAVRQYPMSKEAREGIRPHIQRFLDLGVLVPCQSPWNTPLLPVKKPGTNDYRPVQDLREINKRVQDIHPTVPNPYNLLSSLPPSHTWYSVLDLKDAFFCLKLHPNSQPLFAFEWRDPEKGNTGQLTWTRLPQGFKNSPTLFNEALHRDLAPFRALNPQVVLLQYVDDLLVAAPTYRDCKEGTQKLLQELSKLGYRVSAKKAQLCQKEVTYLGYLLKEGKRWLTPARKATVMKIPPPTTPRQVREFLGTAGFCRLWIPGFASLAAPLYPLTKPSIPFIWTEEHQKAFDRIKEALLSAPALALPDLTKPFTLYVDERAGVARGVLTQTLGPWRRPVAYLSKKLDPVASGWPTCLKAVAAVALLLKDADKLTLGQNVTVIASHSLESIVRQPPDRWMTNARMTHYQSLLLNERVSFAPPAVLNPATLLPVESEATPVHRCSEILAEETGTRRDLKDQPLPGVPAWYTDGSSFIAEGKRRAGAAIVDGKRTVWASSLPEGTSAQKAELVALTQALRLAEGKDINIYTDSRYAFATAHIHGAIYKQRGWLTSAGKDIKNKEEILALLEAIHLPKRVAIIHCPGHQKGNDPVATGNRRADEAAKQAALSTRVLAETTKPAGKRTADGSEFEKRTADGSEFESPKKKAKVE

SEQ ID NO: 827 - protein, 2103 aa, synthetic construct
MPAAKRVKLDGGDKKYSIGLDIGTNSVGWAVITDEYKVPSKKFKVLGNTDRHSIKKNLIGALLFDSGETAEATRLKRTARRRYTRRKNRICYLQEIFSNEMAKVDDSFFHRLEESFLVEEDKKHERHPIFGNIVDEVAYHEKYPTIYHLRKKLVDSTDKADLRLIYLALAHMIKFRGHFLIEGDLNPDNSDVDKLFIQLVQTYNQLFEENPINASGVDAKAILSARLSKSRRLENLIAQLPGEKKNGLFGNLIALSLGLTPNFKSNFDLAEDAKLQLSKDTYDDDLDNLLAQIGDQYADLFLAAKNLSDAILLSDILRVNTEITKAPLSASMIKRYDEHHQDLTLLKALVRQQLPEKYKEIFFDQSKNGYAGYIDGGASQEEFYKFIKPILEKMDGTEELLVKLNREDLLRKQRTFDNGSIPHQIHLGELHAILRRQEDFYPFLKDNREKIEKILTFRIPYYVGPLARGNSRFAWMTRKSEETITPWNFEEVVDKGASAQSFIERMTNFDKNLPNEKVLPKHSLLYEYFTVYNELTKVKYVTEGMRKPAFLSGEQKKAIVDLLFKTNRKVTVKQLKEDYFKKIECFDSVEISGVEDRFNASLGTYHDLLKIIKDKDFLDNEENEDILEDIVLTLTLFEDREMIEERLKTYAHLFDDKVMKQLKRRRYTGWGRLSRKLINGIRDKQSGKTILDFLKSDGFANRNFMQLIHDDSLTFKEDIQKAQVSGQGDSLHEHIANLAGSPAIKKGILQTVKVVDELVKVMGRHKPENIVIEMARENQTTQKGQKNSRERMKRIEEGIKELGSQILKEHPVENTQLQNEKLYLYYLQNGRDMYVDQELDINRLSDYDVDHIVPQSFLKDDSIDNKVLTRSDKARGKSDNVPSEEVVKKMKNYWRQLLNAKLITQRKFDNLTKAERGGLSELDKAGFIKRQLVETRQITKHVAQILDSRMNTKYDENDKLIREVKVITLKSKLVSDFRKDFQFYKVREINNYHHAHDAYLNAVVGTALIKKYPKLESEFVYGDYKVYDVRKMIAKSEQEIGKATAKYFFYSNIMNFFKTEITLANGEIRKRPLIETNGETGEIVWDKGRDFATVRKVLSMPQVNIVKKTEVQTGGFSKESILPKRNSDKLIARKKDWDPKKYGGFDSPTVAYSVLVVAKVEKGKSKKLKSVKELLGITIMERSSFEKNPIDFLEAKGYKEVKKDLIIKLPKYSLFELENGRKRMLASAGELQKGNELALPSKYVNFLYLASHYEKLKGSPEDNEQKQLFVEQHKHYLDEIIEQISEFSKRVILADANLDKVLSAYNKHRDKPIREQAENIIHLFTLTNLGAPAAFKYFDTTIDRKRYTSTKEVLDATLIHQSITGLYETRIDLSQLGGDGGEAAAKEAAAKEAAAKEAAAKGGVLNLEEEYRLHEKPVPSSIDPSWLQLFPTVWAERAGMGLANQVPPVVVELRSGASPVAVRQYPMSKEAREGIRPHIQRFLDLGVLVPCQSPWNTPLLPVKKPGTNDYRPVQDLREINKRVQDIHPTVPNPYNLLSSLPPSHTWYSVLDLKDAFFCLKLHPNSQPLFAFEWRDPEKGNTGQLTWTRLPQGFKNSPTLFNEALHRDLAPFRALNPQVVLLQYVDDLLVAAPTYRDCKEGTQKLLQELSKLGYRVSAKKAQLCQKEVTYLGYLLKEGKRWLTPARKATVMKIPPPTTPRQVREFLGTAGFCRLWIPGFASLAAPLYPLTKPSIPFIWTEEHQKAFDRIKEALLSAPALALPDLTKPFTLYVDERAGVARGVLTQTLGPWRRPVAYLSKKLDPVASGWPTCLKAVAAVALLLKDADKLTLGQNVTVIASHSLESIVRQPPDRWMTNARMTHYQSLLLNERVSFAPPAVLNPATLLPVESEATPVHRCSEILAEETGTRRDLKDQPLPGVPAWYTDGSSFIAEGKRRAGAAIVDGKRTVWASSLPEGTSAQKAELVALTQALRLAEGKDINIYTDSRYAFATAHIHGAIYKQRGWLTSAGKDIKNKEEILALLEAIHLPKRVAIIHCPGHQKGNDPVATGNRRADEAAKQAALSTRVLAETTKPAGKRTADGSEFEKRTADGSEFESPKKKAKVE

SEQ ID NO: 828 - protein, 2092 aa, synthetic construct
MPAAKRVKLDGGDKKYSIGLDIGTNSVGWAVITDEYKVPSKKFKVLGNTDRHSIKKNLIGALLFDSGETAEATRLKRTARRRYTRRKNRICYLQEIFSNEMAKVDDSFFHRLEESFLVEEDKKHERHPIFGNIVDEVAYHEKYPTIYHLRKKLVDSTDKADLRLIYLALAHMIKFRGHFLIEGDLNPDNSDVDKLFIQLVQTYNQLFEENPINASGVDAKAILSARLSKSRRLENLIAQLPGEKKNGLFGNLIALSLGLTPNFKSNFDLAEDAKLQLSKDTYDDDLDNLLAQIGDQYADLFLAAKNLSDAILLSDILRVNTEITKAPLSASMIKRYDEHHQDLTLLKALVRQQLPEKYKEIFFDQSKNGYAGYIDGGASQEEFYKFIKPILEKMDGTEELLVKLNREDLLRKQRTFDNGSIPHQIHLGELHAILRRQEDFYPFLKDNREKIEKILTFRIPYYVGPLARGNSRFAWMTRKSEETITPWNFEEVVDKGASAQSFIERMTNFDKNLPNEKVLPKHSLLYEYFTVYNELTKVKYVTEGMRKPAFLSGEQKKAIVDLLFKTNRKVTVKQLKEDYFKKIECFDSVEISGVEDRFNASLGTYHDLLKIIKDKDFLDNEENEDILEDIVLTLTLFEDREMIEERLKTYAHLFDDKVMKQLKRRRYTGWGRLSRKLINGIRDKQSGKTILDFLKSDGFANRNFMQLIHDDSLTFKEDIQKAQVSGQGDSLHEHIANLAGSPAIKKGILQTVKVVDELVKVMGRHKPENIVIEMARENQTTQKGQKNSRERMKRIEEGIKELGSQILKEHPVENTQLQNEKLYLYYLQNGRDMYVDQELDINRLSDYDVDHIVPQSFLKDDSIDNKVLTRSDKARGKSDNVPSEEVVKKMKNYWRQLLNAKLITQRKFDNLTKAERGGLSELDKAGFIKRQLVETRQITKHVAQILDSRMNTKYDENDKLIREVKVITLKSKLVSDFRKDFQFYKVREINNYHHAHDAYLNAVVGTALIKKYPKLESEFVYGDYKVYDVRKMIAKSEQEIGKATAKYFFYSNIMNFFKTEITLANGEIRKRPLIETNGETGEIVWDKGRDFATVRKVLSMPQVNIVKKTEVQTGGFSKESILPKRNSDKLIARKKDWDPKKYGGFDSPTVAYSVLVVAKVEKGKSKKLKSVKELLGITIMERSSFEKNPIDFLEAKGYKEVKKDLIIKLPKYSLFELENGRKRMLASAGELQKGNELALPSKYVNFLYLASHYEKLKGSPEDNEQKQLFVEQHKHYLDEIIEQISEFSKRVILADANLDKVLSAYNKHRDKPIREQAENIIHLFTLTNLGAPAAFKYFDTTIDRKRYTSTKEVLDATLIHQSITGLYETRIDLSQLGGDGGGGSGGGGSSGGVLNLEEEYRLHEKPVPSSIDPSWLQLFPTVWAERAGMGLANQVPPVVVELRSGASPVAVRQYPMSKEAREGIRPHIQRFLDLGVLVPCQSPWNTPLLPVKKPGTNDYRPVQDLREINKRVQDIHPTVPNPYNLLSSLPPSHTWYSVLDLKDAFFCLKLHPNSQPLFAFEWRDPEKGNTGQLTWTRLPQGFKNSPTLFNEALHRDLAPFRALNPQVVLLQYVDDLLVAAPTYRDCKEGTQKLLQELSKLGYRVSAKKAQLCQKEVTYLGYLLKEGKRWLTPARKATVMKIPPPTTPRQVREFLGTAGFCRLWIPGFASLAAPLYPLTKPSIPFIWTEEHQKAFDRIKEALLSAPALALPDLTKPFTLYVDERAGVARGVLTQTLGPWRRPVAYLSKKLDPVASGWPTCLKAVAAVALLLKDADKLTLGQNVTVIASHSLESIVRQPPDRWMTNARMTHYQSLLLNERVSFAPPAVLNPATLLPVESEATPVHRCSEILAEETGTRRDLKDQPLPGVPAWYTDGSSFIAEGKRRAGAAIVDGKRTVWASSLPEGTSAQKAELVALTQALRLAEGKDINIYTDSRYAFATAHIHGAIYKQRGWLTSAGKDIKNKEEILALLEAIHLPKRVAIIHCPGHQKGNDPVATGNRRADEAAKQAALSTRVLAETTKPAGKRTADGSEFEKRTADGSEFESPKKKAKVE

SEQ ID NO: 829 - protein, 2094 aa, synthetic construct
MPAAKRVKLDGGDKKYSIGLDIGTNSVGWAVITDEYKVPSKKFKVLGNTDRHSIKKNLIGALLFDSGETAEATRLKRTARRRYTRRKNRICYLQEIFSNEMAKVDDSFFHRLEESFLVEEDKKHERHPIFGNIVDEVAYHEKYPTIYHLRKKLVDSTDKADLRLIYLALAHMIKFRGHFLIEGDLNPDNSDVDKLFIQLVQTYNQLFEENPINASGVDAKAILSARLSKSRRLENLIAQLPGEKKNGLFGNLIALSLGLTPNFKSNFDLAEDAKLQLSKDTYDDDLDNLLAQIGDQYADLFLAAKNLSDAILLSDILRVNTEITKAPLSASMIKRYDEHHQDLTLLKALVRQQLPEKYKEIFFDQSKNGYAGYIDGGASQEEFYKFIKPILEKMDGTEELLVKLNREDLLRKQRTFDNGSIPHQIHLGELHAILRRQEDFYPFLKDNREKIEKILTFRIPYYVGPLARGNSRFAWMTRKSEETITPWNFEEVVDKGASAQSFIERMTNFDKNLPNEKVLPKHSLLYEYFTVYNELTKVKYVTEGMRKPAFLSGEQKKAIVDLLFKTNRKVTVKQLKEDYFKKIECFDSVEISGVEDRFNASLGTYHDLLKIIKDKDFLDNEENEDILEDIVLTLTLFEDREMIEERLKTYAHLFDDKVMKQLKRRRYTGWGRLSRKLINGIRDKQSGKTILDFLKSDGFANRNFMQLIHDDSLTFKEDIQKAQVSGQGDSLHEHIANLAGSPAIKKGILQTVKVVDELVKVMGRHKPENIVIEMARENQTTQKGQKNSRERMKRIEEGIKELGSQILKEHPVENTQLQNEKLYLYYLQNGRDMYVDQELDINRLSDYDVDHIVPQSFLKDDSIDNKVLTRSDKARGKSDNVPSEEVVKKMKNYWRQLLNAKLITQRKFDNLTKAERGGLSELDKAGFIKRQLVETRQITKHVAQILDSRMNTKYDENDKLIREVKVITLKSKLVSDFRKDFQFYKVREINNYHHAHDAYLNAVVGTALIKKYPKLESEFVYGDYKVYDVRKMIAKSEQEIGKATAKYFFYSNIMNFFKTEITLANGEIRKRPLIETNGETGEIVWDKGRDFATVRKVLSMPQVNIVKKTEVQTGGFSKESILPKRNSDKLIARKKDWDPKKYGGFDSPTVAYSVLVVAKVEKGKSKKLKSVKELLGITIMERSSFEKNPIDFLEAKGYKEVKKDLIIKLPKYSLFELENGRKRMLASAGELQKGNELALPSKYVNFLYLASHYEKLKGSPEDNEQKQLFVEQHKHYLDEIIEQISEFSKRVILADANLDKVLSAYNKHRDKPIREQAENIIHLFTLTNLGAPAAFKYFDTTIDRKRYTSTKEVLDATLIHQSITGLYETRIDLSQLGGDGGEAAAKGGSPAPGGVLNLEEEYRLHEKPVPSSIDPSWLQLFPTVWAERAGMGLANQVPPVVVELRSGASPVAVRQYPMSKEAREGIRPHIQRFLDLGVLVPCQSPWNTPLLPVKKPGTNDYRPVQDLREINKRVQDIHPTVPNPYNLLSSLPPSHTWYSVLDLKDAFFCLKLHPNSQPLFAFEWRDPEKGNTGQLTWTRLPQGFKNSPTLFNEALHRDLAPFRALNPQVVLLQYVDDLLVAAPTYRDCKEGTQKLLQELSKLGYRVSAKKAQLCQKEVTYLGYLLKEGKRWLTPARKATVMKIPPPTTPRQVREFLGTAGFCRLWIPGFASLAAPLYPLTKPSIPFIWTEEHQKAFDRIKEALLSAPALALPDLTKPFTLYVDERAGVARGVLTQTLGPWRRPVAYLSKKLDPVASGWPTCLKAVAAVALLLKDADKLTLGQNVTVIASHSLESIVRQPPDRWMTNARMTHYQSLLLNERVSFAPPAVLNPATLLPVESEATPVHRCSEILAEETGTRRDLKDQPLPGVPAWYTDGSSFIAEGKRRAGAAIVDGKRTVWASSLPEGTSAQKAELVALTQALRLAEGKDINIYTDSRYAFATAHIHGAIYKQRGWLTSAGKDIKNKEEILALLEAIHLPKRVAIIHCPGHQKGNDPVATGNRRADEAAKQAALSTRVLAETTKPAGKRTADGSEFEKRTADGSEFESPKKKAKVE

SEQ ID NO: 830 - protein, 2094 aa, synthetic construct
MPAAKRVKLDGGDKKYSIGLDIGTNSVGWAVITDEYKVPSKKFKVLGNTDRHSIKKNLIGALLFDSGETAEATRLKRTARRRYTRRKNRICYLQEIFSNEMAKVDDSFFHRLEESFLVEEDKKHERHPIFGNIVDEVAYHEKYPTIYHLRKKLVDSTDKADLRLIYLALAHMIKFRGHFLIEGDLNPDNSDVDKLFIQLVQTYNQLFEENPINASGVDAKAILSARLSKSRRLENLIAQLPGEKKNGLFGNLIALSLGLTPNFKSNFDLAEDAKLQLSKDTYDDDLDNLLAQIGDQYADLFLAAKNLSDAILLSDILRVNTEITKAPLSASMIKRYDEHHQDLTLLKALVRQQLPEKYKEIFFDQSKNGYAGYIDGGASQEEFYKFIKPILEKMDGTEELLVKLNREDLLRKQRTFDNGSIPHQIHLGELHAILRRQEDFYPFLKDNREKIEKILTFRIPYYVGPLARGNSRFAWMTRKSEETITPWNFEEVVDKGASAQSFIERMTNFDKNLPNEKVLPKHSLLYEYFTVYNELTKVKYVTEGMRKPAFLSGEQKKAIVDLLFKTNRKVTVKQLKEDYFKKIECFDSVEISGVEDRFNASLGTYHDLLKIIKDKDFLDNEENEDILEDIVLTLTLFEDREMIEERLKTYAHLFDDKVMKQLKRRRYTGWGRLSRKLINGIRDKQSGKTILDFLKSDGFANRNFMQLIHDDSLTFKEDIQKAQVSGQGDSLHEHIANLAGSPAIKKGILQTVKVVDELVKVMGRHKPENIVIEMARENQTTQKGQKNSRERMKRIEEGIKELGSQILKEHPVENTQLQNEKLYLYYLQNGRDMYVDQELDINRLSDYDVDHIVPQSFLKDDSIDNKVLTRSDKARGKSDNVPSEEVVKKMKNYWRQLLNAKLITQRKFDNLTKAERGGLSELDKAGFIKRQLVETRQITKHVAQILDSRMNTKYDENDKLIREVKVITLKSKLVSDFRKDFQFYKVREINNYHHAHDAYLNAVVGTALIKKYPKLESEFVYGDYKVYDVRKMIAKSEQEIGKATAKYFFYSNIMNFFKTEITLANGEIRKRPLIETNGETGEIVWDKGRDFATVRKVLSMPQVNIVKKTEVQTGGFSKESILPKRNSDKLIARKKDWDPKKYGGFDSPTVAYSVLVVAKVEKGKSKKLKSVKELLGITIMERSSFEKNPIDFLEAKGYKEVKKDLIIKLPKYSLFELENGRKRMLASAGELQKGNELALPSKYVNFLYLASHYEKLKGSPEDNEQKQLFVEQHKHYLDEIIEQISEFSKRVILADANLDKVLSAYNKHRDKPIREQAENIIHLFTLTNLGAPAAFKYFDTTIDRKRYTSTKEVLDATLIHQSITGLYETRIDLSQLGGDGGEAAAKGGGGGSGGVLNLEEEYRLHEKPVPSSIDPSWLQLFPTVWAERAGMGLANQVPPVVVELRSGASPVAVRQYPMSKEAREGIRPHIQRFLDLGVLVPCQSPWNTPLLPVKKPGTNDYRPVQDLREINKRVQDIHPTVPNPYNLLSSLPPSHTWYSVLDLKDAFFCLKLHPNSQPLFAFEWRDPEKGNTGQLTWTRLPQGFKNSPTLFNEALHRDLAPFRALNPQVVLLQYVDDLLVAAPTYRDCKEGTQKLLQELSKLGYRVSAKKAQLCQKEVTYLGYLLKEGKRWLTPARKATVMKIPPPTTPRQVREFLGTAGFCRLWIPGFASLAAPLYPLTKPSIPFIWTEEHQKAFDRIKEALLSAPALALPDLTKPFTLYVDERAGVARGVLTQTLGPWRRPVAYLSKKLDPVASGWPTCLKAVAAVALLLKDADKLTLGQNVTVIASHSLESIVRQPPDRWMTNARMTHYQSLLLNERVSFAPPAVLNPATLLPVESEATPVHRCSEILAEETGTRRDLKDQPLPGVPAWYTDGSSFIAEGKRRAGAAIVDGKRTVWASSLPEGTSAQKAELVALTQALRLAEGKDINIYTDSRYAFATAHIHGAIYKQRGWLTSAGKDIKNKEEILALLEAIHLPKRVAIIHCPGHQKGNDPVATGNRRADEAAKQAALSTRVLAETTKPAGKRTADGSEFEKRTADGSEFESPKKKAKVE

SEQ ID NO: 831 - protein, 2094 aa, synthetic construct
MPAAKRVKLDGGDKKYSIGLDIGTNSVGWAVITDEYKVPSKKFKVLGNTDRHSIKKNLIGALLFDSGETAEATRLKRTARRRYTRRKNRICYLQEIFSNEMAKVDDSFFHRLEESFLVEEDKKHERHPIFGNIVDEVAYHEKYPTIYHLRKKLVDSTDKADLRLIYLALAHMIKFRGHFLIEGDLNPDNSDVDKLFIQLVQTYNQLFEENPINASGVDAKAILSARLSKSRRLENLIAQLPGEKKNGLFGNLIALSLGLTPNFKSNFDLAEDAKLQLSKDTYDDDLDNLLAQIGDQYADLFLAAKNLSDAILLSDILRVNTEITKAPLSASMIKRYDEHHQDLTLLKALVRQQLPEKYKEIFFDQSKNGYAGYIDGGASQEEFYKFIKPILEKMDGTEELLVKLNREDLLRKQRTFDNGSIPHQIHLGELHAILRRQEDFYPFLKDNREKIEKILTFRIPYYVGPLARGNSRFAWMTRKSEETITPWNFEEVVDKGASAQSFIERMTNFDKNLPNEKVLPKHSLLYEYFTVYNELTKVKYVTEGMRKPAFLSGEQKKAIVDLLFKTNRKVTVKQLKEDYFKKIECFDSVEISGVEDRFNASLGTYHDLLKIIKDKDFLDNEENEDILEDIVLTLTLFEDREMIEERLKTYAHLFDDKVMKQLKRRRYTGWGRLSRKLINGIRDKQSGKTILDFLKSDGFANRNFMQLIHDDSLTFKEDIQKAQVSGQGDSLHEHIANLAGSPAIKKGILQTVKVVDELVKVMGRHKPENIVIEMARENQTTQKGQKNSRERMKRIEEGIKELGSQILKEHPVENTQLQNEKLYLYYLQNGRDMYVDQELDINRLSDYDVDHIVPQSFLKDDSIDNKVLTRSDKARGKSDNVPSEEVVKKMKNYWRQLLNAKLITQRKFDNLTKAERGGLSELDKAGFIKRQLVETRQITKHVAQILDSRMNTKYDENDKLIREVKVITLKSKLVSDFRKDFQFYKVREINNYHHAHDAYLNAVVGTALIKKYPKLESEFVYGDYKVYDVRKMIAKSEQEIGKATAKYFFYSNIMNFFKTEITLANGEIRKRPLIETNGETGEIVWDKGRDFATVRKVLSMPQVNIVKKTEVQTGGFSKESILPKRNSDKLIARKKDWDPKKYGGFDSPTVAYSVLVVAKVEKGKSKKLKSVKELLGITIMERSSFEKNPIDFLEAKGYKEVKKDLIIKLPKYSLFELENGRKRMLASAGELQKGNELALPSKYVNFLYLASHYEKLKGSPEDNEQKQLFVEQHKHYLDEIIEQISEFSKRVILADANLDKVLSAYNKHRDKPIREQAENIIHLFTLTNLGAPAAFKYFDTTIDRKRYTSTKEVLDATLIHQSITGLYETRIDLSQLGGDGGPAPGSSEAAAKGGVLNLEEEYRLHEKPVPSSIDPSWLQLFPTVWAERAGMGLANQVPPVVVELRSGASPVAVRQYPMSKEAREGIRPHIQRFLDLGVLVPCQSPWNTPLLPVKKPGTNDYRPVQDLREINKRVQDIHPTVPNPYNLLSSLPPSHTWYSVLDLKDAFFCLKLHPNSQPLFAFEWRDPEKGNTGQLTWTRLPQGFKNSPTLFNEALHRDLAPFRALNPQVVLLQYVDDLLVAAPTYRDCKEGTQKLLQELSKLGYRVSAKKAQLCQKEVTYLGYLLKEGKRWLTPARKATVMKIPPPTTPRQVREFLGTAGFCRLWIPGFASLAAPLYPLTKPSIPFIWTEEHQKAFDRIKEALLSAPALALPDLTKPFTLYVDERAGVARGVLTQTLGPWRRPVAYLSKKLDPVASGWPTCLKAVAAVALLLKDADKLTLGQNVTVIASHSLESIVRQPPDRWMTNARMTHYQSLLLNERVSFAPPAVLNPATLLPVESEATPVHRCSEILAEETGTRRDLKDQPLPGVPAWYTDGSSFIAEGKRRAGAAIVDGKRTVWASSLPEGTSAQKAELVALTQALRLAEGKDINIYTDSRYAFATAHIHGAIYKQRGWLTSAGKDIKNKEEILALLEAIHLPKRVAIIHCPGHQKGNDPVATGNRRADEAAKQAALSTRVLAETTKPAGKRTADGSEFEKRTADGSEFESPKKKAKVE

SEQ ID NO: 832 - protein, 2091 aa, synthetic construct
MPAAKRVKLDGGDKKYSIGLDIGTNSVGWAVITDEYKVPSKKFKVLGNTDRHSIKKNLIGALLFDSGETAEATRLKRTARRRYTRRKNRICYLQEIFSNEMAKVDDSFFHRLEESFLVEEDKKHERHPIFGNIVDEVAYHEKYPTIYHLRKKLVDSTDKADLRLIYLALAHMIKFRGHFLIEGDLNPDNSDVDKLFIQLVQTYNQLFEENPINASGVDAKAILSARLSKSRRLENLIAQLPGEKKNGLFGNLIALSLGLTPNFKSNFDLAEDAKLQLSKDTYDDDLDNLLAQIGDQYADLFLAAKNLSDAILLSDILRVNTEITKAPLSASMIKRYDEHHQDLTLLKALVRQQLPEKYKEIFFDQSKNGYAGYIDGGASQEEFYKFIKPILEKMDGTEELLVKLNREDLLRKQRTFDNGSIPHQIHLGELHAILRRQEDFYPFLKDNREKIEKILTFRIPYYVGPLARGNSRFAWMTRKSEETITPWNFEEVVDKGASAQSFIERMTNFDKNLPNEKVLPKHSLLYEYFTVYNELTKVKYVTEGMRKPAFLSGEQKKAIVDLLFKTNRKVTVKQLKEDYFKKIECFDSVEISGVEDRFNASLGTYHDLLKIIKDKDFLDNEENEDILEDIVLTLTLFEDREMIEERLKTYAHLFDDKVMKQLKRRRYTGWGRLSRKLINGIRDKQSGKTILDFLKSDGFANRNFMQLIHDDSLTFKEDIQKAQVSGQGDSLHEHIANLAGSPAIKKGILQTVKVVDELVKVMGRHKPENIVIEMARENQTTQKGQKNSRERMKRIEEGIKELGSQILKEHPVENTQLQNEKLYLYYLQNGRDMYVDQELDINRLSDYDVDHIVPQSFLKDDSIDNKVLTRSDKARGKSDNVPSEEVVKKMKNYWRQLLNAKLITQRKFDNLTKAERGGLSELDKAGFIKRQLVETRQITKHVAQILDSRMNTKYDENDKLIREVKVITLKSKLVSDFRKDFQFYKVREINNYHHAHDAYLNAVVGTALIKKYPKLESEFVYGDYKVYDVRKMIAKSEQEIGKATAKYFFYSNIMNFFKTEITLANGEIRKRPLIETNGETGEIVWDKGRDFATVRKVLSMPQVNIVKKTEVQTGGFSKESILPKRNSDKLIARKKDWDPKKYGGFDSPTVAYSVLVVAKVEKGKSKKLKSVKELLGITIMERSSFEKNPIDFLEAKGYKEVKKDLIIKLPKYSLFELENGRKRMLASAGELQKGNELALPSKYVNFLYLASHYEKLKGSPEDNEQKQLFVEQHKHYLDEIIEQISEFSKRVILADANLDKVLSAYNKHRDKPIREQAENIIHLFTLTNLGAPAAFKYFDTTIDRKRYTSTKEVLDATLIHQSITGLYETRIDLSQLGGDGGEAAAKGGSGGVLNLEEEYRLHEKPVPSSIDPSWLQLFPTVWAERAGMGLANQVPPVVVELRSGASPVAVRQYPMSKEAREGIRPHIQRFLDLGVLVPCQSPWNTPLLPVKKPGTNDYRPVQDLREINKRVQDIHPTVPNPYNLLSSLPPSHTWYSVLDLKDAFFCLKLHPNSQPLFAFEWRDPEKGNTGQLTWTRLPQGFKNSPTLFNEALHRDLAPFRALNPQVVLLQYVDDLLVAAPTYRDCKEGTQKLLQELSKLGYRVSAKKAQLCQKEVTYLGYLLKEGKRWLTPARKATVMKIPPPTTPRQVREFLGTAGFCRLWIPGFASLAAPLYPLTKPSIPFIWTEEHQKAFDRIKEALLSAPALALPDLTKPFTLYVDERAGVARGVLTQTLGPWRRPVAYLSKKLDPVASGWPTCLKAVAAVALLLKDADKLTLGQNVTVIASHSLESIVRQPPDRWMTNARMTHYQSLLLNERVSFAPPAVLNPATLLPVESEATPVHRCSEILAEETGTRRDLKDQPLPGVPAWYTDGSSFIAEGKRRAGAAIVDGKRTVWASSLPEGTSAQKAELVALTQALRLAEGKDINIYTDSRYAFATAHIHGAIYKQRGWLTSAGKDIKNKEEILALLEAIHLPKRVAIIHCPGHQKGNDPVATGNRRADEAAKQAALSTRVLAETTKPAGKRTADGSEFEKRTADGSEFESPKKKAKVE

SEQ ID NO: 833 - protein, 2093 aa, synthetic construct
MPAAKRVKLDGGDKKYSIGLDIGTNSVGWAVITDEYKVPSKKFKVLGNTDRHSIKKNLIGALLFDSGETAEATRLKRTARRRYTRRKNRICYLQEIFSNEMAKVDDSFFHRLEESFLVEEDKKHERHPIFGNIVDEVAYHEKYPTIYHLRKKLVDSTDKADLRLIYLALAHMIKFRGHFLIEGDLNPDNSDVDKLFIQLVQTYNQLFEENPINASGVDAKAILSARLSKSRRLENLIAQLPGEKKNGLFGNLIALSLGLTPNFKSNFDLAEDAKLQLSKDTYDDDLDNLLAQIGDQYADLFLAAKNLSDAILLSDILRVNTEITKAPLSASMIKRYDEHHQDLTLLKALVRQQLPEKYKEIFFDQSKNGYAGYIDGGASQEEFYKFIKPILEKMDGTEELLVKLNREDLLRKQRTFDNGSIPHQIHLGELHAILRRQEDFYPFLKDNREKIEKILTFRIPYYVGPLARGNSRFAWMTRKSEETITPWNFEEVVDKGASAQSFIERMTNFDKNLPNEKVLPKHSLLYEYFTVYNELTKVKYVTEGMRKPAFLSGEQKKAIVDLLFKTNRKVTVKQLKEDYFKKIECFDSVEISGVEDRFNASLGTYHDLLKIIKDKDFLDNEENEDILEDIVLTLTLFEDREMIEERLKTYAHLFDDKVMKQLKRRRYTGWGRLSRKLINGIRDKQSGKTILDFLKSDGFANRNFMQLIHDDSLTFKEDIQKAQVSGQGDSLHEHIANLAGSPAIKKGILQTVKVVDELVKVMGRHKPENIVIEMARENQTTQKGQKNSRERMKRIEEGIKELGSQILKEHPVENTQLQNEKLYLYYLQNGRDMYVDQELDINRLSDYDVDHIVPQSFLKDDSIDNKVLTRSDKARGKSDNVPSEEVVKKMKNYWRQLLNAKLITQRKFDNLTKAERGGLSELDKAGFIKRQLVETRQITKHVAQILDSRMNTKYDENDKLIREVKVITLKSKLVSDFRKDFQFYKVREINNYHHAHDAYLNAVVGTALIKKYPKLESEFVYGDYKVYDVRKMIAKSEQEIGKATAKYFFYSNIMNFFKTEITLANGEIRKRPLIETNGETGEIVWDKGRDFATVRKVLSMPQVNIVKKTEVQTGGFSKESILPKRNSDKLIARKKDWDPKKYGGFDSPTVAYSVLVVAKVEKGKSKKLKSVKELLGITIMERSSFEKNPIDFLEAKGYKEVKKDLIIKLPKYSLFELENGRKRMLASAGELQKGNELALPSKYVNFLYLASHYEKLKGSPEDNEQKQLFVEQHKHYLDEIIEQISEFSKRVILADANLDKVLSAYNKHRDKPIREQAENIIHLFTLTNLGAPAAFKYFDTTIDRKRYTSTKEVLDATLIHQSITGLYETRIDLSQLGGDGGEAAAKEAAAKGGVLNLEEEYRLHEKPVPSSIDPSWLQLFPTVWAERAGMGLANQVPPVVVELRSGASPVAVRQYPMSKEAREGIRPHIQRFLDLGVLVPCQSPWNTPLLPVKKPGTNDYRPVQDLREINKRVQDIHPTVPNPYNLLSSLPPSHTWYSVLDLKDAFFCLKLHPNSQPLFAFEWRDPEKGNTGQLTWTRLPQGFKNSPTLFNEALHRDLAPFRALNPQVVLLQYVDDLLVAAPTYRDCKEGTQKLLQELSKLGYRVSAKKAQLCQKEVTYLGYLLKEGKRWLTPARKATVMKIPPPTTPRQVREFLGTAGFCRLWIPGFASLAAPLYPLTKPSIPFIWTEEHQKAFDRIKEALLSAPALALPDLTKPFTLYVDERAGVARGVLTQTLGPWRRPVAYLSKKLDPVASGWPTCLKAVAAVALLLKDADKLTLGQNVTVIASHSLESIVRQPPDRWMTNARMTHYQSLLLNERVSFAPPAVLNPATLLPVESEATPVHRCSEILAEETGTRRDLKDQPLPGVPAWYTDGSSFIAEGKRRAGAAIVDGKRTVWASSLPEGTSAQKAELVALTQALRLAEGKDINIYTDSRYAFATAHIHGAIYKQRGWLTSAGKDIKNKEEILALLEAIHLPKRVAIIHCPGHQKGNDPVATGNRRADEAAKQAALSTRVLAETTKPAGKRTADGSEFEKRTADGSEFESPKKKAKVE

SEQ ID NO: 834 - protein, 2094 aa, synthetic construct
MPAAKRVKLDGGDKKYSIGLDIGTNSVGWAVITDEYKVPSKKFKVLGNTDRHSIKKNLIGALLFDSGETAEATRLKRTARRRYTRRKNRICYLQEIFSNEMAKVDDSFFHRLEESFLVEEDKKHERHPIFGNIVDEVAYHEKYPTIYHLRKKLVDSTDKADLRLIYLALAHMIKFRGHFLIEGDLNPDNSDVDKLFIQLVQTYNQLFEENPINASGVDAKAILSARLSKSRRLENLIAQLPGEKKNGLFGNLIALSLGLTPNFKSNFDLAEDAKLQLSKDTYDDDLDNLLAQIGDQYADLFLAAKNLSDAILLSDILRVNTEITKAPLSASMIKRYDEHHQDLTLLKALVRQQLPEKYKEIFFDQSKNGYAGYIDGGASQEEFYKFIKPILEKMDGTEELLVKLNREDLLRKQRTFDNGSIPHQIHLGELHAILRRQEDFYPFLKDNREKIEKILTFRIPYYVGPLARGNSRFAWMTRKSEETITPWNFEEVVDKGASAQSFIERMTNFDKNLPNEKVLPKHSLLYEYFTVYNELTKVKYVTEGMRKPAFLSGEQKKAIVDLLFKTNRKVTVKQLKEDYFKKIECFDSVEISGVEDRFNASLGTYHDLLKIIKDKDFLDNEENEDILEDIVLTLTLFEDREMIEERLKTYAHLFDDKVMKQLKRRRYTGWGRLSRKLINGIRDKQSGKTILDFLKSDGFANRNFMQLIHDDSLTFKEDIQKAQVSGQGDSLHEHIANLAGSPAIKKGILQTVKVVDELVKVMGRHKPENIVIEMARENQTTQKGQKNSRERMKRIEEGIKELGSQILKEHPVENTQLQNEKLYLYYLQNGRDMYVDQELDINRLSDYDVDHIVPQSFLKDDSIDNKVLTRSDKARGKSDNVPSEEVVKKMKNYWRQLLNAKLITQRKFDNLTKAERGGLSELDKAGFIKRQLVETRQITKHVAQILDSRMNTKYDENDKLIREVKVITLKSKLVSDFRKDFQFYKVREINNYHHAHDAYLNAVVGTALIKKYPKLESEFVYGDYKVYDVRKMIAKSEQEIGKATAKYFFYSNIMNFFKTEITLANGEIRKRPLIETNGETGEIVWDKGRDFATVRKVLSMPQVNIVKKTEVQTGGFSKESILPKRNSDKLIARKKDWDPKKYGGFDSPTVAYSVLVVAKVEKGKSKKLKSVKELLGITIMERSSFEKNPIDFLEAKGYKEVKKDLIIKLPKYSLFELENGRKRMLASAGELQKGNELALPSKYVNFLYLASHYEKLKGSPEDNEQKQLFVEQHKHYLDEIIEQISEFSKRVILADANLDKVLSAYNKHRDKPIREQAENIIHLFTLTNLGAPAAFKYFDTTIDRKRYTSTKEVLDATLIHQSITGLYETRIDLSQLGGDGGEAAAKPAPGSSGGVLNLEEEYRLHEKPVPSSIDPSWLQLFPTVWAERAGMGLANQVPPVVVELRSGASPVAVRQYPMSKEAREGIRPHIQRFLDLGVLVPCQSPWNTPLLPVKKPGTNDYRPVQDLREINKRVQDIHPTVPNPYNLLSSLPPSHTWYSVLDLKDAFFCLKLHPNSQPLFAFEWRDPEKGNTGQLTWTRLPQGFKNSPTLFNEALHRDLAPFRALNPQVVLLQYVDDLLVAAPTYRDCKEGTQKLLQELSKLGYRVSAKKAQLCQKEVTYLGYLLKEGKRWLTPARKATVMKIPPPTTPRQVREFLGTAGFCRLWIPGFASLAAPLYPLTKPSIPFIWTEEHQKAFDRIKEALLSAPALALPDLTKPFTLYVDERAGVARGVLTQTLGPWRRPVAYLSKKLDPVASGWPTCLKAVAAVALLLKDADKLTLGQNVTVIASHSLESIVRQPPDRWMTNARMTHYQSLLLNERVSFAPPAVLNPATLLPVESEATPVHRCSEILAEETGTRRDLKDQPLPGVPAWYTDGSSFIAEGKRRAGAAIVDGKRTVWASSLPEGTSAQKAELVALTQALRLAEGKDINIYTDSRYAFATAHIHGAIYKQRGWLTSAGKDIKNKEEILALLEAIHLPKRVAIIHCPGHQKGNDPVATGNRRADEAAKQAALSTRVLAETTKPAGKRTADGSEFEKRTADGSEFESPKKKAKVE

SEQ ID NO: 835 - protein, 2092 aa, synthetic construct
MPAAKRVKLDGGDKKYSIGLDIGTNSVGWAVITDEYKVPSKKFKVLGNTDRHSIKKNLIGALLFDSGETAEATRLKRTARRRYTRRKNRICYLQEIFSNEMAKVDDSFFHRLEESFLVEEDKKHERHPIFGNIVDEVAYHEKYPTIYHLRKKLVDSTDKADLRLIYLALAHMIKFRGHFLIEGDLNPDNSDVDKLFIQLVQTYNQLFEENPINASGVDAKAILSARLSKSRRLENLIAQLPGEKKNGLFGNLIALSLGLTPNFKSNFDLAEDAKLQLSKDTYDDDLDNLLAQIGDQYADLFLAAKNLSDAILLSDILRVNTEITKAPLSASMIKRYDEHHQDLTLLKALVRQQLPEKYKEIFFDQSKNGYAGYIDGGASQEEFYKFIKPILEKMDGTEELLVKLNREDLLRKQRTFDNGSIPHQIHLGELHAILRRQEDFYPFLKDNREKIEKILTFRIPYYVGPLARGNSRFAWMTRKSEETITPWNFEEVVDKGASAQSFIERMTNFDKNLPNEKVLPKHSLLYEYFTVYNELTKVKYVTEGMRKPAFLSGEQKKAIVDLLFKTNRKVTVKQLKEDYFKKIECFDSVEISGVEDRFNASLGTYHDLLKIIKDKDFLDNEENEDILEDIVLTLTLFEDREMIEERLKTYAHLFDDKVMKQLKRRRYTGWGRLSRKLINGIRDKQSGKTILDFLKSDGFANRNFMQLIHDDSLTFKEDIQKAQVSGQGDSLHEHIANLAGSPAIKKGILQTVKVVDELVKVMGRHKPENIVIEMARENQTTQKGQKNSRERMKRIEEGIKELGSQILKEHPVENTQLQNEKLYLYYLQNGRDMYVDQELDINRLSDYDVDHIVPQSFLKDDSIDNKVLTRSDKARGKSDNVPSEEVVKKMKNYWRQLLNAKLITQRKFDNLTKAERGGLSELDKAGFIKRQLVETRQITKHVAQILDSRMNTKYDENDKLIREVKVITLKSKLVSDFRKDFQFYKVREINNYHHAHDAYLNAVVGTALIKKYPKLESEFVYGDYKVYDVRKMIAKSEQEIGKATAKYFFYSNIMNFFKTEITLANGEIRKRPLIETNGETGEIVWDKGRDFATVRKVLSMPQVNIVKKTEVQTGGFSKESILPKRNSDKLIARKKDWDPKKYGGFDSPTVAYSVLVVAKVEKGKSKKLKSVKELLGITIMERSSFEKNPIDFLEAKGYKEVKKDLIIKLPKYSLFELENGRKRMLASAGELQKGNELALPSKYVNFLYLASHYEKLKGSPEDNEQKQLFVEQHKHYLDEIIEQISEFSKRVILADANLDKVLSAYNKHRDKPIREQAENIIHLFTLTNLGAPAAFKYFDTTIDRKRYTSTKEVLDATLIHQSITGLYETRIDLSQLGGDGGGSSGSSGSSGGVLNLEEEYRLHEKPVPSSIDPSWLQLFPTVWAERAGMGLANQVPPVVVELRSGASPVAVRQYPMSKEAREGIRPHIQRFLDLGVLVPCQSPWNTPLLPVKKPGTNDYRPVQDLREINKRVQDIHPTVPNPYNLLSSLPPSHTWYSVLDLKDAFFCLKLHPNSQPLFAFEWRDPEKGNTGQLTWTRLPQGFKNSPTLFNEALHRDLAPFRALNPQVVLLQYVDDLLVAAPTYRDCKEGTQKLLQELSKLGYRVSAKKAQLCQKEVTYLGYLLKEGKRWLTPARKATVMKIPPPTTPRQVREFLGTAGFCRLWIPGFASLAAPLYPLTKPSIPFIWTEEHQKAFDRIKEALLSAPALALPDLTKPFTLYVDERAGVARGVLTQTLGPWRRPVAYLSKKLDPVASGWPTCLKAVAAVALLLKDADKLTLGQNVTVIASHSLESIVRQPPDRWMTNARMTHYQSLLLNERVSFAPPAVLNPATLLPVESEATPVHRCSEILAEETGTRRDLKDQPLPGVPAWYTDGSSFIAEGKRRAGAAIVDGKRTVWASSLPEGTSAQKAELVALTQALRLAEGKDINIYTDSRYAFATAHIHGAIYKQRGWLTSAGKDIKNKEEILALLEAIHLPKRVAIIHCPGHQKGNDPVATGNRRADEAAKQAALSTRVLAETTKPAGKRTADGSEFEKRTADGSEFESPKKKAKVE

SEQ ID NO: 836 - protein, 2091 aa, synthetic construct
MPAAKRVKLDGGDKKYSIGLDIGTNSVGWAVITDEYKVPSKKFKVLGNTDRHSIKKNLIGALLFDSGETAEATRLKRTARRRYTRRKNRICYLQEIFSNEMAKVDDSFFHRLEESFLVEEDKKHERHPIFGNIVDEVAYHEKYPTIYHLRKKLVDSTDKADLRLIYLALAHMIKFRGHFLIEGDLNPDNSDVDKLFIQLVQTYNQLFEENPINASGVDAKAILSARLSKSRRLENLIAQLPGEKKNGLFGNLIALSLGLTPNFKSNFDLAEDAKLQLSKDTYDDDLDNLLAQIGDQYADLFLAAKNLSDAILLSDILRVNTEITKAPLSASMIKRYDEHHQDLTLLKALVRQQLPEKYKEIFFDQSKNGYAGYIDGGASQEEFYKFIKPILEKMDGTEELLVKLNREDLLRKQRTFDNGSIPHQIHLGELHAILRRQEDFYPFLKDNREKIEKILTFRIPYYVGPLARGNSRFAWMTRKSEETITPWNFEEVVDKGASAQSFIERMTNFDKNLPNEKVLPKHSLLYEYFTVYNELTKVKYVTEGMRKPAFLSGEQKKAIVDLLFKTNRKVTVKQLKEDYFKKIECFDSVEISGVEDRFNASLGTYHDLLKIIKDKDFLDNEENEDILEDIVLTLTLFEDREMIEERLKTYAHLFDDKVMKQLKRRRYTGWGRLSRKLINGIRDKQSGKTILDFLKSDGFANRNFMQLIHDDSLTFKEDIQKAQVSGQGDSLHEHIANLAGSPAIKKGILQTVKVVDELVKVMGRHKPENIVIEMARENQTTQKGQKNSRERMKRIEEGIKELGSQILKEHPVENTQLQNEKLYLYYLQNGRDMYVDQELDINRLSDYDVDHIVPQSFLKDDSIDNKVLTRSDKARGKSDNVPSEEVVKKMKNYWRQLLNAKLITQRKFDNLTKAERGGLSELDKAGFIKRQLVETRQITKHVAQILDSRMNTKYDENDKLIREVKVITLKSKLVSDFRKDFQFYKVREINNYHHAHDAYLNAVVGTALIKKYPKLESEFVYGDYKVYDVRKMIAKSEQEIGKATAKYFFYSNIMNFFKTEITLANGEIRKRPLIETNGETGEIVWDKGRDFATVRKVLSMPQVNIVKKTEVQTGGFSKESILPKRNSDKLIARKKDWDPKKYGGFDSPTVAYSVLVVAKVEKGKSKKLKSVKELLGITIMERSSFEKNPIDFLEAKGYKEVKKDLIIKLPKYSLFELENGRKRMLASAGELQKGNELALPSKYVNFLYLASHYEKLKGSPEDNEQKQLFVEQHKHYLDEIIEQISEFSKRVILADANLDKVLSAYNKHRDKPIREQAENIIHLFTLTNLGAPAAFKYFDTTIDRKRYTSTKEVLDATLIHQSITGLYETRIDLSQLGGDGGEAAAKGSSGGVLNLEEEYRLHEKPVPSSIDPSWLQLFPTVWAERAGMGLANQVPPVVVELRSGASPVAVRQYPMSKEAREGIRPHIQRFLDLGVLVPCQSPWNTPLLPVKKPGTNDYRPVQDLREINKRVQDIHPTVPNPYNLLSSLPPSHTWYSVLDLKDAFFCLKLHPNSQPLFAFEWRDPEKGNTGQLTWTRLPQGFKNSPTLFNEALHRDLAPFRALNPQVVLLQYVDDLLVAAPTYRDCKEGTQKLLQELSKLGYRVSAKKAQLCQKEVTYLGYLLKEGKRWLTPARKATVMKIPPPTTPRQVREFLGTAGFCRLWIPGFASLAAPLYPLTKPSIPFIWTEEHQKAFDRIKEALLSAPALALPDLTKPFTLYVDERAGVARGVLTQTLGPWRRPVAYLSKKLDPVASGWPTCLKAVAAVALLLKDADKLTLGQNVTVIASHSLESIVRQPPDRWMTNARMTHYQSLLLNERVSFAPPAVLNPATLLPVESEATPVHRCSEILAEETGTRRDLKDQPLPGVPAWYTDGSSFIAEGKRRAGAAIVDGKRTVWASSLPEGTSAQKAELVALTQALRLAEGKDINIYTDSRYAFATAHIHGAIYKQRGWLTSAGKDIKNKEEILALLEAIHLPKRVAIIHCPGHQKGNDPVATGNRRADEAAKQAALSTRVLAETTKPAGKRTADGSEFEKRTADGSEFESPKKKAKVE

SEQ ID NO: 837 - protein, 2091 aa, synthetic construct
MPAAKRVKLDGGDKKYSIGLDIGTNSVGWAVITDEYKVPSKKFKVLGNTDRHSIKKNLIGALLFDSGETAEATRLKRTARRRYTRRKNRICYLQEIFSNEMAKVDDSFFHRLEESFLVEEDKKHERHPIFGNIVDEVAYHEKYPTIYHLRKKLVDSTDKADLRLIYLALAHMIKFRGHFLIEGDLNPDNSDVDKLFIQLVQTYNQLFEENPINASGVDAKAILSARLSKSRRLENLIAQLPGEKKNGLFGNLIALSLGLTPNFKSNFDLAEDAKLQLSKDTYDDDLDNLLAQIGDQYADLFLAAKNLSDAILLSDILRVNTEITKAPLSASMIKRYDEHHQDLTLLKALVRQQLPEKYKEIFFDQSKNGYAGYIDGGASQEEFYKFIKPILEKMDGTEELLVKLNREDLLRKQRTFDNGSIPHQIHLGELHAILRRQEDFYPFLKDNREKIEKILTFRIPYYVGPLARGNSRFAWMTRKSEETITPWNFEEVVDKGASAQSFIERMTNFDKNLPNEKVLPKHSLLYEYFTVYNELTKVKYVTEGMRKPAFLSGEQKKAIVDLLFKTNRKVTVKQLKEDYFKKIECFDSVEISGVEDRFNASLGTYHDLLKIIKDKDFLDNEENEDILEDIVLTLTLFEDREMIEERLKTYAHLFDDKVMKQLKRRRYTGWGRLSRKLINGIRDKQSGKTILDFLKSDGFANRNFMQLIHDDSLTFKEDIQKAQVSGQGDSLHEHIANLAGSPAIKKGILQTVKVVDELVKVMGRHKPENIVIEMARENQTTQKGQKNSRERMKRIEEGIKELGSQILKEHPVENTQLQNEKLYLYYLQNGRDMYVDQELDINRLSDYDVDHIVPQSFLKDDSIDNKVLTRSDKARGKSDNVPSEEVVKKMKNYWRQLLNAKLITQRKFDNLTKAERGGLSELDKAGFIKRQLVETRQITKHVAQILDSRMNTKYDENDKLIREVKVITLKSKLVSDFRKDFQFYKVREINNYHHAHDAYLNAVVGTALIKKYPKLESEFVYGDYKVYDVRKMIAKSEQEIGKATAKYFFYSNIMNFFKTEITLANGEIRKRPLIETNGETGEIVWDKGRDFATVRKVLSMPQVNIVKKTEVQTGGFSKESILPKRNSDKLIARKKDWDPKKYGGFDSPTVAYSVLVVAKVEKGKSKKLKSVKELLGITIMERSSFEKNPIDFLEAKGYKEVKKDLIIKLPKYSLFELENGRKRMLASAGELQKGNELALPSKYVNFLYLASHYEKLKGSPEDNEQKQLFVEQHKHYLDEIIEQISEFSKRVILADANLDKVLSAYNKHRDKPIREQAENIIHLFTLTNLGAPAAFKYFDTTIDRKRYTSTKEVLDATLIHQSITGLYETRIDLSQLGGDGGGGGEAAAKGGVLNLEEEYRLHEKPVPSSIDPSWLQLFPTVWAERAGMGLANQVPPVVVELRSGASPVAVRQYPMSKEAREGIRPHIQRFLDLGVLVPCQSPWNTPLLPVKKPGTNDYRPVQDLREINKRVQDIHPTVPNPYNLLSSLPPSHTWYSVLDLKDAFFCLKLHPNSQPLFAFEWRDPEKGNTGQLTWTRLPQGFKNSPTLFNEALHRDLAPFRALNPQVVLLQYVDDLLVAAPTYRDCKEGTQKLLQELSKLGYRVSAKKAQLCQKEVTYLGYLLKEGKRWLTPARKATVMKIPPPTTPRQVREFLGTAGFCRLWIPGFASLAAPLYPLTKPSIPFIWTEEHQKAFDRIKEALLSAPALALPDLTKPFTLYVDERAGVARGVLTQTLGPWRRPVAYLSKKLDPVASGWPTCLKAVAAVALLLKDADKLTLGQNVTVIASHSLESIVRQPPDRWMTNARMTHYQSLLLNERVSFAPPAVLNPATLLPVESEATPVHRCSEILAEETGTRRDLKDQPLPGVPAWYTDGSSFIAEGKRRAGAAIVDGKRTVWASSLPEGTSAQKAELVALTQALRLAEGKDINIYTDSRYAFATAHIHGAIYKQRGWLTSAGKDIKNKEEILALLEAIHLPKRVAIIHCPGHQKGNDPVATGNRRADEAAKQAALSTRVLAETTKPAGKRTADGSEFEKRTADGSEFESPKKKAKVE

SEQ ID NO: 838 - protein, 2091 aa, synthetic construct
MPAAKRVKLDGGDKKYSIGLDIGTNSVGWAVITDEYKVPSKKFKVLGNTDRHSIKKNLIGALLFDSGETAEATRLKRTARRRYTRRKNRICYLQEIFSNEMAKVDDSFFHRLEESFLVEEDKKHERHPIFGNIVDEVAYHEKYPTIYHLRKKLVDSTDKADLRLIYLALAHMIKFRGHFLIEGDLNPDNSDVDKLFIQLVQTYNQLFEENPINASGVDAKAILSARLSKSRRLENLIAQLPGEKKNGLFGNLIALSLGLTPNFKSNFDLAEDAKLQLSKDTYDDDLDNLLAQIGDQYADLFLAAKNLSDAILLSDILRVNTEITKAPLSASMIKRYDEHHQDLTLLKALVRQQLPEKYKEIFFDQSKNGYAGYIDGGASQEEFYKFIKPILEKMDGTEELLVKLNREDLLRKQRTFDNGSIPHQIHLGELHAILRRQEDFYPFLKDNREKIEKILTFRIPYYVGPLARGNSRFAWMTRKSEETITPWNFEEVVDKGASAQSFIERMTNFDKNLPNEKVLPKHSLLYEYFTVYNELTKVKYVTEGMRKPAFLSGEQKKAIVDLLFKTNRKVTVKQLKEDYFKKIECFDSVEISGVEDRFNASLGTYHDLLKIIKDKDFLDNEENEDILEDIVLTLTLFEDREMIEERLKTYAHLFDDKVMKQLKRRRYTGWGRLSRKLINGIRDKQSGKTILDFLKSDGFANRNFMQLIHDDSLTFKEDIQKAQVSGQGDSLHEHIANLAGSPAIKKGILQTVKVVDELVKVMGRHKPENIVIEMARENQTTQKGQKNSRERMKRIEEGIKELGSQILKEHPVENTQLQNEKLYLYYLQNGRDMYVDQELDINRLSDYDVDHIVPQSFLKDDSIDNKVLTRSDKARGKSDNVPSEEVVKKMKNYWRQLLNAKLITQRKFDNLTKAERGGLSELDKAGFIKRQLVETRQITKHVAQILDSRMNTKYDENDKLIREVKVITLKSKLVSDFRKDFQFYKVREINNYHHAHDAYLNAVVGTALIKKYPKLESEFVYGDYKVYDVRKMIAKSEQEIGKATAKYFFYSNIMNFFKTEITLANGEIRKRPLIETNGETGEIVWDKGRDFATVRKVLSMPQVNIVKKTEVQTGGFSKESILPKRNSDKLIARKKDWDPKKYGGFDSPTVAYSVLVVAKVEKGKSKKLKSVKELLGITIMERSSFEKNPIDFLEAKGYKEVKKDLIIKLPKYSLFELENGRKRMLASAGELQKGNELALPSKYVNFLYLASHYEKLKGSPEDNEQKQLFVEQHKHYLDEIIEQISEFSKRVILADANLDKVLSAYNKHRDKPIREQAENIIHLFTLTNLGAPAAFKYFDTTIDRKRYTSTKEVLDATLIHQSITGLYETRIDLSQLGGDGGGSSEAAAKGGVLNLEEEYRLHEKPVPSSIDPSWLQLFPTVWAERAGMGLANQVPPVVVELRSGASPVAVRQYPMSKEAREGIRPHIQRFLDLGVLVPCQSPWNTPLLPVKKPGTNDYRPVQDLREINKRVQDIHPTVPNPYNLLSSLPPSHTWYSVLDLKDAFFCLKLHPNSQPLFAFEWRDPEKGNTGQLTWTRLPQGFKNSPTLFNEALHRDLAPFRALNPQVVLLQYVDDLLVAAPTYRDCKEGTQKLLQELSKLGYRVSAKKAQLCQKEVTYLGYLLKEGKRWLTPARKATVMKIPPPTTPRQVREFLGTAGFCRLWIPGFASLAAPLYPLTKPSIPFIWTEEHQKAFDRIKEALLSAPALALPDLTKPFTLYVDERAGVARGVLTQTLGPWRRPVAYLSKKLDPVASGWPTCLKAVAAVALLLKDADKLTLGQNVTVIASHSLESIVRQPPDRWMTNARMTHYQSLLLNERVSFAPPAVLNPATLLPVESEATPVHRCSEILAEETGTRRDLKDQPLPGVPAWYTDGSSFIAEGKRRAGAAIVDGKRTVWASSLPEGTSAQKAELVALTQALRLAEGKDINIYTDSRYAFATAHIHGAIYKQRGWLTSAGKDIKNKEEILALLEAIHLPKRVAIIHCPGHQKGNDPVATGNRRADEAAKQAALSTRVLAETTKPAGKRTADGSEFEKRTADGSEFESPKKKAKVE

SEQ ID NO: 839 - protein, 2094 aa, synthetic construct
MPAAKRVKLDGGDKKYSIGLDIGTNSVGWAVITDEYKVPSKKFKVLGNTDRHSIKKNLIGALLFDSGETAEATRLKRTARRRYTRRKNRICYLQEIFSNEMAKVDDSFFHRLEESFLVEEDKKHERHPIFGNIVDEVAYHEKYPTIYHLRKKLVDSTDKADLRLIYLALAHMIKFRGHFLIEGDLNPDNSDVDKLFIQLVQTYNQLFEENPINASGVDAKAILSARLSKSRRLENLIAQLPGEKKNGLFGNLIALSLGLTPNFKSNFDLAEDAKLQLSKDTYDDDLDNLLAQIGDQYADLFLAAKNLSDAILLSDILRVNTEITKAPLSASMIKRYDEHHQDLTLLKALVRQQLPEKYKEIFFDQSKNGYAGYIDGGASQEEFYKFIKPILEKMDGTEELLVKLNREDLLRKQRTFDNGSIPHQIHLGELHAILRRQEDFYPFLKDNREKIEKILTFRIPYYVGPLARGNSRFAWMTRKSEETITPWNFEEVVDKGASAQSFIERMTNFDKNLPNEKVLPKHSLLYEYFTVYNELTKVKYVTEGMRKPAFLSGEQKKAIVDLLFKTNRKVTVKQLKEDYFKKIECFDSVEISGVEDRFNASLGTYHDLLKIIKDKDFLDNEENEDILEDIVLTLTLFEDREMIEERLKTYAHLFDDKVMKQLKRRRYTGWGRLSRKLINGIRDKQSGKTILDFLKSDGFANRNFMQLIHDDSLTFKEDIQKAQVSGQGDSLHEHIANLAGSPAIKKGILQTVKVVDELVKVMGRHKPENIVIEMARENQTTQKGQKNSRERMKRIEEGIKELGSQILKEHPVENTQLQNEKLYLYYLQNGRDMYVDQELDINRLSDYDVDHIVPQSFLKDDSIDNKVLTRSDKARGKSDNVPSEEVVKKMKNYWRQLLNAKLITQRKFDNLTKAERGGLSELDKAGFIKRQLVETRQITKHVAQILDSRMNTKYDENDKLIREVKVITLKSKLVSDFRKDFQFYKVREINNYHHAHDAYLNAVVGTALIKKYPKLESEFVYGDYKVYDVRKMIAKSEQEIGKATAKYFFYSNIMNFFKTEITLANGEIRKRPLIETNGETGEIVWDKGRDFATVRKVLSMPQVNIVKKTEVQTGGFSKESILPKRNSDKLIARKKDWDPKKYGGFDSPTVAYSVLVVAKVEKGKSKKLKSVKELLGITIMERSSFEKNPIDFLEAKGYKEVKKDLIIKLPKYSLFELENGRKRMLASAGELQKGNELALPSKYVNFLYLASHYEKLKGSPEDNEQKQLFVEQHKHYLDEIIEQISEFSKRVILADANLDKVLSAYNKHRDKPIREQAENIIHLFTLTNLGAPAAFKYFDTTIDRKRYTSTKEVLDATLIHQSITGLYETRIDLSQLGGDGGGSSPAPEAAAKGGVLNLEEEYRLHEKPVPSSIDPSWLQLFPTVWAERAGMGLANQVPPVVVELRSGASPVAVRQYPMSKEAREGIRPHIQRFLDLGVLVPCQSPWNTPLLPVKKPGTNDYRPVQDLREINKRVQDIHPTVPNPYNLLSSLPPSHTWYSVLDLKDAFFCLKLHPNSQPLFAFEWRDPEKGNTGQLTWTRLPQGFKNSPTLFNEALHRDLAPFRALNPQVVLLQYVDDLLVAAPTYRDCKEGTQKLLQELSKLGYRVSAKKAQLCQKEVTYLGYLLKEGKRWLTPARKATVMKIPPPTTPRQVREFLGTAGFCRLWIPGFASLAAPLYPLTKPSIPFIWTEEHQKAFDRIKEALLSAPALALPDLTKPFTLYVDERAGVARGVLTQTLGPWRRPVAYLSKKLDPVASGWPTCLKAVAAVALLLKDADKLTLGQNVTVIASHSLESIVRQPPDRWMTNARMTHYQSLLLNERVSFAPPAVLNPATLLPVESEATPVHRCSEILAEETGTRRDLKDQPLPGVPAWYTDGSSFIAEGKRRAGAAIVDGKRTVWASSLPEGTSAQKAELVALTQALRLAEGKDINIYTDSRYAFATAHIHGAIYKQRGWLTSAGKDIKNKEEILALLEAIHLPKRVAIIHCPGHQKGNDPVATGNRRADEAAKQAALSTRVLAETTKPAGKRTADGSEFEKRTADGSEFESPKKKAKVE

SEQ ID NO: 840 - protein, 2092 aa, synthetic construct
MPAAKRVKLDGGDKKYSIGLDIGTNSVGWAVITDEYKVPSKKFKVLGNTDRHSIKKNLIGALLFDSGETAEATRLKRTARRRYTRRKNRICYLQEIFSNEMAKVDDSFFHRLEESFLVEEDKKHERHPIFGNIVDEVAYHEKYPTIYHLRKKLVDSTDKADLRLIYLALAHMIKFRGHFLIEGDLNPDNSDVDKLFIQLVQTYNQLFEENPINASGVDAKAILSARLSKSRRLENLIAQLPGEKKNGLFGNLIALSLGLTPNFKSNFDLAEDAKLQLSKDTYDDDLDNLLAQIGDQYADLFLAAKNLSDAILLSDILRVNTEITKAPLSASMIKRYDEHHQDLTLLKALVRQQLPEKYKEIFFDQSKNGYAGYIDGGASQEEFYKFIKPILEKMDGTEELLVKLNREDLLRKQRTFDNGSIPHQIHLGELHAILRRQEDFYPFLKDNREKIEKILTFRIPYYVGPLARGNSRFAWMTRKSEETITPWNFEEVVDKGASAQSFIERMTNFDKNLPNEKVLPKHSLLYEYFTVYNELTKVKYVTEGMRKPAFLSGEQKKAIVDLLFKTNRKVTVKQLKEDYFKKIECFDSVEISGVEDRFNASLGTYHDLLKIIKDKDFLDNEENEDILEDIVLTLTLFEDREMIEERLKTYAHLFDDKVMKQLKRRRYTGWGRLSRKLINGIRDKQSGKTILDFLKSDGFANRNFMQLIHDDSLTFKEDIQKAQVSGQGDSLHEHIANLAGSPAIKKGILQTVKVVDELVKVMGRHKPENIVIEMARENQTTQKGQKNSRERMKRIEEGIKELGSQILKEHPVENTQLQNEKLYLYYLQNGRDMYVDQELDINRLSDYDVDHIVPQSFLKDDSIDNKVLTRSDKARGKSDNVPSEEVVKKMKNYWRQLLNAKLITQRKFDNLTKAERGGLSELDKAGFIKRQLVETRQITKHVAQILDSRMNTKYDENDKLIREVKVITLKSKLVSDFRKDFQFYKVREINNYHHAHDAYLNAVVGTALIKKYPKLESEFVYGDYKVYDVRKMIAKSEQEIGKATAKYFFYSNIMNFFKTEITLANGEIRKRPLIETNGETGEIVWDKGRDFATVRKVLSMPQVNIVKKTEVQTGGFSKESILPKRNSDKLIARKKDWDPKKYGGFDSPTVAYSVLVVAKVEKGKSKKLKSVKELLGITIMERSSFEKNPIDFLEAKGYKEVKKDLIIKLPKYSLFELENGRKRMLASAGELQKGNELALPSKYVNFLYLASHYEKLKGSPEDNEQKQLFVEQHKHYLDEIIEQISEFSKRVILADANLDKVLSAYNKHRDKPIREQAENIIHLFTLTNLGAPAAFKYFDTTIDRKRYTSTKEVLDATLIHQSITGLYETRIDLSQLGGDGGGSSPAPGGSGGVLNLEEEYRLHEKPVPSSIDPSWLQLFPTVWAERAGMGLANQVPPVVVELRSGASPVAVRQYPMSKEAREGIRPHIQRFLDLGVLVPCQSPWNTPLLPVKKPGTNDYRPVQDLREINKRVQDIHPTVPNPYNLLSSLPPSHTWYSVLDLKDAFFCLKLHPNSQPLFAFEWRDPEKGNTGQLTWTRLPQGFKNSPTLFNEALHRDLAPFRALNPQVVLLQYVDDLLVAAPTYRDCKEGTQKLLQELSKLGYRVSAKKAQLCQKEVTYLGYLLKEGKRWLTPARKATVMKIPPPTTPRQVREFLGTAGFCRLWIPGFASLAAPLYPLTKPSIPFIWTEEHQKAFDRIKEALLSAPALALPDLTKPFTLYVDERAGVARGVLTQTLGPWRRPVAYLSKKLDPVASGWPTCLKAVAAVALLLKDADKLTLGQNVTVIASHSLESIVRQPPDRWMTNARMTHYQSLLLNERVSFAPPAVLNPATLLPVESEATPVHRCSEILAEETGTRRDLKDQPLPGVPAWYTDGSSFIAEGKRRAGAAIVDGKRTVWASSLPEGTSAQKAELVALTQALRLAEGKDINIYTDSRYAFATAHIHGAIYKQRGWLTSAGKDIKNKEEILALLEAIHLPKRVAIIHCPGHQKGNDPVATGNRRADEAAKQAALSTRVLAETTKPAGKRTADGSEFEKRTADGSEFESPKKKAKVE

SEQ ID NO: 841 - protein, 2094 aa, synthetic construct
MPAAKRVKLDGGDKKYSIGLDIGTNSVGWAVITDEYKVPSKKFKVLGNTDRHSIKKNLIGALLFDSGETAEATRLKRTARRRYTRRKNRICYLQEIFSNEMAKVDDSFFHRLEESFLVEEDKKHERHPIFGNIVDEVAYHEKYPTIYHLRKKLVDSTDKADLRLIYLALAHMIKFRGHFLIEGDLNPDNSDVDKLFIQLVQTYNQLFEENPINASGVDAKAILSARLSKSRRLENLIAQLPGEKKNGLFGNLIALSLGLTPNFKSNFDLAEDAKLQLSKDTYDDDLDNLLAQIGDQYADLFLAAKNLSDAILLSDILRVNTEITKAPLSASMIKRYDEHHQDLTLLKALVRQQLPEKYKEIFFDQSKNGYAGYIDGGASQEEFYKFIKPILEKMDGTEELLVKLNREDLLRKQRTFDNGSIPHQIHLGELHAILRRQEDFYPFLKDNREKIEKILTFRIPYYVGPLARGNSRFAWMTRKSEETITPWNFEEVVDKGASAQSFIERMTNFDKNLPNEKVLPKHSLLYEYFTVYNELTKVKYVTEGMRKPAFLSGEQKKAIVDLLFKTNRKVTVKQLKEDYFKKIECFDSVEISGVEDRFNASLGTYHDLLKIIKDKDFLDNEENEDILEDIVLTLTLFEDREMIEERLKTYAHLFDDKVMKQLKRRRYTGWGRLSRKLINGIRDKQSGKTILDFLKSDGFANRNFMQLIHDDSLTFKEDIQKAQVSGQGDSLHEHIANLAGSPAIKKGILQTVKVVDELVKVMGRHKPENIVIEMARENQTTQKGQKNSRERMKRIEEGIKELGSQILKEHPVENTQLQNEKLYLYYLQNGRDMYVDQELDINRLSDYDVDHIVPQSFLKDDSIDNKVLTRSDKARGKSDNVPSEEVVKKMKNYWRQLLNAKLITQRKFDNLTKAERGGLSELDKAGFIKRQLVETRQITKHVAQILDSRMNTKYDENDKLIREVKVITLKSKLVSDFRKDFQFYKVREINNYHHAHDAYLNAVVGTALIKKYPKLESEFVYGDYKVYDVRKMIAKSEQEIGKATAKYFFYSNIMNFFKTEITLANGEIRKRPLIETNGETGEIVWDKGRDFATVRKVLSMPQVNIVKKTEVQTGGFSKESILPKRNSDKLIARKKDWDPKKYGGFDSPTVAYSVLVVAKVEKGKSKKLKSVKELLGITIMERSSFEKNPIDFLEAKGYKEVKKDLIIKLPKYSLFELENGRKRMLASAGELQKGNELALPSKYVNFLYLASHYEKLKGSPEDNEQKQLFVEQHKHYLDEIIEQISEFSKRVILADANLDKVLSAYNKHRDKPIREQAENIIHLFTLTNLGAPAAFKYFDTTIDRKRYTSTKEVLDATLIHQSITGLYETRIDLSQLGGDGGGGGEAAAKGGSGGVLNLEEEYRLHEKPVPSSIDPSWLQLFPTVWAERAGMGLANQVPPVVVELRSGASPVAVRQYPMSKEAREGIRPHIQRFLDLGVLVPCQSPWNTPLLPVKKPGTNDYRPVQDLREINKRVQDIHPTVPNPYNLLSSLPPSHTWYSVLDLKDAFFCLKLHPNSQPLFAFEWRDPEKGNTGQLTWTRLPQGFKNSPTLFNEALHRDLAPFRALNPQVVLLQYVDDLLVAAPTYRDCKEGTQKLLQELSKLGYRVSAKKAQLCQKEVTYLGYLLKEGKRWLTPARKATVMKIPPPTTPRQVREFLGTAGFCRLWIPGFASLAAPLYPLTKPSIPFIWTEEHQKAFDRIKEALLSAPALALPDLTKPFTLYVDERAGVARGVLTQTLGPWRRPVAYLSKKLDPVASGWPTCLKAVAAVALLLKDADKLTLGQNVTVIASHSLESIVRQPPDRWMTNARMTHYQSLLLNERVSFAPPAVLNPATLLPVESEATPVHRCSEILAEETGTRRDLKDQPLPGVPAWYTDGSSFIAEGKRRAGAAIVDGKRTVWASSLPEGTSAQKAELVALTQALRLAEGKDINIYTDSRYAFATAHIHGAIYKQRGWLTSAGKDIKNKEEILALLEAIHLPKRVAIIHCPGHQKGNDPVATGNRRADEAAKQAALSTRVLAETTKPAGKRTADGSEFEKRTADGSEFESPKKKAKVE

SEQ ID NO: 842 - protein, 2091 aa, synthetic construct
MPAAKRVKLDGGDKKYSIGLDIGTNSVGWAVITDEYKVPSKKFKVLGNTDRHSIKKNLIGALLFDSGETAEATRLKRTARRRYTRRKNRICYLQEIFSNEMAKVDDSFFHRLEESFLVEEDKKHERHPIFGNIVDEVAYHEKYPTIYHLRKKLVDSTDKADLRLIYLALAHMIKFRGHFLIEGDLNPDNSDVDKLFIQLVQTYNQLFEENPINASGVDAKAILSARLSKSRRLENLIAQLPGEKKNGLFGNLIALSLGLTPNFKSNFDLAEDAKLQLSKDTYDDDLDNLLAQIGDQYADLFLAAKNLSDAILLSDILRVNTEITKAPLSASMIKRYDEHHQDLTLLKALVRQQLPEKYKEIFFDQSKNGYAGYIDGGASQEEFYKFIKPILEKMDGTEELLVKLNREDLLRKQRTFDNGSIPHQIHLGELHAILRRQEDFYPFLKDNREKIEKILTFRIPYYVGPLARGNSRFAWMTRKSEETITPWNFEEVVDKGASAQSFIERMTNFDKNLPNEKVLPKHSLLYEYFTVYNELTKVKYVTEGMRKPAFLSGEQKKAIVDLLFKTNRKVTVKQLKEDYFKKIECFDSVEISGVEDRFNASLGTYHDLLKIIKDKDFLDNEENEDILEDIVLTLTLFEDREMIEERLKTYAHLFDDKVMKQLKRRRYTGWGRLSRKLINGIRDKQSGKTILDFLKSDGFANRNFMQLIHDDSLTFKEDIQKAQVSGQGDSLHEHIANLAGSPAIKKGILQTVKVVDELVKVMGRHKPENIVIEMARENQTTQKGQKNSRERMKRIEEGIKELGSQILKEHPVENTQLQNEKLYLYYLQNGRDMYVDQELDINRLSDYDVDHIVPQSFLKDDSIDNKVLTRSDKARGKSDNVPSEEVVKKMKNYWRQLLNAKLITQRKFDNLTKAERGGLSELDKAGFIKRQLVETRQITKHVAQILDSRMNTKYDENDKLIREVKVITLKSKLVSDFRKDFQFYKVREINNYHHAHDAYLNAVVGTALIKKYPKLESEFVYGDYKVYDVRKMIAKSEQEIGKATAKYFFYSNIMNFFKTEITLANGEIRKRPLIETNGETGEIVWDKGRDFATVRKVLSMPQVNIVKKTEVQTGGFSKESILPKRNSDKLIARKKDWDPKKYGGFDSPTVAYSVLVVAKVEKGKSKKLKSVKELLGITIMERSSFEKNPIDFLEAKGYKEVKKDLIIKLPKYSLFELENGRKRMLASAGELQKGNELALPSKYVNFLYLASHYEKLKGSPEDNEQKQLFVEQHKHYLDEIIEQISEFSKRVILADANLDKVLSAYNKHRDKPIREQAENIIHLFTLTNLGAPAAFKYFDTTIDRKRYTSTKEVLDATLIHQSITGLYETRIDLSQLGGDGGGGGGGGGGGGVLNLEEEYRLHEKPVPSSIDPSWLQLFPTVWAERAGMGLANQVPPVVVELRSGASPVAVRQYPMSKEAREGIRPHIQRFLDLGVLVPCQSPWNTPLLPVKKPGTNDYRPVQDLREINKRVQDIHPTVPNPYNLLSSLPPSHTWYSVLDLKDAFFCLKLHPNSQPLFAFEWRDPEKGNTGQLTWTRLPQGFKNSPTLFNEALHRDLAPFRALNPQVVLLQYVDDLLVAAPTYRDCKEGTQKLLQELSKLGYRVSAKKAQLCQKEVTYLGYLLKEGKRWLTPARKATVMKIPPPTTPRQVREFLGTAGFCRLWIPGFASLAAPLYPLTKPSIPFIWTEEHQKAFDRIKEALLSAPALALPDLTKPFTLYVDERAGVARGVLTQTLGPWRRPVAYLSKKLDPVASGWPTCLKAVAAVALLLKDADKLTLGQNVTVIASHSLESIVRQPPDRWMTNARMTHYQSLLLNERVSFAPPAVLNPATLLPVESEATPVHRCSEILAEETGTRRDLKDQPLPGVPAWYTDGSSFIAEGKRRAGAAIVDGKRTVWASSLPEGTSAQKAELVALTQALRLAEGKDINIYTDSRYAFATAHIHGAIYKQRGWLTSAGKDIKNKEEILALLEAIHLPKRVAIIHCPGHQKGNDPVATGNRRADEAAKQAALSTRVLAETTKPAGKRTADGSEFEKRTADGSEFESPKKKAKVE

SEQ ID NO: 843 - protein, 2103 aa, synthetic construct
MPAAKRVKLDGGDKKYSIGLDIGTNSVGWAVITDEYKVPSKKFKVLGNTDRHSIKKNLIGALLFDSGETAEATRLKRTARRRYTRRKNRICYLQEIFSNEMAKVDDSFFHRLEESFLVEEDKKHERHPIFGNIVDEVAYHEKYPTIYHLRKKLVDSTDKADLRLIYLALAHMIKFRGHFLIEGDLNPDNSDVDKLFIQLVQTYNQLFEENPINASGVDAKAILSARLSKSRRLENLIAQLPGEKKNGLFGNLIALSLGLTPNFKSNFDLAEDAKLQLSKDTYDDDLDNLLAQIGDQYADLFLAAKNLSDAILLSDILRVNTEITKAPLSASMIKRYDEHHQDLTLLKALVRQQLPEKYKEIFFDQSKNGYAGYIDGGASQEEFYKFIKPILEKMDGTEELLVKLNREDLLRKQRTFDNGSIPHQIHLGELHAILRRQEDFYPFLKDNREKIEKILTFRIPYYVGPLARGNSRFAWMTRKSEETITPWNFEEVVDKGASAQSFIERMTNFDKNLPNEKVLPKHSLLYEYFTVYNELTKVKYVTEGMRKPAFLSGEQKKAIVDLLFKTNRKVTVKQLKEDYFKKIECFDSVEISGVEDRFNASLGTYHDLLKIIKDKDFLDNEENEDILEDIVLTLTLFEDREMIEERLKTYAHLFDDKVMKQLKRRRYTGWGRLSRKLINGIRDKQSGKTILDFLKSDGFANRNFMQLIHDDSLTFKEDIQKAQVSGQGDSLHEHIANLAGSPAIKKGILQTVKVVDELVKVMGRHKPENIVIEMARENQTTQKGQKNSRERMKRIEEGIKELGSQILKEHPVENTQLQNEKLYLYYLQNGRDMYVDQELDINRLSDYDVDHIVPQSFLKDDSIDNKVLTRSDKARGKSDNVPSEEVVKKMKNYWRQLLNAKLITQRKFDNLTKAERGGLSELDKAGFIKRQLVETRQITKHVAQILDSRMNTKYDENDKLIREVKVITLKSKLVSDFRKDFQFYKVREINNYHHAHDAYLNAVVGTALIKKYPKLESEFVYGDYKVYDVRKMIAKSEQEIGKATAKYFFYSNIMNFFKTEITLANGEIRKRPLIETNGETGEIVWDKGRDFATVRKVLSMPQVNIVKKTEVQTGGFSKESILPKRNSDKLIARKKDWDPKKYGGFDSPTVAYSVLVVAKVEKGKSKKLKSVKELLGITIMERSSFEKNPIDFLEAKGYKEVKKDLIIKLPKYSLFELENGRKRMLASAGELQKGNELALPSKYVNFLYLASHYEKLKGSPEDNEQKQLFVEQHKHYLDEIIEQISEFSKRVILADANLDKVLSAYNKHRDKPIREQAENIIHLFTLTNLGAPAAFKYFDTTIDRKRYTSTKEVLDATLIHQSITGLYETRIDLSQLGGDGGGGGGSGGGGSGGGGSGGGGSGGVLNLEEEYRLHEKPVPSSIDPSWLQLFPTVWAERAGMGLANQVPPVVVELRSGASPVAVRQYPMSKEAREGIRPHIQRFLDLGVLVPCQSPWNTPLLPVKKPGTNDYRPVQDLREINKRVQDIHPTVPNPYNLLSSLPPSHTWYSVLDLKDAFFCLKLHPNSQPLFAFEWRDPEKGNTGQLTWTRLPQGFKNSPTLFNEALHRDLAPFRALNPQVVLLQYVDDLLVAAPTYRDCKEGTQKLLQELSKLGYRVSAKKAQLCQKEVTYLGYLLKEGKRWLTPARKATVMKIPPPTTPRQVREFLGTAGFCRLWIPGFASLAAPLYPLTKPSIPFIWTEEHQKAFDRIKEALLSAPALALPDLTKPFTLYVDERAGVARGVLTQTLGPWRRPVAYLSKKLDPVASGWPTCLKAVAAVALLLKDADKLTLGQNVTVIASHSLESIVRQPPDRWMTNARMTHYQSLLLNERVSFAPPAVLNPATLLPVESEATPVHRCSEILAEETGTRRDLKDQPLPGVPAWYTDGSSFIAEGKRRAGAAIVDGKRTVWASSLPEGTSAQKAELVALTQALRLAEGKDINIYTDSRYAFATAHIHGAIYKQRGWLTSAGKDIKNKEEILALLEAIHLPKRVAIIHCPGHQKGNDPVATGNRRADEAAKQAALSTRVLAETTKPAGKRTADGSEFEKRTADGSEFESPKKKAKVE

SEQ ID NO: 844 - protein, 2094 aa, synthetic construct
MPAAKRVKLDGGDKKYSIGLDIGTNSVGWAVITDEYKVPSKKFKVLGNTDRHSIKKNLIGALLFDSGETAEATRLKRTARRRYTRRKNRICYLQEIFSNEMAKVDDSFFHRLEESFLVEEDKKHERHPIFGNIVDEVAYHEKYPTIYHLRKKLVDSTDKADLRLIYLALAHMIKFRGHFLIEGDLNPDNSDVDKLFIQLVQTYNQLFEENPINASGVDAKAILSARLSKSRRLENLIAQLPGEKKNGLFGNLIALSLGLTPNFKSNFDLAEDAKLQLSKDTYDDDLDNLLAQIGDQYADLFLAAKNLSDAILLSDILRVNTEITKAPLSASMIKRYDEHHQDLTLLKALVRQQLPEKYKEIFFDQSKNGYAGYIDGGASQEEFYKFIKPILEKMDGTEELLVKLNREDLLRKQRTFDNGSIPHQIHLGELHAILRRQEDFYPFLKDNREKIEKILTFRIPYYVGPLARGNSRFAWMTRKSEETITPWNFEEVVDKGASAQSFIERMTNFDKNLPNEKVLPKHSLLYEYFTVYNELTKVKYVTEGMRKPAFLSGEQKKAIVDLLFKTNRKVTVKQLKEDYFKKIECFDSVEISGVEDRFNASLGTYHDLLKIIKDKDFLDNEENEDILEDIVLTLTLFEDREMIEERLKTYAHLFDDKVMKQLKRRRYTGWGRLSRKLINGIRDKQSGKTILDFLKSDGFANRNFMQLIHDDSLTFKEDIQKAQVSGQGDSLHEHIANLAGSPAIKKGILQTVKVVDELVKVMGRHKPENIVIEMARENQTTQKGQKNSRERMKRIEEGIKELGSQILKEHPVENTQLQNEKLYLYYLQNGRDMYVDQELDINRLSDYDVDHIVPQSFLKDDSIDNKVLTRSDKARGKSDNVPSEEVVKKMKNYWRQLLNAKLITQRKFDNLTKAERGGLSELDKAGFIKRQLVETRQITKHVAQILDSRMNTKYDENDKLIREVKVITLKSKLVSDFRKDFQFYKVREINNYHHAHDAYLNAVVGTALIKKYPKLESEFVYGDYKVYDVRKMIAKSEQEIGKATAKYFFYSNIMNFFKTEITLANGEIRKRPLIETNGETGEIVWDKGRDFATVRKVLSMPQVNIVKKTEVQTGGFSKESILPKRNSDKLIARKKDWDPKKYGGFDSPTVAYSVLVVAKVEKGKSKKLKSVKELLGITIMERSSFEKNPIDFLEAKGYKEVKKDLIIKLPKYSLFELENGRKRMLASAGELQKGNELALPSKYVNFLYLASHYEKLKGSPEDNEQKQLFVEQHKHYLDEIIEQISEFSKRVILADANLDKVLSAYNKHRDKPIREQAENIIHLFTLTNLGAPAAFKYFDTTIDRKRYTSTKEVLDATLIHQSITGLYETRIDLSQLGGDGGGGSEAAAKPAPGGVLNLEEEYRLHEKPVPSSIDPSWLQLFPTVWAERAGMGLANQVPPVVVELRSGASPVAVRQYPMSKEAREGIRPHIQRFLDLGVLVPCQSPWNTPLLPVKKPGTNDYRPVQDLREINKRVQDIHPTVPNPYNLLSSLPPSHTWYSVLDLKDAFFCLKLHPNSQPLFAFEWRDPEKGNTGQLTWTRLPQGFKNSPTLFNEALHRDLAPFRALNPQVVLLQYVDDLLVAAPTYRDCKEGTQKLLQELSKLGYRVSAKKAQLCQKEVTYLGYLLKEGKRWLTPARKATVMKIPPPTTPRQVREFLGTAGFCRLWIPGFASLAAPLYPLTKPSIPFIWTEEHQKAFDRIKEALLSAPALALPDLTKPFTLYVDERAGVARGVLTQTLGPWRRPVAYLSKKLDPVASGWPTCLKAVAAVALLLKDADKLTLGQNVTVIASHSLESIVRQPPDRWMTNARMTHYQSLLLNERVSFAPPAVLNPATLLPVESEATPVHRCSEILAEETGTRRDLKDQPLPGVPAWYTDGSSFIAEGKRRAGAAIVDGKRTVWASSLPEGTSAQKAELVALTQALRLAEGKDINIYTDSRYAFATAHIHGAIYKQRGWLTSAGKDIKNKEEILALLEAIHLPKRVAIIHCPGHQKGNDPVATGNRRADEAAKQAALSTRVLAETTKPAGKRTADGSEFEKRTADGSEFESPKKKAKVE

SEQ ID NO: 845 - protein, 2092 aa, synthetic construct
MPAAKRVKLDGGDKKYSIGLDIGTNSVGWAVITDEYKVPSKKFKVLGNTDRHSIKKNLIGALLFDSGETAEATRLKRTARRRYTRRKNRICYLQEIFSNEMAKVDDSFFHRLEESFLVEEDKKHERHPIFGNIVDEVAYHEKYPTIYHLRKKLVDSTDKADLRLIYLALAHMIKFRGHFLIEGDLNPDNSDVDKLFIQLVQTYNQLFEENPINASGVDAKAILSARLSKSRRLENLIAQLPGEKKNGLFGNLIALSLGLTPNFKSNFDLAEDAKLQLSKDTYDDDLDNLLAQIGDQYADLFLAAKNLSDAILLSDILRVNTEITKAPLSASMIKRYDEHHQDLTLLKALVRQQLPEKYKEIFFDQSKNGYAGYIDGGASQEEFYKFIKPILEKMDGTEELLVKLNREDLLRKQRTFDNGSIPHQIHLGELHAILRRQEDFYPFLKDNREKIEKILTFRIPYYVGPLARGNSRFAWMTRKSEETITPWNFEEVVDKGASAQSFIERMTNFDKNLPNEKVLPKHSLLYEYFTVYNELTKVKYVTEGMRKPAFLSGEQKKAIVDLLFKTNRKVTVKQLKEDYFKKIECFDSVEISGVEDRFNASLGTYHDLLKIIKDKDFLDNEENEDILEDIVLTLTLFEDREMIEERLKTYAHLFDDKVMKQLKRRRYTGWGRLSRKLINGIRDKQSGKTILDFLKSDGFANRNFMQLIHDDSLTFKEDIQKAQVSGQGDSLHEHIANLAGSPAIKKGILQTVKVVDELVKVMGRHKPENIVIEMARENQTTQKGQKNSRERMKRIEEGIKELGSQILKEHPVENTQLQNEKLYLYYLQNGRDMYVDQELDINRLSDYDVDHIVPQSFLKDDSIDNKVLTRSDKARGKSDNVPSEEVVKKMKNYWRQLLNAKLITQRKFDNLTKAERGGLSELDKAGFIKRQLVETRQITKHVAQILDSRMNTKYDENDKLIREVKVITLKSKLVSDFRKDFQFYKVREINNYHHAHDAYLNAVVGTALIKKYPKLESEFVYGDYKVYDVRKMIAKSEQEIGKATAKYFFYSNIMNFFKTEITLANGEIRKRPLIETNGETGEIVWDKGRDFATVRKVLSMPQVNIVKKTEVQTGGFSKESILPKRNSDKLIARKKDWDPKKYGGFDSPTVAYSVLVVAKVEKGKSKKLKSVKELLGITIMERSSFEKNPIDFLEAKGYKEVKKDLIIKLPKYSLFELENGRKRMLASAGELQKGNELALPSKYVNFLYLASHYEKLKGSPEDNEQKQLFVEQHKHYLDEIIEQISEFSKRVILADANLDKVLSAYNKHRDKPIREQAENIIHLFTLTNLGAPAAFKYFDTTIDRKRYTSTKEVLDATLIHQSITGLYETRIDLSQLGGDGGGSSPAPGGGGGVLNLEEEYRLHEKPVPSSIDPSWLQLFPTVWAERAGMGLANQVPPVVVELRSGASPVAVRQYPMSKEAREGIRPHIQRFLDLGVLVPCQSPWNTPLLPVKKPGTNDYRPVQDLREINKRVQDIHPTVPNPYNLLSSLPPSHTWYSVLDLKDAFFCLKLHPNSQPLFAFEWRDPEKGNTGQLTWTRLPQGFKNSPTLFNEALHRDLAPFRALNPQVVLLQYVDDLLVAAPTYRDCKEGTQKLLQELSKLGYRVSAKKAQLCQKEVTYLGYLLKEGKRWLTPARKATVMKIPPPTTPRQVREFLGTAGFCRLWIPGFASLAAPLYPLTKPSIPFIWTEEHQKAFDRIKEALLSAPALALPDLTKPFTLYVDERAGVARGVLTQTLGPWRRPVAYLSKKLDPVASGWPTCLKAVAAVALLLKDADKLTLGQNVTVIASHSLESIVRQPPDRWMTNARMTHYQSLLLNERVSFAPPAVLNPATLLPVESEATPVHRCSEILAEETGTRRDLKDQPLPGVPAWYTDGSSFIAEGKRRAGAAIVDGKRTVWASSLPEGTSAQKAELVALTQALRLAEGKDINIYTDSRYAFATAHIHGAIYKQRGWLTSAGKDIKNKEEILALLEAIHLPKRVAIIHCPGHQKGNDPVATGNRRADEAAKQAALSTRVLAETTKPAGKRTADGSEFEKRTADGSEFESPKKKAKVE

SEQ ID NO: 846 - protein, 2095 aa, synthetic construct
MPAAKRVKLDGGDKKYSIGLDIGTNSVGWAVITDEYKVPSKKFKVLGNTDRHSIKKNLIGALLFDSGETAEATRLKRTARRRYTRRKNRICYLQEIFSNEMAKVDDSFFHRLEESFLVEEDKKHERHPIFGNIVDEVAYHEKYPTIYHLRKKLVDSTDKADLRLIYLALAHMIKFRGHFLIEGDLNPDNSDVDKLFIQLVQTYNQLFEENPINASGVDAKAILSARLSKSRRLENLIAQLPGEKKNGLFGNLIALSLGLTPNFKSNFDLAEDAKLQLSKDTYDDDLDNLLAQIGDQYADLFLAAKNLSDAILLSDILRVNTEITKAPLSASMIKRYDEHHQDLTLLKALVRQQLPEKYKEIFFDQSKNGYAGYIDGGASQEEFYKFIKPILEKMDGTEELLVKLNREDLLRKQRTFDNGSIPHQIHLGELHAILRRQEDFYPFLKDNREKIEKILTFRIPYYVGPLARGNSRFAWMTRKSEETITPWNFEEVVDKGASAQSFIERMTNFDKNLPNEKVLPKHSLLYEYFTVYNELTKVKYVTEGMRKPAFLSGEQKKAIVDLLFKTNRKVTVKQLKEDYFKKIECFDSVEISGVEDRFNASLGTYHDLLKIIKDKDFLDNEENEDILEDIVLTLTLFEDREMIEERLKTYAHLFDDKVMKQLKRRRYTGWGRLSRKLINGIRDKQSGKTILDFLKSDGFANRNFMQLIHDDSLTFKEDIQKAQVSGQGDSLHEHIANLAGSPAIKKGILQTVKVVDELVKVMGRHKPENIVIEMARENQTTQKGQKNSRERMKRIEEGIKELGSQILKEHPVENTQLQNEKLYLYYLQNGRDMYVDQELDINRLSDYDVDHIVPQSFLKDDSIDNKVLTRSDKARGKSDNVPSEEVVKKMKNYWRQLLNAKLITQRKFDNLTKAERGGLSELDKAGFIKRQLVETRQITKHVAQILDSRMNTKYDENDKLIREVKVITLKSKLVSDFRKDFQFYKVREINNYHHAHDAYLNAVVGTALIKKYPKLESEFVYGDYKVYDVRKMIAKSEQEIGKATAKYFFYSNIMNFFKTEITLANGEIRKRPLIETNGETGEIVWDKGRDFATVRKVLSMPQVNIVKKTEVQTGGFSKESILPKRNSDKLIARKKDWDPKKYGGFDSPTVAYSVLVVAKVEKGKSKKLKSVKELLGITIMERSSFEKNPIDFLEAKGYKEVKKDLIIKLPKYSLFELENGRKRMLASAGELQKGNELALPSKYVNFLYLASHYEKLKGSPEDNEQKQLFVEQHKHYLDEIIEQISEFSKRVILADANLDKVLSAYNKHRDKPIREQAENIIHLFTLTNLGAPAAFKYFDTTIDRKRYTSTKEVLDATLIHQSITGLYETRIDLSQLGGDGGGSSGSSGSSGSSGGVLNLEEEYRLHEKPVPSSIDPSWLQLFPTVWAERAGMGLANQVPPVVVELRSGASPVAVRQYPMSKEAREGIRPHIQRFLDLGVLVPCQSPWNTPLLPVKKPGTNDYRPVQDLREINKRVQDIHPTVPNPYNLLSSLPPSHTWYSVLDLKDAFFCLKLHPNSQPLFAFEWRDPEKGNTGQLTWTRLPQGFKNSPTLFNEALHRDLAPFRALNPQVVLLQYVDDLLVAAPTYRDCKEGTQKLLQELSKLGYRVSAKKAQLCQKEVTYLGYLLKEGKRWLTPARKATVMKIPPPTTPRQVREFLGTAGFCRLWIPGFASLAAPLYPLTKPSIPFIWTEEHQKAFDRIKEALLSAPALALPDLTKPFTLYVDERAGVARGVLTQTLGPWRRPVAYLSKKLDPVASGWPTCLKAVAAVALLLKDADKLTLGQNVTVIASHSLESIVRQPPDRWMTNARMTHYQSLLLNERVSFAPPAVLNPATLLPVESEATPVHRCSEILAEETGTRRDLKDQPLPGVPAWYTDGSSFIAEGKRRAGAAIVDGKRTVWASSLPEGTSAQKAELVALTQALRLAEGKDINIYTDSRYAFATAHIHGAIYKQRGWLTSAGKDIKNKEEILALLEAIHLPKRVAIIHCPGHQKGNDPVATGNRRADEAAKQAALSTRVLAETTKPAGKRTADGSEFEKRTADGSEFESPKKKAKVE

SEQ ID NO: 847 - protein, 2094 aa, synthetic construct
MPAAKRVKLDGGDKKYSIGLDIGTNSVGWAVITDEYKVPSKKFKVLGNTDRHSIKKNLIGALLFDSGETAEATRLKRTARRRYTRRKNRICYLQEIFSNEMAKVDDSFFHRLEESFLVEEDKKHERHPIFGNIVDEVAYHEKYPTIYHLRKKLVDSTDKADLRLIYLALAHMIKFRGHFLIEGDLNPDNSDVDKLFIQLVQTYNQLFEENPINASGVDAKAILSARLSKSRRLENLIAQLPGEKKNGLFGNLIALSLGLTPNFKSNFDLAEDAKLQLSKDTYDDDLDNLLAQIGDQYADLFLAAKNLSDAILLSDILRVNTEITKAPLSASMIKRYDEHHQDLTLLKALVRQQLPEKYKEIFFDQSKNGYAGYIDGGASQEEFYKFIKPILEKMDGTEELLVKLNREDLLRKQRTFDNGSIPHQIHLGELHAILRRQEDFYPFLKDNREKIEKILTFRIPYYVGPLARGNSRFAWMTRKSEETITPWNFEEVVDKGASAQSFIERMTNFDKNLPNEKVLPKHSLLYEYFTVYNELTKVKYVTEGMRKPAFLSGEQKKAIVDLLFKTNRKVTVKQLKEDYFKKIECFDSVEISGVEDRFNASLGTYHDLLKIIKDKDFLDNEENEDILEDIVLTLTLFEDREMIEERLKTYAHLFDDKVMKQLKRRRYTGWGRLSRKLINGIRDKQSGKTILDFLKSDGFANRNFMQLIHDDSLTFKEDIQKAQVSGQGDSLHEHIANLAGSPAIKKGILQTVKVVDELVKVMGRHKPENIVIEMARENQTTQKGQKNSRERMKRIEEGIKELGSQILKEHPVENTQLQNEKLYLYYLQNGRDMYVDQELDINRLSDYDVDHIVPQSFLKDDSIDNKVLTRSDKARGKSDNVPSEEVVKKMKNYWRQLLNAKLITQRKFDNLTKAERGGLSELDKAGFIKRQLVETRQITKHVAQILDSRMNTKYDENDKLIREVKVITLKSKLVSDFRKDFQFYKVREINNYHHAHDAYLNAVVGTALIKKYPKLESEFVYGDYKVYDVRKMIAKSEQEIGKATAKYFFYSNIMNFFKTEITLANGEIRKRPLIETNGETGEIVWDKGRDFATVRKVLSMPQVNIVKKTEVQTGGFSKESILPKRNSDKLIARKKDWDPKKYGGFDSPTVAYSVLVVAKVEKGKSKKLKSVKELLGITIMERSSFEKNPIDFLEAKGYKEVKKDLIIKLPKYSLFELENGRKRMLASAGELQKGNELALPSKYVNFLYLASHYEKLKGSPEDNEQKQLFVEQHKHYLDEIIEQISEFSKRVILADANLDKVLSAYNKHRDKPIREQAENIIHLFTLTNLGAPAAFKYFDTTIDRKRYTSTKEVLDATLIHQSITGLYETRIDLSQLGGDGGPAPGGSEAAAKGGVLNLEEEYRLHEKPVPSSIDPSWLQLFPTVWAERAGMGLANQVPPVVVELRSGASPVAVRQYPMSKEAREGIRPHIQRFLDLGVLVPCQSPWNTPLLPVKKPGTNDYRPVQDLREINKRVQDIHPTVPNPYNLLSSLPPSHTWYSVLDLKDAFFCLKLHPNSQPLFAFEWRDPEKGNTGQLTWTRLPQGFKNSPTLFNEALHRDLAPFRALNPQVVLLQYVDDLLVAAPTYRDCKEGTQKLLQELSKLGYRVSAKKAQLCQKEVTYLGYLLKEGKRWLTPARKATVMKIPPPTTPRQVREFLGTAGFCRLWIPGFASLAAPLYPLTKPSIPFIWTEEHQKAFDRIKEALLSAPALALPDLTKPFTLYVDERAGVARGVLTQTLGPWRRPVAYLSKKLDPVASGWPTCLKAVAAVALLLKDADKLTLGQNVTVIASHSLESIVRQPPDRWMTNARMTHYQSLLLNERVSFAPPAVLNPATLLPVESEATPVHRCSEILAEETGTRRDLKDQPLPGVPAWYTDGSSFIAEGKRRAGAAIVDGKRTVWASSLPEGTSAQKAELVALTQALRLAEGKDINIYTDSRYAFATAHIHGAIYKQRGWLTSAGKDIKNKEEILALLEAIHLPKRVAIIHCPGHQKGNDPVATGNRRADEAAKQAALSTRVLAETTKPAGKRTADGSEFEKRTADGSEFESPKKKAKVE

SEQ ID NO: 848 - protein, 2088 aa, synthetic construct
MPAAKRVKLDGGDKKYSIGLDIGTNSVGWAVITDEYKVPSKKFKVLGNTDRHSIKKNLIGALLFDSGETAEATRLKRTARRRYTRRKNRICYLQEIFSNEMAKVDDSFFHRLEESFLVEEDKKHERHPIFGNIVDEVAYHEKYPTIYHLRKKLVDSTDKADLRLIYLALAHMIKFRGHFLIEGDLNPDNSDVDKLFIQLVQTYNQLFEENPINASGVDAKAILSARLSKSRRLENLIAQLPGEKKNGLFGNLIALSLGLTPNFKSNFDLAEDAKLQLSKDTYDDDLDNLLAQIGDQYADLFLAAKNLSDAILLSDILRVNTEITKAPLSASMIKRYDEHHQDLTLLKALVRQQLPEKYKEIFFDQSKNGYAGYIDGGASQEEFYKFIKPILEKMDGTEELLVKLNREDLLRKQRTFDNGSIPHQIHLGELHAILRRQEDFYPFLKDNREKIEKILTFRIPYYVGPLARGNSRFAWMTRKSEETITPWNFEEVVDKGASAQSFIERMTNFDKNLPNEKVLPKHSLLYEYFTVYNELTKVKYVTEGMRKPAFLSGEQKKAIVDLLFKTNRKVTVKQLKEDYFKKIECFDSVEISGVEDRFNASLGTYHDLLKIIKDKDFLDNEENEDILEDIVLTLTLFEDREMIEERLKTYAHLFDDKVMKQLKRRRYTGWGRLSRKLINGIRDKQSGKTILDFLKSDGFANRNFMQLIHDDSLTFKEDIQKAQVSGQGDSLHEHIANLAGSPAIKKGILQTVKVVDELVKVMGRHKPENIVIEMARENQTTQKGQKNSRERMKRIEEGIKELGSQILKEHPVENTQLQNEKLYLYYLQNGRDMYVDQELDINRLSDYDVDHIVPQSFLKDDSIDNKVLTRSDKARGKSDNVPSEEVVKKMKNYWRQLLNAKLITQRKFDNLTKAERGGLSELDKAGFIKRQLVETRQITKHVAQILDSRMNTKYDENDKLIREVKVITLKSKLVSDFRKDFQFYKVREINNYHHAHDAYLNAVVGTALIKKYPKLESEFVYGDYKVYDVRKMIAKSEQEIGKATAKYFFYSNIMNFFKTEITLANGEIRKRPLIETNGETGEIVWDKGRDFATVRKVLSMPQVNIVKKTEVQTGGFSKESILPKRNSDKLIARKKDWDPKKYGGFDSPTVAYSVLVVAKVEKGKSKKLKSVKELLGITIMERSSFEKNPIDFLEAKGYKEVKKDLIIKLPKYSLFELENGRKRMLASAGELQKGNELALPSKYVNFLYLASHYEKLKGSPEDNEQKQLFVEQHKHYLDEIIEQISEFSKRVILADANLDKVLSAYNKHRDKPIREQAENIIHLFTLTNLGAPAAFKYFDTTIDRKRYTSTKEVLDATLIHQSITGLYETRIDLSQLGGDGGPAPAPGGVLNLEEEYRLHEKPVPSSIDPSWLQLFPTVWAERAGMGLANQVPPVVVELRSGASPVAVRQYPMSKEAREGIRPHIQRFLDLGVLVPCQSPWNTPLLPVKKPGTNDYRPVQDLREINKRVQDIHPTVPNPYNLLSSLPPSHTWYSVLDLKDAFFCLKLHPNSQPLFAFEWRDPEKGNTGQLTWTRLPQGFKNSPTLFNEALHRDLAPFRALNPQVVLLQYVDDLLVAAPTYRDCKEGTQKLLQELSKLGYRVSAKKAQLCQKEVTYLGYLLKEGKRWLTPARKATVMKIPPPTTPRQVREFLGTAGFCRLWIPGFASLAAPLYPLTKPSIPFIWTEEHQKAFDRIKEALLSAPALALPDLTKPFTLYVDERAGVARGVLTQTLGPWRRPVAYLSKKLDPVASGWPTCLKAVAAVALLLKDADKLTLGQNVTVIASHSLESIVRQPPDRWMTNARMTHYQSLLLNERVSFAPPAVLNPATLLPVESEATPVHRCSEILAEETGTRRDLKDQPLPGVPAWYTDGSSFIAEGKRRAGAAIVDGKRTVWASSLPEGTSAQKAELVALTQALRLAEGKDINIYTDSRYAFATAHIHGAIYKQRGWLTSAGKDIKNKEEILALLEAIHLPKRVAIIHCPGHQKGNDPVATGNRRADEAAKQAALSTRVLAETTKPAGKRTADGSEFEKRTADGSEFESPKKKAKVE

SEQ ID NO: 849 - protein, 2092 aa, synthetic construct
MPAAKRVKLDGGDKKYSIGLDIGTNSVGWAVITDEYKVPSKKFKVLGNTDRHSIKKNLIGALLFDSGETAEATRLKRTARRRYTRRKNRICYLQEIFSNEMAKVDDSFFHRLEESFLVEEDKKHERHPIFGNIVDEVAYHEKYPTIYHLRKKLVDSTDKADLRLIYLALAHMIKFRGHFLIEGDLNPDNSDVDKLFIQLVQTYNQLFEENPINASGVDAKAILSARLSKSRRLENLIAQLPGEKKNGLFGNLIALSLGLTPNFKSNFDLAEDAKLQLSKDTYDDDLDNLLAQIGDQYADLFLAAKNLSDAILLSDILRVNTEITKAPLSASMIKRYDEHHQDLTLLKALVRQQLPEKYKEIFFDQSKNGYAGYIDGGASQEEFYKFIKPILEKMDGTEELLVKLNREDLLRKQRTFDNGSIPHQIHLGELHAILRRQEDFYPFLKDNREKIEKILTFRIPYYVGPLARGNSRFAWMTRKSEETITPWNFEEVVDKGASAQSFIERMTNFDKNLPNEKVLPKHSLLYEYFTVYNELTKVKYVTEGMRKPAFLSGEQKKAIVDLLFKTNRKVTVKQLKEDYFKKIECFDSVEISGVEDRFNASLGTYHDLLKIIKDKDFLDNEENEDILEDIVLTLTLFEDREMIEERLKTYAHLFDDKVMKQLKRRRYTGWGRLSRKLINGIRDKQSGKTILDFLKSDGFANRNFMQLIHDDSLTFKEDIQKAQVSGQGDSLHEHIANLAGSPAIKKGILQTVKVVDELVKVMGRHKPENIVIEMARENQTTQKGQKNSRERMKRIEEGIKELGSQILKEHPVENTQLQNEKLYLYYLQNGRDMYVDQELDINRLSDYDVDHIVPQSFLKDDSIDNKVLTRSDKARGKSDNVPSEEVVKKMKNYWRQLLNAKLITQRKFDNLTKAERGGLSELDKAGFIKRQLVETRQITKHVAQILDSRMNTKYDENDKLIREVKVITLKSKLVSDFRKDFQFYKVREINNYHHAHDAYLNAVVGTALIKKYPKLESEFVYGDYKVYDVRKMIAKSEQEIGKATAKYFFYSNIMNFFKTEITLANGEIRKRPLIETNGETGEIVWDKGRDFATVRKVLSMPQVNIVKKTEVQTGGFSKESILPKRNSDKLIARKKDWDPKKYGGFDSPTVAYSVLVVAKVEKGKSKKLKSVKELLGITIMERSSFEKNPIDFLEAKGYKEVKKDLIIKLPKYSLFELENGRKRMLASAGELQKGNELALPSKYVNFLYLASHYEKLKGSPEDNEQKQLFVEQHKHYLDEIIEQISEFSKRVILADANLDKVLSAYNKHRDKPIREQAENIIHLFTLTNLGAPAAFKYFDTTIDRKRYTSTKEVLDATLIHQSITGLYETRIDLSQLGGDGGGSSGGGGGSGGVLNLEEEYRLHEKPVPSSIDPSWLQLFPTVWAERAGMGLANQVPPVVVELRSGASPVAVRQYPMSKEAREGIRPHIQRFLDLGVLVPCQSPWNTPLLPVKKPGTNDYRPVQDLREINKRVQDIHPTVPNPYNLLSSLPPSHTWYSVLDLKDAFFCLKLHPNSQPLFAFEWRDPEKGNTGQLTWTRLPQGFKNSPTLFNEALHRDLAPFRALNPQVVLLQYVDDLLVAAPTYRDCKEGTQKLLQELSKLGYRVSAKKAQLCQKEVTYLGYLLKEGKRWLTPARKATVMKIPPPTTPRQVREFLGTAGFCRLWIPGFASLAAPLYPLTKPSIPFIWTEEHQKAFDRIKEALLSAPALALPDLTKPFTLYVDERAGVARGVLTQTLGPWRRPVAYLSKKLDPVASGWPTCLKAVAAVALLLKDADKLTLGQNVTVIASHSLESIVRQPPDRWMTNARMTHYQSLLLNERVSFAPPAVLNPATLLPVESEATPVHRCSEILAEETGTRRDLKDQPLPGVPAWYTDGSSFIAEGKRRAGAAIVDGKRTVWASSLPEGTSAQKAELVALTQALRLAEGKDINIYTDSRYAFATAHIHGAIYKQRGWLTSAGKDIKNKEEILALLEAIHLPKRVAIIHCPGHQKGNDPVATGNRRADEAAKQAALSTRVLAETTKPAGKRTADGSEFEKRTADGSEFESPKKKAKVE

SEQ ID NO: 850 - protein, 2092 aa, synthetic construct
MPAAKRVKLDGGDKKYSIGLDIGTNSVGWAVITDEYKVPSKKFKVLGNTDRHSIKKNLIGALLFDSGETAEATRLKRTARRRYTRRKNRICYLQEIFSNEMAKVDDSFFHRLEESFLVEEDKKHERHPIFGNIVDEVAYHEKYPTIYHLRKKLVDSTDKADLRLIYLALAHMIKFRGHFLIEGDLNPDNSDVDKLFIQLVQTYNQLFEENPINASGVDAKAILSARLSKSRRLENLIAQLPGEKKNGLFGNLIALSLGLTPNFKSNFDLAEDAKLQLSKDTYDDDLDNLLAQIGDQYADLFLAAKNLSDAILLSDILRVNTEITKAPLSASMIKRYDEHHQDLTLLKALVRQQLPEKYKEIFFDQSKNGYAGYIDGGASQEEFYKFIKPILEKMDGTEELLVKLNREDLLRKQRTFDNGSIPHQIHLGELHAILRRQEDFYPFLKDNREKIEKILTFRIPYYVGPLARGNSRFAWMTRKSEETITPWNFEEVVDKGASAQSFIERMTNFDKNLPNEKVLPKHSLLYEYFTVYNELTKVKYVTEGMRKPAFLSGEQKKAIVDLLFKTNRKVTVKQLKEDYFKKIECFDSVEISGVEDRFNASLGTYHDLLKIIKDKDFLDNEENEDILEDIVLTLTLFEDREMIEERLKTYAHLFDDKVMKQLKRRRYTGWGRLSRKLINGIRDKQSGKTILDFLKSDGFANRNFMQLIHDDSLTFKEDIQKAQVSGQGDSLHEHIANLAGSPAIKKGILQTVKVVDELVKVMGRHKPENIVIEMARENQTTQKGQKNSRERMKRIEEGIKELGSQILKEHPVENTQLQNEKLYLYYLQNGRDMYVDQELDINRLSDYDVDHIVPQSFLKDDSIDNKVLTRSDKARGKSDNVPSEEVVKKMKNYWRQLLNAKLITQRKFDNLTKAERGGLSELDKAGFIKRQLVETRQITKHVAQILDSRMNTKYDENDKLIREVKVITLKSKLVSDFRKDFQFYKVREINNYHHAHDAYLNAVVGTALIKKYPKLESEFVYGDYKVYDVRKMIAKSEQEIGKATAKYFFYSNIMNFFKTEITLANGEIRKRPLIETNGETGEIVWDKGRDFATVRKVLSMPQVNIVKKTEVQTGGFSKESILPKRNSDKLIARKKDWDPKKYGGFDSPTVAYSVLVVAKVEKGKSKKLKSVKELLGITIMERSSFEKNPIDFLEAKGYKEVKKDLIIKLPKYSLFELENGRKRMLASAGELQKGNELALPSKYVNFLYLASHYEKLKGSPEDNEQKQLFVEQHKHYLDEIIEQISEFSKRVILADANLDKVLSAYNKHRDKPIREQAENIIHLFTLTNLGAPAAFKYFDTTIDRKRYTSTKEVLDATLIHQSITGLYETRIDLSQLGGDGGGGSGGSGGSGGVLNLEEEYRLHEKPVPSSIDPSWLQLFPTVWAERAGMGLANQVPPVVVELRSGASPVAVRQYPMSKEAREGIRPHIQRFLDLGVLVPCQSPWNTPLLPVKKPGTNDYRPVQDLREINKRVQDIHPTVPNPYNLLSSLPPSHTWYSVLDLKDAFFCLKLHPNSQPLFAFEWRDPEKGNTGQLTWTRLPQGFKNSPTLFNEALHRDLAPFRALNPQVVLLQYVDDLLVAAPTYRDCKEGTQKLLQELSKLGYRVSAKKAQLCQKEVTYLGYLLKEGKRWLTPARKATVMKIPPPTTPRQVREFLGTAGFCRLWIPGFASLAAPLYPLTKPSIPFIWTEEHQKAFDRIKEALLSAPALALPDLTKPFTLYVDERAGVARGVLTQTLGPWRRPVAYLSKKLDPVASGWPTCLKAVAAVALLLKDADKLTLGQNVTVIASHSLESIVRQPPDRWMTNARMTHYQSLLLNERVSFAPPAVLNPATLLPVESEATPVHRCSEILAEETGTRRDLKDQPLPGVPAWYTDGSSFIAEGKRRAGAAIVDGKRTVWASSLPEGTSAQKAELVALTQALRLAEGKDINIYTDSRYAFATAHIHGAIYKQRGWLTSAGKDIKNKEEILALLEAIHLPKRVAIIHCPGHQKGNDPVATGNRRADEAAKQAALSTRVLAETTKPAGKRTADGSEFEKRTADGSEFESPKKKAKVE

SEQ ID NO: 851 - protein, 2086 aa, synthetic construct
MPAAKRVKLDGGDKKYSIGLDIGTNSVGWAVITDEYKVPSKKFKVLGNTDRHSIKKNLIGALLFDSGETAEATRLKRTARRRYTRRKNRICYLQEIFSNEMAKVDDSFFHRLEESFLVEEDKKHERHPIFGNIVDEVAYHEKYPTIYHLRKKLVDSTDKADLRLIYLALAHMIKFRGHFLIEGDLNPDNSDVDKLFIQLVQTYNQLFEENPINASGVDAKAILSARLSKSRRLENLIAQLPGEKKNGLFGNLIALSLGLTPNFKSNFDLAEDAKLQLSKDTYDDDLDNLLAQIGDQYADLFLAAKNLSDAILLSDILRVNTEITKAPLSASMIKRYDEHHQDLTLLKALVRQQLPEKYKEIFFDQSKNGYAGYIDGGASQEEFYKFIKPILEKMDGTEELLVKLNREDLLRKQRTFDNGSIPHQIHLGELHAILRRQEDFYPFLKDNREKIEKILTFRIPYYVGPLARGNSRFAWMTRKSEETITPWNFEEVVDKGASAQSFIERMTNFDKNLPNEKVLPKHSLLYEYFTVYNELTKVKYVTEGMRKPAFLSGEQKKAIVDLLFKTNRKVTVKQLKEDYFKKIECFDSVEISGVEDRFNASLGTYHDLLKIIKDKDFLDNEENEDILEDIVLTLTLFEDREMIEERLKTYAHLFDDKVMKQLKRRRYTGWGRLSRKLINGIRDKQSGKTILDFLKSDGFANRNFMQLIHDDSLTFKEDIQKAQVSGQGDSLHEHIANLAGSPAIKKGILQTVKVVDELVKVMGRHKPENIVIEMARENQTTQKGQKNSRERMKRIEEGIKELGSQILKEHPVENTQLQNEKLYLYYLQNGRDMYVDQELDINRLSDYDVDHIVPQSFLKDDSIDNKVLTRSDKARGKSDNVPSEEVVKKMKNYWRQLLNAKLITQRKFDNLTKAERGGLSELDKAGFIKRQLVETRQITKHVAQILDSRMNTKYDENDKLIREVKVITLKSKLVSDFRKDFQFYKVREINNYHHAHDAYLNAVVGTALIKKYPKLESEFVYGDYKVYDVRKMIAKSEQEIGKATAKYFFYSNIMNFFKTEITLANGEIRKRPLIETNGETGEIVWDKGRDFATVRKVLSMPQVNIVKKTEVQTGGFSKESILPKRNSDKLIARKKDWDPKKYGGFDSPTVAYSVLVVAKVEKGKSKKLKSVKELLGITIMERSSFEKNPIDFLEAKGYKEVKKDLIIKLPKYSLFELENGRKRMLASAGELQKGNELALPSKYVNFLYLASHYEKLKGSPEDNEQKQLFVEQHKHYLDEIIEQISEFSKRVILADANLDKVLSAYNKHRDKPIREQAENIIHLFTLTNLGAPAAFKYFDTTIDRKRYTSTKEVLDATLIHQSITGLYETRIDLSQLGGDGGGGSGGVLNLEEEYRLHEKPVPSSIDPSWLQLFPTVWAERAGMGLANQVPPVVVELRSGASPVAVRQYPMSKEAREGIRPHIQRFLDLGVLVPCQSPWNTPLLPVKKPGTNDYRPVQDLREINKRVQDIHPTVPNPYNLLSSLPPSHTWYSVLDLKDAFFCLKLHPNSQPLFAFEWRDPEKGNTGQLTWTRLPQGFKNSPTLFNEALHRDLAPFRALNPQVVLLQYVDDLLVAAPTYRDCKEGTQKLLQELSKLGYRVSAKKAQLCQKEVTYLGYLLKEGKRWLTPARKATVMKIPPPTTPRQVREFLGTAGFCRLWIPGFASLAAPLYPLTKPSIPFIWTEEHQKAFDRIKEALLSAPALALPDLTKPFTLYVDERAGVARGVLTQTLGPWRRPVAYLSKKLDPVASGWPTCLKAVAAVALLLKDADKLTLGQNVTVIASHSLESIVRQPPDRWMTNARMTHYQSLLLNERVSFAPPAVLNPATLLPVESEATPVHRCSEILAEETGTRRDLKDQPLPGVPAWYTDGSSFIAEGKRRAGAAIVDGKRTVWASSLPEGTSAQKAELVALTQALRLAEGKDINIYTDSRYAFATAHIHGAIYKQRGWLTSAGKDIKNKEEILALLEAIHLPKRVAIIHCPGHQKGNDPVATGNRRADEAAKQAALSTRVLAETTKPAGKRTADGSEFEKRTADGSEFESPKKKAKVE

SEQ ID NO: 852 - protein, 2091 aa, synthetic construct
MPAAKRVKLDGGDKKYSIGLDIGTNSVGWAVITDEYKVPSKKFKVLGNTDRHSIKKNLIGALLFDSGETAEATRLKRTARRRYTRRKNRICYLQEIFSNEMAKVDDSFFHRLEESFLVEEDKKHERHPIFGNIVDEVAYHEKYPTIYHLRKKLVDSTDKADLRLIYLALAHMIKFRGHFLIEGDLNPDNSDVDKLFIQLVQTYNQLFEENPINASGVDAKAILSARLSKSRRLENLIAQLPGEKKNGLFGNLIALSLGLTPNFKSNFDLAEDAKLQLSKDTYDDDLDNLLAQIGDQYADLFLAAKNLSDAILLSDILRVNTEITKAPLSASMIKRYDEHHQDLTLLKALVRQQLPEKYKEIFFDQSKNGYAGYIDGGASQEEFYKFIKPILEKMDGTEELLVKLNREDLLRKQRTFDNGSIPHQIHLGELHAILRRQEDFYPFLKDNREKIEKILTFRIPYYVGPLARGNSRFAWMTRKSEETITPWNFEEVVDKGASAQSFIERMTNFDKNLPNEKVLPKHSLLYEYFTVYNELTKVKYVTEGMRKPAFLSGEQKKAIVDLLFKTNRKVTVKQLKEDYFKKIECFDSVEISGVEDRFNASLGTYHDLLKIIKDKDFLDNEENEDILEDIVLTLTLFEDREMIEERLKTYAHLFDDKVMKQLKRRRYTGWGRLSRKLINGIRDKQSGKTILDFLKSDGFANRNFMQLIHDDSLTFKEDIQKAQVSGQGDSLHEHIANLAGSPAIKKGILQTVKVVDELVKVMGRHKPENIVIEMARENQTTQKGQKNSRERMKRIEEGIKELGSQILKEHPVENTQLQNEKLYLYYLQNGRDMYVDQELDINRLSDYDVDHIVPQSFLKDDSIDNKVLTRSDKARGKSDNVPSEEVVKKMKNYWRQLLNAKLITQRKFDNLTKAERGGLSELDKAGFIKRQLVETRQITKHVAQILDSRMNTKYDENDKLIREVKVITLKSKLVSDFRKDFQFYKVREINNYHHAHDAYLNAVVGTALIKKYPKLESEFVYGDYKVYDVRKMIAKSEQEIGKATAKYFFYSNIMNFFKTEITLANGEIRKRPLIETNGETGEIVWDKGRDFATVRKVLSMPQVNIVKKTEVQTGGFSKESILPKRNSDKLIARKKDWDPKKYGGFDSPTVAYSVLVVAKVEKGKSKKLKSVKELLGITIMERSSFEKNPIDFLEAKGYKEVKKDLIIKLPKYSLFELENGRKRMLASAGELQKGNELALPSKYVNFLYLASHYEKLKGSPEDNEQKQLFVEQHKHYLDEIIEQISEFSKRVILADANLDKVLSAYNKHRDKPIREQAENIIHLFTLTNLGAPAAFKYFDTTIDRKRYTSTKEVLDATLIHQSITGLYETRIDLSQLGGDGGGGSEAAAKGGVLNLEEEYRLHEKPVPSSIDPSWLQLFPTVWAERAGMGLANQVPPVVVELRSGASPVAVRQYPMSKEAREGIRPHIQRFLDLGVLVPCQSPWNTPLLPVKKPGTNDYRPVQDLREINKRVQDIHPTVPNPYNLLSSLPPSHTWYSVLDLKDAFFCLKLHPNSQPLFAFEWRDPEKGNTGQLTWTRLPQGFKNSPTLFNEALHRDLAPFRALNPQVVLLQYVDDLLVAAPTYRDCKEGTQKLLQELSKLGYRVSAKKAQLCQKEVTYLGYLLKEGKRWLTPARKATVMKIPPPTTPRQVREFLGTAGFCRLWIPGFASLAAPLYPLTKPSIPFIWTEEHQKAFDRIKEALLSAPALALPDLTKPFTLYVDERAGVARGVLTQTLGPWRRPVAYLSKKLDPVASGWPTCLKAVAAVALLLKDADKLTLGQNVTVIASHSLESIVRQPPDRWMTNARMTHYQSLLLNERVSFAPPAVLNPATLLPVESEATPVHRCSEILAEETGTRRDLKDQPLPGVPAWYTDGSSFIAEGKRRAGAAIVDGKRTVWASSLPEGTSAQKAELVALTQALRLAEGKDINIYTDSRYAFATAHIHGAIYKQRGWLTSAGKDIKNKEEILALLEAIHLPKRVAIIHCPGHQKGNDPVATGNRRADEAAKQAALSTRVLAETTKPAGKRTADGSEFEKRTADGSEFESPKKKAKVE

SEQ ID NO: 853 - protein, 2094 aa, synthetic construct
MPAAKRVKLDGGDKKYSIGLDIGTNSVGWAVITDEYKVPSKKFKVLGNTDRHSIKKNLIGALLFDSGETAEATRLKRTARRRYTRRKNRICYLQEIFSNEMAKVDDSFFHRLEESFLVEEDKKHERHPIFGNIVDEVAYHEKYPTIYHLRKKLVDSTDKADLRLIYLALAHMIKFRGHFLIEGDLNPDNSDVDKLFIQLVQTYNQLFEENPINASGVDAKAILSARLSKSRRLENLIAQLPGEKKNGLFGNLIALSLGLTPNFKSNFDLAEDAKLQLSKDTYDDDLDNLLAQIGDQYADLFLAAKNLSDAILLSDILRVNTEITKAPLSASMIKRYDEHHQDLTLLKALVRQQLPEKYKEIFFDQSKNGYAGYIDGGASQEEFYKFIKPILEKMDGTEELLVKLNREDLLRKQRTFDNGSIPHQIHLGELHAILRRQEDFYPFLKDNREKIEKILTFRIPYYVGPLARGNSRFAWMTRKSEETITPWNFEEVVDKGASAQSFIERMTNFDKNLPNEKVLPKHSLLYEYFTVYNELTKVKYVTEGMRKPAFLSGEQKKAIVDLLFKTNRKVTVKQLKEDYFKKIECFDSVEISGVEDRFNASLGTYHDLLKIIKDKDFLDNEENEDILEDIVLTLTLFEDREMIEERLKTYAHLFDDKVMKQLKRRRYTGWGRLSRKLINGIRDKQSGKTILDFLKSDGFANRNFMQLIHDDSLTFKEDIQKAQVSGQGDSLHEHIANLAGSPAIKKGILQTVKVVDELVKVMGRHKPENIVIEMARENQTTQKGQKNSRERMKRIEEGIKELGSQILKEHPVENTQLQNEKLYLYYLQNGRDMYVDQELDINRLSDYDVDHIVPQSFLKDDSIDNKVLTRSDKARGKSDNVPSEEVVKKMKNYWRQLLNAKLITQRKFDNLTKAERGGLSELDKAGFIKRQLVETRQITKHVAQILDSRMNTKYDENDKLIREVKVITLKSKLVSDFRKDFQFYKVREINNYHHAHDAYLNAVVGTALIKKYPKLESEFVYGDYKVYDVRKMIAKSEQEIGKATAKYFFYSNIMNFFKTEITLANGEIRKRPLIETNGETGEIVWDKGRDFATVRKVLSMPQVNIVKKTEVQTGGFSKESILPKRNSDKLIARKKDWDPKKYGGFDSPTVAYSVLVVAKVEKGKSKKLKSVKELLGITIMERSSFEKNPIDFLEAKGYKEVKKDLIIKLPKYSLFELENGRKRMLASAGELQKGNELALPSKYVNFLYLASHYEKLKGSPEDNEQKQLFVEQHKHYLDEIIEQISEFSKRVILADANLDKVLSAYNKHRDKPIREQAENIIHLFTLTNLGAPAAFKYFDTTIDRKRYTSTKEVLDATLIHQSITGLYETRIDLSQLGGDGGGSSEAAAKGGGGGVLNLEEEYRLHEKPVPSSIDPSWLQLFPTVWAERAGMGLANQVPPVVVELRSGASPVAVRQYPMSKEAREGIRPHIQRFLDLGVLVPCQSPWNTPLLPVKKPGTNDYRPVQDLREINKRVQDIHPTVPNPYNLLSSLPPSHTWYSVLDLKDAFFCLKLHPNSQPLFAFEWRDPEKGNTGQLTWTRLPQGFKNSPTLFNEALHRDLAPFRALNPQVVLLQYVDDLLVAAPTYRDCKEGTQKLLQELSKLGYRVSAKKAQLCQKEVTYLGYLLKEGKRWLTPARKATVMKIPPPTTPRQVREFLGTAGFCRLWIPGFASLAAPLYPLTKPSIPFIWTEEHQKAFDRIKEALLSAPALALPDLTKPFTLYVDERAGVARGVLTQTLGPWRRPVAYLSKKLDPVASGWPTCLKAVAAVALLLKDADKLTLGQNVTVIASHSLESIVRQPPDRWMTNARMTHYQSLLLNERVSFAPPAVLNPATLLPVESEATPVHRCSEILAEETGTRRDLKDQPLPGVPAWYTDGSSFIAEGKRRAGAAIVDGKRTVWASSLPEGTSAQKAELVALTQALRLAEGKDINIYTDSRYAFATAHIHGAIYKQRGWLTSAGKDIKNKEEILALLEAIHLPKRVAIIHCPGHQKGNDPVATGNRRADEAAKQAALSTRVLAETTKPAGKRTADGSEFEKRTADGSEFESPKKKAKVE

SEQ ID NO: 854 - protein, 2094 aa, synthetic construct
MPAAKRVKLDGGDKKYSIGLDIGTNSVGWAVITDEYKVPSKKFKVLGNTDRHSIKKNLIGALLFDSGETAEATRLKRTARRRYTRRKNRICYLQEIFSNEMAKVDDSFFHRLEESFLVEEDKKHERHPIFGNIVDEVAYHEKYPTIYHLRKKLVDSTDKADLRLIYLALAHMIKFRGHFLIEGDLNPDNSDVDKLFIQLVQTYNQLFEENPINASGVDAKAILSARLSKSRRLENLIAQLPGEKKNGLFGNLIALSLGLTPNFKSNFDLAEDAKLQLSKDTYDDDLDNLLAQIGDQYADLFLAAKNLSDAILLSDILRVNTEITKAPLSASMIKRYDEHHQDLTLLKALVRQQLPEKYKEIFFDQSKNGYAGYIDGGASQEEFYKFIKPILEKMDGTEELLVKLNREDLLRKQRTFDNGSIPHQIHLGELHAILRRQEDFYPFLKDNREKIEKILTFRIPYYVGPLARGNSRFAWMTRKSEETITPWNFEEVVDKGASAQSFIERMTNFDKNLPNEKVLPKHSLLYEYFTVYNELTKVKYVTEGMRKPAFLSGEQKKAIVDLLFKTNRKVTVKQLKEDYFKKIECFDSVEISGVEDRFNASLGTYHDLLKIIKDKDFLDNEENEDILEDIVLTLTLFEDREMIEERLKTYAHLFDDKVMKQLKRRRYTGWGRLSRKLINGIRDKQSGKTILDFLKSDGFANRNFMQLIHDDSLTFKEDIQKAQVSGQGDSLHEHIANLAGSPAIKKGILQTVKVVDELVKVMGRHKPENIVIEMARENQTTQKGQKNSRERMKRIEEGIKELGSQILKEHPVENTQLQNEKLYLYYLQNGRDMYVDQELDINRLSDYDVDHIVPQSFLKDDSIDNKVLTRSDKARGKSDNVPSEEVVKKMKNYWRQLLNAKLITQRKFDNLTKAERGGLSELDKAGFIKRQLVETRQITKHVAQILDSRMNTKYDENDKLIREVKVITLKSKLVSDFRKDFQFYKVREINNYHHAHDAYLNAVVGTALIKKYPKLESEFVYGDYKVYDVRKMIAKSEQEIGKATAKYFFYSNIMNFFKTEITLANGEIRKRPLIETNGETGEIVWDKGRDFATVRKVLSMPQVNIVKKTEVQTGGFSKESILPKRNSDKLIARKKDWDPKKYGGFDSPTVAYSVLVVAKVEKGKSKKLKSVKELLGITIMERSSFEKNPIDFLEAKGYKEVKKDLIIKLPKYSLFELENGRKRMLASAGELQKGNELALPSKYVNFLYLASHYEKLKGSPEDNEQKQLFVEQHKHYLDEIIEQISEFSKRVILADANLDKVLSAYNKHRDKPIREQAENIIHLFTLTNLGAPAAFKYFDTTIDRKRYTSTKEVLDATLIHQSITGLYETRIDLSQLGGDGGGGSEAAAKGGGGGVLNLEEEYRLHEKPVPSSIDPSWLQLFPTVWAERAGMGLANQVPPVVVELRSGASPVAVRQYPMSKEAREGIRPHIQRFLDLGVLVPCQSPWNTPLLPVKKPGTNDYRPVQDLREINKRVQDIHPTVPNPYNLLSSLPPSHTWYSVLDLKDAFFCLKLHPNSQPLFAFEWRDPEKGNTGQLTWTRLPQGFKNSPTLFNEALHRDLAPFRALNPQVVLLQYVDDLLVAAPTYRDCKEGTQKLLQELSKLGYRVSAKKAQLCQKEVTYLGYLLKEGKRWLTPARKATVMKIPPPTTPRQVREFLGTAGFCRLWIPGFASLAAPLYPLTKPSIPFIWTEEHQKAFDRIKEALLSAPALALPDLTKPFTLYVDERAGVARGVLTQTLGPWRRPVAYLSKKLDPVASGWPTCLKAVAAVALLLKDADKLTLGQNVTVIASHSLESIVRQPPDRWMTNARMTHYQSLLLNERVSFAPPAVLNPATLLPVESEATPVHRCSEILAEETGTRRDLKDQPLPGVPAWYTDGSSFIAEGKRRAGAAIVDGKRTVWASSLPEGTSAQKAELVALTQALRLAEGKDINIYTDSRYAFATAHIHGAIYKQRGWLTSAGKDIKNKEEILALLEAIHLPKRVAIIHCPGHQKGNDPVATGNRRADEAAKQAALSTRVLAETTKPAGKRTADGSEFEKRTADGSEFESPKKKAKVE

SEQ ID NO: 855 - protein, 2089 aa, synthetic construct
MPAAKRVKLDGGDKKYSIGLDIGTNSVGWAVITDEYKVPSKKFKVLGNTDRHSIKKNLIGALLFDSGETAEATRLKRTARRRYTRRKNRICYLQEIFSNEMAKVDDSFFHRLEESFLVEEDKKHERHPIFGNIVDEVAYHEKYPTIYHLRKKLVDSTDKADLRLIYLALAHMIKFRGHFLIEGDLNPDNSDVDKLFIQLVQTYNQLFEENPINASGVDAKAILSARLSKSRRLENLIAQLPGEKKNGLFGNLIALSLGLTPNFKSNFDLAEDAKLQLSKDTYDDDLDNLLAQIGDQYADLFLAAKNLSDAILLSDILRVNTEITKAPLSASMIKRYDEHHQDLTLLKALVRQQLPEKYKEIFFDQSKNGYAGYIDGGASQEEFYKFIKPILEKMDGTEELLVKLNREDLLRKQRTFDNGSIPHQIHLGELHAILRRQEDFYPFLKDNREKIEKILTFRIPYYVGPLARGNSRFAWMTRKSEETITPWNFEEVVDKGASAQSFIERMTNFDKNLPNEKVLPKHSLLYEYFTVYNELTKVKYVTEGMRKPAFLSGEQKKAIVDLLFKTNRKVTVKQLKEDYFKKIECFDSVEISGVEDRFNASLGTYHDLLKIIKDKDFLDNEENEDILEDIVLTLTLFEDREMIEERLKTYAHLFDDKVMKQLKRRRYTGWGRLSRKLINGIRDKQSGKTILDFLKSDGFANRNFMQLIHDDSLTFKEDIQKAQVSGQGDSLHEHIANLAGSPAIKKGILQTVKVVDELVKVMGRHKPENIVIEMARENQTTQKGQKNSRERMKRIEEGIKELGSQILKEHPVENTQLQNEKLYLYYLQNGRDMYVDQELDINRLSDYDVDHIVPQSFLKDDSIDNKVLTRSDKARGKSDNVPSEEVVKKMKNYWRQLLNAKLITQRKFDNLTKAERGGLSELDKAGFIKRQLVETRQITKHVAQILDSRMNTKYDENDKLIREVKVITLKSKLVSDFRKDFQFYKVREINNYHHAHDAYLNAVVGTALIKKYPKLESEFVYGDYKVYDVRKMIAKSEQEIGKATAKYFFYSNIMNFFKTEITLANGEIRKRPLIETNGETGEIVWDKGRDFATVRKVLSMPQVNIVKKTEVQTGGFSKESILPKRNSDKLIARKKDWDPKKYGGFDSPTVAYSVLVVAKVEKGKSKKLKSVKELLGITIMERSSFEKNPIDFLEAKGYKEVKKDLIIKLPKYSLFELENGRKRMLASAGELQKGNELALPSKYVNFLYLASHYEKLKGSPEDNEQKQLFVEQHKHYLDEIIEQISEFSKRVILADANLDKVLSAYNKHRDKPIREQAENIIHLFTLTNLGAPAAFKYFDTTIDRKRYTSTKEVLDATLIHQSITGLYETRIDLSQLGGDGGGGSGGGGGVLNLEEEYRLHEKPVPSSIDPSWLQLFPTVWAERAGMGLANQVPPVVVELRSGASPVAVRQYPMSKEAREGIRPHIQRFLDLGVLVPCQSPWNTPLLPVKKPGTNDYRPVQDLREINKRVQDIHPTVPNPYNLLSSLPPSHTWYSVLDLKDAFFCLKLHPNSQPLFAFEWRDPEKGNTGQLTWTRLPQGFKNSPTLFNEALHRDLAPFRALNPQVVLLQYVDDLLVAAPTYRDCKEGTQKLLQELSKLGYRVSAKKAQLCQKEVTYLGYLLKEGKRWLTPARKATVMKIPPPTTPRQVREFLGTAGFCRLWIPGFASLAAPLYPLTKPSIPFIWTEEHQKAFDRIKEALLSAPALALPDLTKPFTLYVDERAGVARGVLTQTLGPWRRPVAYLSKKLDPVASGWPTCLKAVAAVALLLKDADKLTLGQNVTVIASHSLESIVRQPPDRWMTNARMTHYQSLLLNERVSFAPPAVLNPATLLPVESEATPVHRCSEILAEETGTRRDLKDQPLPGVPAWYTDGSSFIAEGKRRAGAAIVDGKRTVWASSLPEGTSAQKAELVALTQALRLAEGKDINIYTDSRYAFATAHIHGAIYKQRGWLTSAGKDIKNKEEILALLEAIHLPKRVAIIHCPGHQKGNDPVATGNRRADEAAKQAALSTRVLAETTKPAGKRTADGSEFEKRTADGSEFESPKKKAKVE

SEQ ID NO: 856 - protein, 2094 aa, synthetic construct
MPAAKRVKLDGGDKKYSIGLDIGTNSVGWAVITDEYKVPSKKFKVLGNTDRHSIKKNLIGALLFDSGETAEATRLKRTARRRYTRRKNRICYLQEIFSNEMAKVDDSFFHRLEESFLVEEDKKHERHPIFGNIVDEVAYHEKYPTIYHLRKKLVDSTDKADLRLIYLALAHMIKFRGHFLIEGDLNPDNSDVDKLFIQLVQTYNQLFEENPINASGVDAKAILSARLSKSRRLENLIAQLPGEKKNGLFGNLIALSLGLTPNFKSNFDLAEDAKLQLSKDTYDDDLDNLLAQIGDQYADLFLAAKNLSDAILLSDILRVNTEITKAPLSASMIKRYDEHHQDLTLLKALVRQQLPEKYKEIFFDQSKNGYAGYIDGGASQEEFYKFIKPILEKMDGTEELLVKLNREDLLRKQRTFDNGSIPHQIHLGELHAILRRQEDFYPFLKDNREKIEKILTFRIPYYVGPLARGNSRFAWMTRKSEETITPWNFEEVVDKGASAQSFIERMTNFDKNLPNEKVLPKHSLLYEYFTVYNELTKVKYVTEGMRKPAFLSGEQKKAIVDLLFKTNRKVTVKQLKEDYFKKIECFDSVEISGVEDRFNASLGTYHDLLKIIKDKDFLDNEENEDILEDIVLTLTLFEDREMIEERLKTYAHLFDDKVMKQLKRRRYTGWGRLSRKLINGIRDKQSGKTILDFLKSDGFANRNFMQLIHDDSLTFKEDIQKAQVSGQGDSLHEHIANLAGSPAIKKGILQTVKVVDELVKVMGRHKPENIVIEMARENQTTQKGQKNSRERMKRIEEGIKELGSQILKEHPVENTQLQNEKLYLYYLQNGRDMYVDQELDINRLSDYDVDHIVPQSFLKDDSIDNKVLTRSDKARGKSDNVPSEEVVKKMKNYWRQLLNAKLITQRKFDNLTKAERGGLSELDKAGFIKRQLVETRQITKHVAQILDSRMNTKYDENDKLIREVKVITLKSKLVSDFRKDFQFYKVREINNYHHAHDAYLNAVVGTALIKKYPKLESEFVYGDYKVYDVRKMIAKSEQEIGKATAKYFFYSNIMNFFKTEITLANGEIRKRPLIETNGETGEIVWDKGRDFATVRKVLSMPQVNIVKKTEVQTGGFSKESILPKRNSDKLIARKKDWDPKKYGGFDSPTVAYSVLVVAKVEKGKSKKLKSVKELLGITIMERSSFEKNPIDFLEAKGYKEVKKDLIIKLPKYSLFELENGRKRMLASAGELQKGNELALPSKYVNFLYLASHYEKLKGSPEDNEQKQLFVEQHKHYLDEIIEQISEFSKRVILADANLDKVLSAYNKHRDKPIREQAENIIHLFTLTNLGAPAAFKYFDTTIDRKRYTSTKEVLDATLIHQSITGLYETRIDLSQLGGDGGEAAAKPAPGGGGGVLNLEEEYRLHEKPVPSSIDPSWLQLFPTVWAERAGMGLANQVPPVVVELRSGASPVAVRQYPMSKEAREGIRPHIQRFLDLGVLVPCQSPWNTPLLPVKKPGTNDYRPVQDLREINKRVQDIHPTVPNPYNLLSSLPPSHTWYSVLDLKDAFFCLKLHPNSQPLFAFEWRDPEKGNTGQLTWTRLPQGFKNSPTLFNEALHRDLAPFRALNPQVVLLQYVDDLLVAAPTYRDCKEGTQKLLQELSKLGYRVSAKKAQLCQKEVTYLGYLLKEGKRWLTPARKATVMKIPPPTTPRQVREFLGTAGFCRLWIPGFASLAAPLYPLTKPSIPFIWTEEHQKAFDRIKEALLSAPALALPDLTKPFTLYVDERAGVARGVLTQTLGPWRRPVAYLSKKLDPVASGWPTCLKAVAAVALLLKDADKLTLGQNVTVIASHSLESIVRQPPDRWMTNARMTHYQSLLLNERVSFAPPAVLNPATLLPVESEATPVHRCSEILAEETGTRRDLKDQPLPGVPAWYTDGSSFIAEGKRRAGAAIVDGKRTVWASSLPEGTSAQKAELVALTQALRLAEGKDINIYTDSRYAFATAHIHGAIYKQRGWLTSAGKDIKNKEEILALLEAIHLPKRVAIIHCPGHQKGNDPVATGNRRADEAAKQAALSTRVLAETTKPAGKRTADGSEFEKRTADGSEFESPKKKAKVE

SEQ ID NO: 857 - protein, 2094 aa, synthetic construct
MPAAKRVKLDGGDKKYSIGLDIGTNSVGWAVITDEYKVPSKKFKVLGNTDRHSIKKNLIGALLFDSGETAEATRLKRTARRRYTRRKNRICYLQEIFSNEMAKVDDSFFHRLEESFLVEEDKKHERHPIFGNIVDEVAYHEKYPTIYHLRKKLVDSTDKADLRLIYLALAHMIKFRGHFLIEGDLNPDNSDVDKLFIQLVQTYNQLFEENPINASGVDAKAILSARLSKSRRLENLIAQLPGEKKNGLFGNLIALSLGLTPNFKSNFDLAEDAKLQLSKDTYDDDLDNLLAQIGDQYADLFLAAKNLSDAILLSDILRVNTEITKAPLSASMIKRYDEHHQDLTLLKALVRQQLPEKYKEIFFDQSKNGYAGYIDGGASQEEFYKFIKPILEKMDGTEELLVKLNREDLLRKQRTFDNGSIPHQIHLGELHAILRRQEDFYPFLKDNREKIEKILTFRIPYYVGPLARGNSRFAWMTRKSEETITPWNFEEVVDKGASAQSFIERMTNFDKNLPNEKVLPKHSLLYEYFTVYNELTKVKYVTEGMRKPAFLSGEQKKAIVDLLFKTNRKVTVKQLKEDYFKKIECFDSVEISGVEDRFNASLGTYHDLLKIIKDKDFLDNEENEDILEDIVLTLTLFEDREMIEERLKTYAHLFDDKVMKQLKRRRYTGWGRLSRKLINGIRDKQSGKTILDFLKSDGFANRNFMQLIHDDSLTFKEDIQKAQVSGQGDSLHEHIANLAGSPAIKKGILQTVKVVDELVKVMGRHKPENIVIEMARENQTTQKGQKNSRERMKRIEEGIKELGSQILKEHPVENTQLQNEKLYLYYLQNGRDMYVDQELDINRLSDYDVDHIVPQSFLKDDSIDNKVLTRSDKARGKSDNVPSEEVVKKMKNYWRQLLNAKLITQRKFDNLTKAERGGLSELDKAGFIKRQLVETRQITKHVAQILDSRMNTKYDENDKLIREVKVITLKSKLVSDFRKDFQFYKVREINNYHHAHDAYLNAVVGTALIKKYPKLESEFVYGDYKVYDVRKMIAKSEQEIGKATAKYFFYSNIMNFFKTEITLANGEIRKRPLIETNGETGEIVWDKGRDFATVRKVLSMPQVNIVKKTEVQTGGFSKESILPKRNSDKLIARKKDWDPKKYGGFDSPTVAYSVLVVAKVEKGKSKKLKSVKELLGITIMERSSFEKNPIDFLEAKGYKEVKKDLIIKLPKYSLFELENGRKRMLASAGELQKGNELALPSKYVNFLYLASHYEKLKGSPEDNEQKQLFVEQHKHYLDEIIEQISEFSKRVILADANLDKVLSAYNKHRDKPIREQAENIIHLFTLTNLGAPAAFKYFDTTIDRKRYTSTKEVLDATLIHQSITGLYETRIDLSQLGGDGGGSSEAAAKGGSGGVLNLEEEYRLHEKPVPSSIDPSWLQLFPTVWAERAGMGLANQVPPVVVELRSGASPVAVRQYPMSKEAREGIRPHIQRFLDLGVLVPCQSPWNTPLLPVKKPGTNDYRPVQDLREINKRVQDIHPTVPNPYNLLSSLPPSHTWYSVLDLKDAFFCLKLHPNSQPLFAFEWRDPEKGNTGQLTWTRLPQGFKNSPTLFNEALHRDLAPFRALNPQVVLLQYVDDLLVAAPTYRDCKEGTQKLLQELSKLGYRVSAKKAQLCQKEVTYLGYLLKEGKRWLTPARKATVMKIPPPTTPRQVREFLGTAGFCRLWIPGFASLAAPLYPLTKPSIPFIWTEEHQKAFDRIKEALLSAPALALPDLTKPFTLYVDERAGVARGVLTQTLGPWRRPVAYLSKKLDPVASGWPTCLKAVAAVALLLKDADKLTLGQNVTVIASHSLESIVRQPPDRWMTNARMTHYQSLLLNERVSFAPPAVLNPATLLPVESEATPVHRCSEILAEETGTRRDLKDQPLPGVPAWYTDGSSFIAEGKRRAGAAIVDGKRTVWASSLPEGTSAQKAELVALTQALRLAEGKDINIYTDSRYAFATAHIHGAIYKQRGWLTSAGKDIKNKEEILALLEAIHLPKRVAIIHCPGHQKGNDPVATGNRRADEAAKQAALSTRVLAETTKPAGKRTADGSEFEKRTADGSEFESPKKKAKVE

SEQ ID NO: 858 - protein, 2092 aa, synthetic construct
MPAAKRVKLDGGDKKYSIGLDIGTNSVGWAVITDEYKVPSKKFKVLGNTDRHSIKKNLIGALLFDSGETAEATRLKRTARRRYTRRKNRICYLQEIFSNEMAKVDDSFFHRLEESFLVEEDKKHERHPIFGNIVDEVAYHEKYPTIYHLRKKLVDSTDKADLRLIYLALAHMIKFRGHFLIEGDLNPDNSDVDKLFIQLVQTYNQLFEENPINASGVDAKAILSARLSKSRRLENLIAQLPGEKKNGLFGNLIALSLGLTPNFKSNFDLAEDAKLQLSKDTYDDDLDNLLAQIGDQYADLFLAAKNLSDAILLSDILRVNTEITKAPLSASMIKRYDEHHQDLTLLKALVRQQLPEKYKEIFFDQSKNGYAGYIDGGASQEEFYKFIKPILEKMDGTEELLVKLNREDLLRKQRTFDNGSIPHQIHLGELHAILRRQEDFYPFLKDNREKIEKILTFRIPYYVGPLARGNSRFAWMTRKSEETITPWNFEEVVDKGASAQSFIERMTNFDKNLPNEKVLPKHSLLYEYFTVYNELTKVKYVTEGMRKPAFLSGEQKKAIVDLLFKTNRKVTVKQLKEDYFKKIECFDSVEISGVEDRFNASLGTYHDLLKIIKDKDFLDNEENEDILEDIVLTLTLFEDREMIEERLKTYAHLFDDKVMKQLKRRRYTGWGRLSRKLINGIRDKQSGKTILDFLKSDGFANRNFMQLIHDDSLTFKEDIQKAQVSGQGDSLHEHIANLAGSPAIKKGILQTVKVVDELVKVMGRHKPENIVIEMARENQTTQKGQKNSRERMKRIEEGIKELGSQILKEHPVENTQLQNEKLYLYYLQNGRDMYVDQELDINRLSDYDVDHIVPQSFLKDDSIDNKVLTRSDKARGKSDNVPSEEVVKKMKNYWRQLLNAKLITQRKFDNLTKAERGGLSELDKAGFIKRQLVETRQITKHVAQILDSRMNTKYDENDKLIREVKVITLKSKLVSDFRKDFQFYKVREINNYHHAHDAYLNAVVGTALIKKYPKLESEFVYGDYKVYDVRKMIAKSEQEIGKATAKYFFYSNIMNFFKTEITLANGEIRKRPLIETNGETGEIVWDKGRDFATVRKVLSMPQVNIVKKTEVQTGGFSKESILPKRNSDKLIARKKDWDPKKYGGFDSPTVAYSVLVVAKVEKGKSKKLKSVKELLGITIMERSSFEKNPIDFLEAKGYKEVKKDLIIKLPKYSLFELENGRKRMLASAGELQKGNELALPSKYVNFLYLASHYEKLKGSPEDNEQKQLFVEQHKHYLDEIIEQISEFSKRVILADANLDKVLSAYNKHRDKPIREQAENIIHLFTLTNLGAPAAFKYFDTTIDRKRYTSTKEVLDATLIHQSITGLYETRIDLSQLGGDGGPAPGGSGGGGGVLNLEEEYRLHEKPVPSSIDPSWLQLFPTVWAERAGMGLANQVPPVVVELRSGASPVAVRQYPMSKEAREGIRPHIQRFLDLGVLVPCQSPWNTPLLPVKKPGTNDYRPVQDLREINKRVQDIHPTVPNPYNLLSSLPPSHTWYSVLDLKDAFFCLKLHPNSQPLFAFEWRDPEKGNTGQLTWTRLPQGFKNSPTLFNEALHRDLAPFRALNPQVVLLQYVDDLLVAAPTYRDCKEGTQKLLQELSKLGYRVSAKKAQLCQKEVTYLGYLLKEGKRWLTPARKATVMKIPPPTTPRQVREFLGTAGFCRLWIPGFASLAAPLYPLTKPSIPFIWTEEHQKAFDRIKEALLSAPALALPDLTKPFTLYVDERAGVARGVLTQTLGPWRRPVAYLSKKLDPVASGWPTCLKAVAAVALLLKDADKLTLGQNVTVIASHSLESIVRQPPDRWMTNARMTHYQSLLLNERVSFAPPAVLNPATLLPVESEATPVHRCSEILAEETGTRRDLKDQPLPGVPAWYTDGSSFIAEGKRRAGAAIVDGKRTVWASSLPEGTSAQKAELVALTQALRLAEGKDINIYTDSRYAFATAHIHGAIYKQRGWLTSAGKDIKNKEEILALLEAIHLPKRVAIIHCPGHQKGNDPVATGNRRADEAAKQAALSTRVLAETTKPAGKRTADGSEFEKRTADGSEFESPKKKAKVE

SEQ ID NO: 859 - protein, 2089 aa, synthetic construct
MPAAKRVKLDGGDKKYSIGLDIGTNSVGWAVITDEYKVPSKKFKVLGNTDRHSIKKNLIGALLFDSGETAEATRLKRTARRRYTRRKNRICYLQEIFSNEMAKVDDSFFHRLEESFLVEEDKKHERHPIFGNIVDEVAYHEKYPTIYHLRKKLVDSTDKADLRLIYLALAHMIKFRGHFLIEGDLNPDNSDVDKLFIQLVQTYNQLFEENPINASGVDAKAILSARLSKSRRLENLIAQLPGEKKNGLFGNLIALSLGLTPNFKSNFDLAEDAKLQLSKDTYDDDLDNLLAQIGDQYADLFLAAKNLSDAILLSDILRVNTEITKAPLSASMIKRYDEHHQDLTLLKALVRQQLPEKYKEIFFDQSKNGYAGYIDGGASQEEFYKFIKPILEKMDGTEELLVKLNREDLLRKQRTFDNGSIPHQIHLGELHAILRRQEDFYPFLKDNREKIEKILTFRIPYYVGPLARGNSRFAWMTRKSEETITPWNFEEVVDKGASAQSFIERMTNFDKNLPNEKVLPKHSLLYEYFTVYNELTKVKYVTEGMRKPAFLSGEQKKAIVDLLFKTNRKVTVKQLKEDYFKKIECFDSVEISGVEDRFNASLGTYHDLLKIIKDKDFLDNEENEDILEDIVLTLTLFEDREMIEERLKTYAHLFDDKVMKQLKRRRYTGWGRLSRKLINGIRDKQSGKTILDFLKSDGFANRNFMQLIHDDSLTFKEDIQKAQVSGQGDSLHEHIANLAGSPAIKKGILQTVKVVDELVKVMGRHKPENIVIEMARENQTTQKGQKNSRERMKRIEEGIKELGSQILKEHPVENTQLQNEKLYLYYLQNGRDMYVDQELDINRLSDYDVDHIVPQSFLKDDSIDNKVLTRSDKARGKSDNVPSEEVVKKMKNYWRQLLNAKLITQRKFDNLTKAERGGLSELDKAGFIKRQLVETRQITKHVAQILDSRMNTKYDENDKLIREVKVITLKSKLVSDFRKDFQFYKVREINNYHHAHDAYLNAVVGTALIKKYPKLESEFVYGDYKVYDVRKMIAKSEQEIGKATAKYFFYSNIMNFFKTEITLANGEIRKRPLIETNGETGEIVWDKGRDFATVRKVLSMPQVNIVKKTEVQTGGFSKESILPKRNSDKLIARKKDWDPKKYGGFDSPTVAYSVLVVAKVEKGKSKKLKSVKELLGITIMERSSFEKNPIDFLEAKGYKEVKKDLIIKLPKYSLFELENGRKRMLASAGELQKGNELALPSKYVNFLYLASHYEKLKGSPEDNEQKQLFVEQHKHYLDEIIEQISEFSKRVILADANLDKVLSAYNKHRDKPIREQAENIIHLFTLTNLGAPAAFKYFDTTIDRKRYTSTKEVLDATLIHQSITGLYETRIDLSQLGGDGGPAPGSSGGVLNLEEEYRLHEKPVPSSIDPSWLQLFPTVWAERAGMGLANQVPPVVVELRSGASPVAVRQYPMSKEAREGIRPHIQRFLDLGVLVPCQSPWNTPLLPVKKPGTNDYRPVQDLREINKRVQDIHPTVPNPYNLLSSLPPSHTWYSVLDLKDAFFCLKLHPNSQPLFAFEWRDPEKGNTGQLTWTRLPQGFKNSPTLFNEALHRDLAPFRALNPQVVLLQYVDDLLVAAPTYRDCKEGTQKLLQELSKLGYRVSAKKAQLCQKEVTYLGYLLKEGKRWLTPARKATVMKIPPPTTPRQVREFLGTAGFCRLWIPGFASLAAPLYPLTKPSIPFIWTEEHQKAFDRIKEALLSAPALALPDLTKPFTLYVDERAGVARGVLTQTLGPWRRPVAYLSKKLDPVASGWPTCLKAVAAVALLLKDADKLTLGQNVTVIASHSLESIVRQPPDRWMTNARMTHYQSLLLNERVSFAPPAVLNPATLLPVESEATPVHRCSEILAEETGTRRDLKDQPLPGVPAWYTDGSSFIAEGKRRAGAAIVDGKRTVWASSLPEGTSAQKAELVALTQALRLAEGKDINIYTDSRYAFATAHIHGAIYKQRGWLTSAGKDIKNKEEILALLEAIHLPKRVAIIHCPGHQKGNDPVATGNRRADEAAKQAALSTRVLAETTKPAGKRTADGSEFEKRTADGSEFESPKKKAKVE

SEQ ID NO: 860 - protein, 2090 aa, synthetic construct
MPAAKRVKLDGGDKKYSIGLDIGTNSVGWAVITDEYKVPSKKFKVLGNTDRHSIKKNLIGALLFDSGETAEATRLKRTARRRYTRRKNRICYLQEIFSNEMAKVDDSFFHRLEESFLVEEDKKHERHPIFGNIVDEVAYHEKYPTIYHLRKKLVDSTDKADLRLIYLALAHMIKFRGHFLIEGDLNPDNSDVDKLFIQLVQTYNQLFEENPINASGVDAKAILSARLSKSRRLENLIAQLPGEKKNGLFGNLIALSLGLTPNFKSNFDLAEDAKLQLSKDTYDDDLDNLLAQIGDQYADLFLAAKNLSDAILLSDILRVNTEITKAPLSASMIKRYDEHHQDLTLLKALVRQQLPEKYKEIFFDQSKNGYAGYIDGGASQEEFYKFIKPILEKMDGTEELLVKLNREDLLRKQRTFDNGSIPHQIHLGELHAILRRQEDFYPFLKDNREKIEKILTFRIPYYVGPLARGNSRFAWMTRKSEETITPWNFEEVVDKGASAQSFIERMTNFDKNLPNEKVLPKHSLLYEYFTVYNELTKVKYVTEGMRKPAFLSGEQKKAIVDLLFKTNRKVTVKQLKEDYFKKIECFDSVEISGVEDRFNASLGTYHDLLKIIKDKDFLDNEENEDILEDIVLTLTLFEDREMIEERLKTYAHLFDDKVMKQLKRRRYTGWGRLSRKLINGIRDKQSGKTILDFLKSDGFANRNFMQLIHDDSLTFKEDIQKAQVSGQGDSLHEHIANLAGSPAIKKGILQTVKVVDELVKVMGRHKPENIVIEMARENQTTQKGQKNSRERMKRIEEGIKELGSQILKEHPVENTQLQNEKLYLYYLQNGRDMYVDQELDINRLSDYDVDHIVPQSFLKDDSIDNKVLTRSDKARGKSDNVPSEEVVKKMKNYWRQLLNAKLITQRKFDNLTKAERGGLSELDKAGFIKRQLVETRQITKHVAQILDSRMNTKYDENDKLIREVKVITLKSKLVSDFRKDFQFYKVREINNYHHAHDAYLNAVVGTALIKKYPKLESEFVYGDYKVYDVRKMIAKSEQEIGKATAKYFFYSNIMNFFKTEITLANGEIRKRPLIETNGETGEIVWDKGRDFATVRKVLSMPQVNIVKKTEVQTGGFSKESILPKRNSDKLIARKKDWDPKKYGGFDSPTVAYSVLVVAKVEKGKSKKLKSVKELLGITIMERSSFEKNPIDFLEAKGYKEVKKDLIIKLPKYSLFELENGRKRMLASAGELQKGNELALPSKYVNFLYLASHYEKLKGSPEDNEQKQLFVEQHKHYLDEIIEQISEFSKRVILADANLDKVLSAYNKHRDKPIREQAENIIHLFTLTNLGAPAAFKYFDTTIDRKRYTSTKEVLDATLIHQSITGLYETRIDLSQLGGDGGPAPAPAPGGVLNLEEEYRLHEKPVPSSIDPSWLQLFPTVWAERAGMGLANQVPPVVVELRSGASPVAVRQYPMSKEAREGIRPHIQRFLDLGVLVPCQSPWNTPLLPVKKPGTNDYRPVQDLREINKRVQDIHPTVPNPYNLLSSLPPSHTWYSVLDLKDAFFCLKLHPNSQPLFAFEWRDPEKGNTGQLTWTRLPQGFKNSPTLFNEALHRDLAPFRALNPQVVLLQYVDDLLVAAPTYRDCKEGTQKLLQELSKLGYRVSAKKAQLCQKEVTYLGYLLKEGKRWLTPARKATVMKIPPPTTPRQVREFLGTAGFCRLWIPGFASLAAPLYPLTKPSIPFIWTEEHQKAFDRIKEALLSAPALALPDLTKPFTLYVDERAGVARGVLTQTLGPWRRPVAYLSKKLDPVASGWPTCLKAVAAVALLLKDADKLTLGQNVTVIASHSLESIVRQPPDRWMTNARMTHYQSLLLNERVSFAPPAVLNPATLLPVESEATPVHRCSEILAEETGTRRDLKDQPLPGVPAWYTDGSSFIAEGKRRAGAAIVDGKRTVWASSLPEGTSAQKAELVALTQALRLAEGKDINIYTDSRYAFATAHIHGAIYKQRGWLTSAGKDIKNKEEILALLEAIHLPKRVAIIHCPGHQKGNDPVATGNRRADEAAKQAALSTRVLAETTKPAGKRTADGSEFEKRTADGSEFESPKKKAKVE

SEQ ID NO: 861 - protein, 2094 aa, synthetic construct
MPAAKRVKLDGGDKKYSIGLDIGTNSVGWAVITDEYKVPSKKFKVLGNTDRHSIKKNLIGALLFDSGETAEATRLKRTARRRYTRRKNRICYLQEIFSNEMAKVDDSFFHRLEESFLVEEDKKHERHPIFGNIVDEVAYHEKYPTIYHLRKKLVDSTDKADLRLIYLALAHMIKFRGHFLIEGDLNPDNSDVDKLFIQLVQTYNQLFEENPINASGVDAKAILSARLSKSRRLENLIAQLPGEKKNGLFGNLIALSLGLTPNFKSNFDLAEDAKLQLSKDTYDDDLDNLLAQIGDQYADLFLAAKNLSDAILLSDILRVNTEITKAPLSASMIKRYDEHHQDLTLLKALVRQQLPEKYKEIFFDQSKNGYAGYIDGGASQEEFYKFIKPILEKMDGTEELLVKLNREDLLRKQRTFDNGSIPHQIHLGELHAILRRQEDFYPFLKDNREKIEKILTFRIPYYVGPLARGNSRFAWMTRKSEETITPWNFEEVVDKGASAQSFIERMTNFDKNLPNEKVLPKHSLLYEYFTVYNELTKVKYVTEGMRKPAFLSGEQKKAIVDLLFKTNRKVTVKQLKEDYFKKIECFDSVEISGVEDRFNASLGTYHDLLKIIKDKDFLDNEENEDILEDIVLTLTLFEDREMIEERLKTYAHLFDDKVMKQLKRRRYTGWGRLSRKLINGIRDKQSGKTILDFLKSDGFANRNFMQLIHDDSLTFKEDIQKAQVSGQGDSLHEHIANLAGSPAIKKGILQTVKVVDELVKVMGRHKPENIVIEMARENQTTQKGQKNSRERMKRIEEGIKELGSQILKEHPVENTQLQNEKLYLYYLQNGRDMYVDQELDINRLSDYDVDHIVPQSFLKDDSIDNKVLTRSDKARGKSDNVPSEEVVKKMKNYWRQLLNAKLITQRKFDNLTKAERGGLSELDKAGFIKRQLVETRQITKHVAQILDSRMNTKYDENDKLIREVKVITLKSKLVSDFRKDFQFYKVREINNYHHAHDAYLNAVVGTALIKKYPKLESEFVYGDYKVYDVRKMIAKSEQEIGKATAKYFFYSNIMNFFKTEITLANGEIRKRPLIETNGETGEIVWDKGRDFATVRKVLSMPQVNIVKKTEVQTGGFSKESILPKRNSDKLIARKKDWDPKKYGGFDSPTVAYSVLVVAKVEKGKSKKLKSVKELLGITIMERSSFEKNPIDFLEAKGYKEVKKDLIIKLPKYSLFELENGRKRMLASAGELQKGNELALPSKYVNFLYLASHYEKLKGSPEDNEQKQLFVEQHKHYLDEIIEQISEFSKRVILADANLDKVLSAYNKHRDKPIREQAENIIHLFTLTNLGAPAAFKYFDTTIDRKRYTSTKEVLDATLIHQSITGLYETRIDLSQLGGDGGGGSGGGEAAAKGGVLNLEEEYRLHEKPVPSSIDPSWLQLFPTVWAERAGMGLANQVPPVVVELRSGASPVAVRQYPMSKEAREGIRPHIQRFLDLGVLVPCQSPWNTPLLPVKKPGTNDYRPVQDLREINKRVQDIHPTVPNPYNLLSSLPPSHTWYSVLDLKDAFFCLKLHPNSQPLFAFEWRDPEKGNTGQLTWTRLPQGFKNSPTLFNEALHRDLAPFRALNPQVVLLQYVDDLLVAAPTYRDCKEGTQKLLQELSKLGYRVSAKKAQLCQKEVTYLGYLLKEGKRWLTPARKATVMKIPPPTTPRQVREFLGTAGFCRLWIPGFASLAAPLYPLTKPSIPFIWTEEHQKAFDRIKEALLSAPALALPDLTKPFTLYVDERAGVARGVLTQTLGPWRRPVAYLSKKLDPVASGWPTCLKAVAAVALLLKDADKLTLGQNVTVIASHSLESIVRQPPDRWMTNARMTHYQSLLLNERVSFAPPAVLNPATLLPVESEATPVHRCSEILAEETGTRRDLKDQPLPGVPAWYTDGSSFIAEGKRRAGAAIVDGKRTVWASSLPEGTSAQKAELVALTQALRLAEGKDINIYTDSRYAFATAHIHGAIYKQRGWLTSAGKDIKNKEEILALLEAIHLPKRVAIIHCPGHQKGNDPVATGNRRADEAAKQAALSTRVLAETTKPAGKRTADGSEFEKRTADGSEFESPKKKAKVE

SEQ ID NO: 862 - protein, 2095 aa, synthetic construct
MPAAKRVKLDGGDKKYSIGLDIGTNSVGWAVITDEYKVPSKKFKVLGNTDRHSIKKNLIGALLFDSGETAEATRLKRTARRRYTRRKNRICYLQEIFSNEMAKVDDSFFHRLEESFLVEEDKKHERHPIFGNIVDEVAYHEKYPTIYHLRKKLVDSTDKADLRLIYLALAHMIKFRGHFLIEGDLNPDNSDVDKLFIQLVQTYNQLFEENPINASGVDAKAILSARLSKSRRLENLIAQLPGEKKNGLFGNLIALSLGLTPNFKSNFDLAEDAKLQLSKDTYDDDLDNLLAQIGDQYADLFLAAKNLSDAILLSDILRVNTEITKAPLSASMIKRYDEHHQDLTLLKALVRQQLPEKYKEIFFDQSKNGYAGYIDGGASQEEFYKFIKPILEKMDGTEELLVKLNREDLLRKQRTFDNGSIPHQIHLGELHAILRRQEDFYPFLKDNREKIEKILTFRIPYYVGPLARGNSRFAWMTRKSEETITPWNFEEVVDKGASAQSFIERMTNFDKNLPNEKVLPKHSLLYEYFTVYNELTKVKYVTEGMRKPAFLSGEQKKAIVDLLFKTNRKVTVKQLKEDYFKKIECFDSVEISGVEDRFNASLGTYHDLLKIIKDKDFLDNEENEDILEDIVLTLTLFEDREMIEERLKTYAHLFDDKVMKQLKRRRYTGWGRLSRKLINGIRDKQSGKTILDFLKSDGFANRNFMQLIHDDSLTFKEDIQKAQVSGQGDSLHEHIANLAGSPAIKKGILQTVKVVDELVKVMGRHKPENIVIEMARENQTTQKGQKNSRERMKRIEEGIKELGSQILKEHPVENTQLQNEKLYLYYLQNGRDMYVDQELDINRLSDYDVDHIVPQSFLKDDSIDNKVLTRSDKARGKSDNVPSEEVVKKMKNYWRQLLNAKLITQRKFDNLTKAERGGLSELDKAGFIKRQLVETRQITKHVAQILDSRMNTKYDENDKLIREVKVITLKSKLVSDFRKDFQFYKVREINNYHHAHDAYLNAVVGTALIKKYPKLESEFVYGDYKVYDVRKMIAKSEQEIGKATAKYFFYSNIMNFFKTEITLANGEIRKRPLIETNGETGEIVWDKGRDFATVRKVLSMPQVNIVKKTEVQTGGFSKESILPKRNSDKLIARKKDWDPKKYGGFDSPTVAYSVLVVAKVEKGKSKKLKSVKELLGITIMERSSFEKNPIDFLEAKGYKEVKKDLIIKLPKYSLFELENGRKRMLASAGELQKGNELALPSKYVNFLYLASHYEKLKGSPEDNEQKQLFVEQHKHYLDEIIEQISEFSKRVILADANLDKVLSAYNKHRDKPIREQAENIIHLFTLTNLGAPAAFKYFDTTIDRKRYTSTKEVLDATLIHQSITGLYETRIDLSQLGGDGGGSAGSAAGSGEFGGVLNLEEEYRLHEKPVPSSIDPSWLQLFPTVWAERAGMGLANQVPPVVVELRSGASPVAVRQYPMSKEAREGIRPHIQRFLDLGVLVPCQSPWNTPLLPVKKPGTNDYRPVQDLREINKRVQDIHPTVPNPYNLLSSLPPSHTWYSVLDLKDAFFCLKLHPNSQPLFAFEWRDPEKGNTGQLTWTRLPQGFKNSPTLFNEALHRDLAPFRALNPQVVLLQYVDDLLVAAPTYRDCKEGTQKLLQELSKLGYRVSAKKAQLCQKEVTYLGYLLKEGKRWLTPARKATVMKIPPPTTPRQVREFLGTAGFCRLWIPGFASLAAPLYPLTKPSIPFIWTEEHQKAFDRIKEALLSAPALALPDLTKPFTLYVDERAGVARGVLTQTLGPWRRPVAYLSKKLDPVASGWPTCLKAVAAVALLLKDADKLTLGQNVTVIASHSLESIVRQPPDRWMTNARMTHYQSLLLNERVSFAPPAVLNPATLLPVESEATPVHRCSEILAEETGTRRDLKDQPLPGVPAWYTDGSSFIAEGKRRAGAAIVDGKRTVWASSLPEGTSAQKAELVALTQALRLAEGKDINIYTDSRYAFATAHIHGAIYKQRGWLTSAGKDIKNKEEILALLEAIHLPKRVAIIHCPGHQKGNDPVATGNRRADEAAKQAALSTRVLAETTKPAGKRTADGSEFEKRTADGSEFESPKKKAKVE

SEQ ID NO: 863 - protein, 2094 aa, synthetic construct
MPAAKRVKLDGGDKKYSIGLDIGTNSVGWAVITDEYKVPSKKFKVLGNTDRHSIKKNLIGALLFDSGETAEATRLKRTARRRYTRRKNRICYLQEIFSNEMAKVDDSFFHRLEESFLVEEDKKHERHPIFGNIVDEVAYHEKYPTIYHLRKKLVDSTDKADLRLIYLALAHMIKFRGHFLIEGDLNPDNSDVDKLFIQLVQTYNQLFEENPINASGVDAKAILSARLSKSRRLENLIAQLPGEKKNGLFGNLIALSLGLTPNFKSNFDLAEDAKLQLSKDTYDDDLDNLLAQIGDQYADLFLAAKNLSDAILLSDILRVNTEITKAPLSASMIKRYDEHHQDLTLLKALVRQQLPEKYKEIFFDQSKNGYAGYIDGGASQEEFYKFIKPILEKMDGTEELLVKLNREDLLRKQRTFDNGSIPHQIHLGELHAILRRQEDFYPFLKDNREKIEKILTFRIPYYVGPLARGNSRFAWMTRKSEETITPWNFEEVVDKGASAQSFIERMTNFDKNLPNEKVLPKHSLLYEYFTVYNELTKVKYVTEGMRKPAFLSGEQKKAIVDLLFKTNRKVTVKQLKEDYFKKIECFDSVEISGVEDRFNASLGTYHDLLKIIKDKDFLDNEENEDILEDIVLTLTLFEDREMIEERLKTYAHLFDDKVMKQLKRRRYTGWGRLSRKLINGIRDKQSGKTILDFLKSDGFANRNFMQLIHDDSLTFKEDIQKAQVSGQGDSLHEHIANLAGSPAIKKGILQTVKVVDELVKVMGRHKPENIVIEMARENQTTQKGQKNSRERMKRIEEGIKELGSQILKEHPVENTQLQNEKLYLYYLQNGRDMYVDQELDINRLSDYDVDHIVPQSFLKDDSIDNKVLTRSDKARGKSDNVPSEEVVKKMKNYWRQLLNAKLITQRKFDNLTKAERGGLSELDKAGFIKRQLVETRQITKHVAQILDSRMNTKYDENDKLIREVKVITLKSKLVSDFRKDFQFYKVREINNYHHAHDAYLNAVVGTALIKKYPKLESEFVYGDYKVYDVRKMIAKSEQEIGKATAKYFFYSNIMNFFKTEITLANGEIRKRPLIETNGETGEIVWDKGRDFATVRKVLSMPQVNIVKKTEVQTGGFSKESILPKRNSDKLIARKKDWDPKKYGGFDSPTVAYSVLVVAKVEKGKSKKLKSVKELLGITIMERSSFEKNPIDFLEAKGYKEVKKDLIIKLPKYSLFELENGRKRMLASAGELQKGNELALPSKYVNFLYLASHYEKLKGSPEDNEQKQLFVEQHKHYLDEIIEQISEFSKRVILADANLDKVLSAYNKHRDKPIREQAENIIHLFTLTNLGAPAAFKYFDTTIDRKRYTSTKEVLDATLIHQSITGLYETRIDLSQLGGDGGPAPEAAAKGGSGGVLNLEEEYRLHEKPVPSSIDPSWLQLFPTVWAERAGMGLANQVPPVVVELRSGASPVAVRQYPMSKEAREGIRPHIQRFLDLGVLVPCQSPWNTPLLPVKKPGTNDYRPVQDLREINKRVQDIHPTVPNPYNLLSSLPPSHTWYSVLDLKDAFFCLKLHPNSQPLFAFEWRDPEKGNTGQLTWTRLPQGFKNSPTLFNEALHRDLAPFRALNPQVVLLQYVDDLLVAAPTYRDCKEGTQKLLQELSKLGYRVSAKKAQLCQKEVTYLGYLLKEGKRWLTPARKATVMKIPPPTTPRQVREFLGTAGFCRLWIPGFASLAAPLYPLTKPSIPFIWTEEHQKAFDRIKEALLSAPALALPDLTKPFTLYVDERAGVARGVLTQTLGPWRRPVAYLSKKLDPVASGWPTCLKAVAAVALLLKDADKLTLGQNVTVIASHSLESIVRQPPDRWMTNARMTHYQSLLLNERVSFAPPAVLNPATLLPVESEATPVHRCSEILAEETGTRRDLKDQPLPGVPAWYTDGSSFIAEGKRRAGAAIVDGKRTVWASSLPEGTSAQKAELVALTQALRLAEGKDINIYTDSRYAFATAHIHGAIYKQRGWLTSAGKDIKNKEEILALLEAIHLPKRVAIIHCPGHQKGNDPVATGNRRADEAAKQAALSTRVLAETTKPAGKRTADGSEFEKRTADGSEFESPKKKAKVE

SEQ ID NO: 864 - protein, 2092 aa, synthetic construct
MPAAKRVKLDGGDKKYSIGLDIGTNSVGWAVITDEYKVPSKKFKVLGNTDRHSIKKNLIGALLFDSGETAEATRLKRTARRRYTRRKNRICYLQEIFSNEMAKVDDSFFHRLEESFLVEEDKKHERHPIFGNIVDEVAYHEKYPTIYHLRKKLVDSTDKADLRLIYLALAHMIKFRGHFLIEGDLNPDNSDVDKLFIQLVQTYNQLFEENPINASGVDAKAILSARLSKSRRLENLIAQLPGEKKNGLFGNLIALSLGLTPNFKSNFDLAEDAKLQLSKDTYDDDLDNLLAQIGDQYADLFLAAKNLSDAILLSDILRVNTEITKAPLSASMIKRYDEHHQDLTLLKALVRQQLPEKYKEIFFDQSKNGYAGYIDGGASQEEFYKFIKPILEKMDGTEELLVKLNREDLLRKQRTFDNGSIPHQIHLGELHAILRRQEDFYPFLKDNREKIEKILTFRIPYYVGPLARGNSRFAWMTRKSEETITPWNFEEVVDKGASAQSFIERMTNFDKNLPNEKVLPKHSLLYEYFTVYNELTKVKYVTEGMRKPAFLSGEQKKAIVDLLFKTNRKVTVKQLKEDYFKKIECFDSVEISGVEDRFNASLGTYHDLLKIIKDKDFLDNEENEDILEDIVLTLTLFEDREMIEERLKTYAHLFDDKVMKQLKRRRYTGWGRLSRKLINGIRDKQSGKTILDFLKSDGFANRNFMQLIHDDSLTFKEDIQKAQVSGQGDSLHEHIANLAGSPAIKKGILQTVKVVDELVKVMGRHKPENIVIEMARENQTTQKGQKNSRERMKRIEEGIKELGSQILKEHPVENTQLQNEKLYLYYLQNGRDMYVDQELDINRLSDYDVDHIVPQSFLKDDSIDNKVLTRSDKARGKSDNVPSEEVVKKMKNYWRQLLNAKLITQRKFDNLTKAERGGLSELDKAGFIKRQLVETRQITKHVAQILDSRMNTKYDENDKLIREVKVITLKSKLVSDFRKDFQFYKVREINNYHHAHDAYLNAVVGTALIKKYPKLESEFVYGDYKVYDVRKMIAKSEQEIGKATAKYFFYSNIMNFFKTEITLANGEIRKRPLIETNGETGEIVWDKGRDFATVRKVLSMPQVNIVKKTEVQTGGFSKESILPKRNSDKLIARKKDWDPKKYGGFDSPTVAYSVLVVAKVEKGKSKKLKSVKELLGITIMERSSFEKNPIDFLEAKGYKEVKKDLIIKLPKYSLFELENGRKRMLASAGELQKGNELALPSKYVNFLYLASHYEKLKGSPEDNEQKQLFVEQHKHYLDEIIEQISEFSKRVILADANLDKVLSAYNKHRDKPIREQAENIIHLFTLTNLGAPAAFKYFDTTIDRKRYTSTKEVLDATLIHQSITGLYETRIDLSQLGGDGGPAPGSSGGGGGVLNLEEEYRLHEKPVPSSIDPSWLQLFPTVWAERAGMGLANQVPPVVVELRSGASPVAVRQYPMSKEAREGIRPHIQRFLDLGVLVPCQSPWNTPLLPVKKPGTNDYRPVQDLREINKRVQDIHPTVPNPYNLLSSLPPSHTWYSVLDLKDAFFCLKLHPNSQPLFAFEWRDPEKGNTGQLTWTRLPQGFKNSPTLFNEALHRDLAPFRALNPQVVLLQYVDDLLVAAPTYRDCKEGTQKLLQELSKLGYRVSAKKAQLCQKEVTYLGYLLKEGKRWLTPARKATVMKIPPPTTPRQVREFLGTAGFCRLWIPGFASLAAPLYPLTKPSIPFIWTEEHQKAFDRIKEALLSAPALALPDLTKPFTLYVDERAGVARGVLTQTLGPWRRPVAYLSKKLDPVASGWPTCLKAVAAVALLLKDADKLTLGQNVTVIASHSLESIVRQPPDRWMTNARMTHYQSLLLNERVSFAPPAVLNPATLLPVESEATPVHRCSEILAEETGTRRDLKDQPLPGVPAWYTDGSSFIAEGKRRAGAAIVDGKRTVWASSLPEGTSAQKAELVALTQALRLAEGKDINIYTDSRYAFATAHIHGAIYKQRGWLTSAGKDIKNKEEILALLEAIHLPKRVAIIHCPGHQKGNDPVATGNRRADEAAKQAALSTRVLAETTKPAGKRTADGSEFEKRTADGSEFESPKKKAKVE

SEQ ID NO: 865 - protein, 2092 aa, synthetic construct
MPAAKRVKLDGGDKKYSIGLDIGTNSVGWAVITDEYKVPSKKFKVLGNTDRHSIKKNLIGALLFDSGETAEATRLKRTARRRYTRRKNRICYLQEIFSNEMAKVDDSFFHRLEESFLVEEDKKHERHPIFGNIVDEVAYHEKYPTIYHLRKKLVDSTDKADLRLIYLALAHMIKFRGHFLIEGDLNPDNSDVDKLFIQLVQTYNQLFEENPINASGVDAKAILSARLSKSRRLENLIAQLPGEKKNGLFGNLIALSLGLTPNFKSNFDLAEDAKLQLSKDTYDDDLDNLLAQIGDQYADLFLAAKNLSDAILLSDILRVNTEITKAPLSASMIKRYDEHHQDLTLLKALVRQQLPEKYKEIFFDQSKNGYAGYIDGGASQEEFYKFIKPILEKMDGTEELLVKLNREDLLRKQRTFDNGSIPHQIHLGELHAILRRQEDFYPFLKDNREKIEKILTFRIPYYVGPLARGNSRFAWMTRKSEETITPWNFEEVVDKGASAQSFIERMTNFDKNLPNEKVLPKHSLLYEYFTVYNELTKVKYVTEGMRKPAFLSGEQKKAIVDLLFKTNRKVTVKQLKEDYFKKIECFDSVEISGVEDRFNASLGTYHDLLKIIKDKDFLDNEENEDILEDIVLTLTLFEDREMIEERLKTYAHLFDDKVMKQLKRRRYTGWGRLSRKLINGIRDKQSGKTILDFLKSDGFANRNFMQLIHDDSLTFKEDIQKAQVSGQGDSLHEHIANLAGSPAIKKGILQTVKVVDELVKVMGRHKPENIVIEMARENQTTQKGQKNSRERMKRIEEGIKELGSQILKEHPVENTQLQNEKLYLYYLQNGRDMYVDQELDINRLSDYDVDHIVPQSFLKDDSIDNKVLTRSDKARGKSDNVPSEEVVKKMKNYWRQLLNAKLITQRKFDNLTKAERGGLSELDKAGFIKRQLVETRQITKHVAQILDSRMNTKYDENDKLIREVKVITLKSKLVSDFRKDFQFYKVREINNYHHAHDAYLNAVVGTALIKKYPKLESEFVYGDYKVYDVRKMIAKSEQEIGKATAKYFFYSNIMNFFKTEITLANGEIRKRPLIETNGETGEIVWDKGRDFATVRKVLSMPQVNIVKKTEVQTGGFSKESILPKRNSDKLIARKKDWDPKKYGGFDSPTVAYSVLVVAKVEKGKSKKLKSVKELLGITIMERSSFEKNPIDFLEAKGYKEVKKDLIIKLPKYSLFELENGRKRMLASAGELQKGNELALPSKYVNFLYLASHYEKLKGSPEDNEQKQLFVEQHKHYLDEIIEQISEFSKRVILADANLDKVLSAYNKHRDKPIREQAENIIHLFTLTNLGAPAAFKYFDTTIDRKRYTSTKEVLDATLIHQSITGLYETRIDLSQLGGDGGGGSGSSGGGGGVLNLEEEYRLHEKPVPSSIDPSWLQLFPTVWAERAGMGLANQVPPVVVELRSGASPVAVRQYPMSKEAREGIRPHIQRFLDLGVLVPCQSPWNTPLLPVKKPGTNDYRPVQDLREINKRVQDIHPTVPNPYNLLSSLPPSHTWYSVLDLKDAFFCLKLHPNSQPLFAFEWRDPEKGNTGQLTWTRLPQGFKNSPTLFNEALHRDLAPFRALNPQVVLLQYVDDLLVAAPTYRDCKEGTQKLLQELSKLGYRVSAKKAQLCQKEVTYLGYLLKEGKRWLTPARKATVMKIPPPTTPRQVREFLGTAGFCRLWIPGFASLAAPLYPLTKPSIPFIWTEEHQKAFDRIKEALLSAPALALPDLTKPFTLYVDERAGVARGVLTQTLGPWRRPVAYLSKKLDPVASGWPTCLKAVAAVALLLKDADKLTLGQNVTVIASHSLESIVRQPPDRWMTNARMTHYQSLLLNERVSFAPPAVLNPATLLPVESEATPVHRCSEILAEETGTRRDLKDQPLPGVPAWYTDGSSFIAEGKRRAGAAIVDGKRTVWASSLPEGTSAQKAELVALTQALRLAEGKDINIYTDSRYAFATAHIHGAIYKQRGWLTSAGKDIKNKEEILALLEAIHLPKRVAIIHCPGHQKGNDPVATGNRRADEAAKQAALSTRVLAETTKPAGKRTADGSEFEKRTADGSEFESPKKKAKVE

SEQ ID NO: 866 - protein, 2094 aa, synthetic construct
MPAAKRVKLDGGDKKYSIGLDIGTNSVGWAVITDEYKVPSKKFKVLGNTDRHSIKKNLIGALLFDSGETAEATRLKRTARRRYTRRKNRICYLQEIFSNEMAKVDDSFFHRLEESFLVEEDKKHERHPIFGNIVDEVAYHEKYPTIYHLRKKLVDSTDKADLRLIYLALAHMIKFRGHFLIEGDLNPDNSDVDKLFIQLVQTYNQLFEENPINASGVDAKAILSARLSKSRRLENLIAQLPGEKKNGLFGNLIALSLGLTPNFKSNFDLAEDAKLQLSKDTYDDDLDNLLAQIGDQYADLFLAAKNLSDAILLSDILRVNTEITKAPLSASMIKRYDEHHQDLTLLKALVRQQLPEKYKEIFFDQSKNGYAGYIDGGASQEEFYKFIKPILEKMDGTEELLVKLNREDLLRKQRTFDNGSIPHQIHLGELHAILRRQEDFYPFLKDNREKIEKILTFRIPYYVGPLARGNSRFAWMTRKSEETITPWNFEEVVDKGASAQSFIERMTNFDKNLPNEKVLPKHSLLYEYFTVYNELTKVKYVTEGMRKPAFLSGEQKKAIVDLLFKTNRKVTVKQLKEDYFKKIECFDSVEISGVEDRFNASLGTYHDLLKIIKDKDFLDNEENEDILEDIVLTLTLFEDREMIEERLKTYAHLFDDKVMKQLKRRRYTGWGRLSRKLINGIRDKQSGKTILDFLKSDGFANRNFMQLIHDDSLTFKEDIQKAQVSGQGDSLHEHIANLAGSPAIKKGILQTVKVVDELVKVMGRHKPENIVIEMARENQTTQKGQKNSRERMKRIEEGIKELGSQILKEHPVENTQLQNEKLYLYYLQNGRDMYVDQELDINRLSDYDVDHIVPQSFLKDDSIDNKVLTRSDKARGKSDNVPSEEVVKKMKNYWRQLLNAKLITQRKFDNLTKAERGGLSELDKAGFIKRQLVETRQITKHVAQILDSRMNTKYDENDKLIREVKVITLKSKLVSDFRKDFQFYKVREINNYHHAHDAYLNAVVGTALIKKYPKLESEFVYGDYKVYDVRKMIAKSEQEIGKATAKYFFYSNIMNFFKTEITLANGEIRKRPLIETNGETGEIVWDKGRDFATVRKVLSMPQVNIVKKTEVQTGGFSKESILPKRNSDKLIARKKDWDPKKYGGFDSPTVAYSVLVVAKVEKGKSKKLKSVKELLGITIMERSSFEKNPIDFLEAKGYKEVKKDLIIKLPKYSLFELENGRKRMLASAGELQKGNELALPSKYVNFLYLASHYEKLKGSPEDNEQKQLFVEQHKHYLDEIIEQISEFSKRVILADANLDKVLSAYNKHRDKPIREQAENIIHLFTLTNLGAPAAFKYFDTTIDRKRYTSTKEVLDATLIHQSITGLYETRIDLSQLGGDGGPAPEAAAKGGGGGVLNLEEEYRLHEKPVPSSIDPSWLQLFPTVWAERAGMGLANQVPPVVVELRSGASPVAVRQYPMSKEAREGIRPHIQRFLDLGVLVPCQSPWNTPLLPVKKPGTNDYRPVQDLREINKRVQDIHPTVPNPYNLLSSLPPSHTWYSVLDLKDAFFCLKLHPNSQPLFAFEWRDPEKGNTGQLTWTRLPQGFKNSPTLFNEALHRDLAPFRALNPQVVLLQYVDDLLVAAPTYRDCKEGTQKLLQELSKLGYRVSAKKAQLCQKEVTYLGYLLKEGKRWLTPARKATVMKIPPPTTPRQVREFLGTAGFCRLWIPGFASLAAPLYPLTKPSIPFIWTEEHQKAFDRIKEALLSAPALALPDLTKPFTLYVDERAGVARGVLTQTLGPWRRPVAYLSKKLDPVASGWPTCLKAVAAVALLLKDADKLTLGQNVTVIASHSLESIVRQPPDRWMTNARMTHYQSLLLNERVSFAPPAVLNPATLLPVESEATPVHRCSEILAEETGTRRDLKDQPLPGVPAWYTDGSSFIAEGKRRAGAAIVDGKRTVWASSLPEGTSAQKAELVALTQALRLAEGKDINIYTDSRYAFATAHIHGAIYKQRGWLTSAGKDIKNKEEILALLEAIHLPKRVAIIHCPGHQKGNDPVATGNRRADEAAKQAALSTRVLAETTKPAGKRTADGSEFEKRTADGSEFESPKKKAKVE

SEQ ID NO: 867 - protein, 2089 aa, synthetic construct
MPAAKRVKLDGGDKKYSIGLDIGTNSVGWAVITDEYKVPSKKFKVLGNTDRHSIKKNLIGALLFDSGETAEATRLKRTARRRYTRRKNRICYLQEIFSNEMAKVDDSFFHRLEESFLVEEDKKHERHPIFGNIVDEVAYHEKYPTIYHLRKKLVDSTDKADLRLIYLALAHMIKFRGHFLIEGDLNPDNSDVDKLFIQLVQTYNQLFEENPINASGVDAKAILSARLSKSRRLENLIAQLPGEKKNGLFGNLIALSLGLTPNFKSNFDLAEDAKLQLSKDTYDDDLDNLLAQIGDQYADLFLAAKNLSDAILLSDILRVNTEITKAPLSASMIKRYDEHHQDLTLLKALVRQQLPEKYKEIFFDQSKNGYAGYIDGGASQEEFYKFIKPILEKMDGTEELLVKLNREDLLRKQRTFDNGSIPHQIHLGELHAILRRQEDFYPFLKDNREKIEKILTFRIPYYVGPLARGNSRFAWMTRKSEETITPWNFEEVVDKGASAQSFIERMTNFDKNLPNEKVLPKHSLLYEYFTVYNELTKVKYVTEGMRKPAFLSGEQKKAIVDLLFKTNRKVTVKQLKEDYFKKIECFDSVEISGVEDRFNASLGTYHDLLKIIKDKDFLDNEENEDILEDIVLTLTLFEDREMIEERLKTYAHLFDDKVMKQLKRRRYTGWGRLSRKLINGIRDKQSGKTILDFLKSDGFANRNFMQLIHDDSLTFKEDIQKAQVSGQGDSLHEHIANLAGSPAIKKGILQTVKVVDELVKVMGRHKPENIVIEMARENQTTQKGQKNSRERMKRIEEGIKELGSQILKEHPVENTQLQNEKLYLYYLQNGRDMYVDQELDINRLSDYDVDHIVPQSFLKDDSIDNKVLTRSDKARGKSDNVPSEEVVKKMKNYWRQLLNAKLITQRKFDNLTKAERGGLSELDKAGFIKRQLVETRQITKHVAQILDSRMNTKYDENDKLIREVKVITLKSKLVSDFRKDFQFYKVREINNYHHAHDAYLNAVVGTALIKKYPKLESEFVYGDYKVYDVRKMIAKSEQEIGKATAKYFFYSNIMNFFKTEITLANGEIRKRPLIETNGETGEIVWDKGRDFATVRKVLSMPQVNIVKKTEVQTGGFSKESILPKRNSDKLIARKKDWDPKKYGGFDSPTVAYSVLVVAKVEKGKSKKLKSVKELLGITIMERSSFEKNPIDFLEAKGYKEVKKDLIIKLPKYSLFELENGRKRMLASAGELQKGNELALPSKYVNFLYLASHYEKLKGSPEDNEQKQLFVEQHKHYLDEIIEQISEFSKRVILADANLDKVLSAYNKHRDKPIREQAENIIHLFTLTNLGAPAAFKYFDTTIDRKRYTSTKEVLDATLIHQSITGLYETRIDLSQLGGDGGGSSPAPGGVLNLEEEYRLHEKPVPSSIDPSWLQLFPTVWAERAGMGLANQVPPVVVELRSGASPVAVRQYPMSKEAREGIRPHIQRFLDLGVLVPCQSPWNTPLLPVKKPGTNDYRPVQDLREINKRVQDIHPTVPNPYNLLSSLPPSHTWYSVLDLKDAFFCLKLHPNSQPLFAFEWRDPEKGNTGQLTWTRLPQGFKNSPTLFNEALHRDLAPFRALNPQVVLLQYVDDLLVAAPTYRDCKEGTQKLLQELSKLGYRVSAKKAQLCQKEVTYLGYLLKEGKRWLTPARKATVMKIPPPTTPRQVREFLGTAGFCRLWIPGFASLAAPLYPLTKPSIPFIWTEEHQKAFDRIKEALLSAPALALPDLTKPFTLYVDERAGVARGVLTQTLGPWRRPVAYLSKKLDPVASGWPTCLKAVAAVALLLKDADKLTLGQNVTVIASHSLESIVRQPPDRWMTNARMTHYQSLLLNERVSFAPPAVLNPATLLPVESEATPVHRCSEILAEETGTRRDLKDQPLPGVPAWYTDGSSFIAEGKRRAGAAIVDGKRTVWASSLPEGTSAQKAELVALTQALRLAEGKDINIYTDSRYAFATAHIHGAIYKQRGWLTSAGKDIKNKEEILALLEAIHLPKRVAIIHCPGHQKGNDPVATGNRRADEAAKQAALSTRVLAETTKPAGKRTADGSEFEKRTADGSEFESPKKKAKVE

SEQ ID NO: 868 - protein, 2092 aa, synthetic construct
MPAAKRVKLDGGDKKYSIGLDIGTNSVGWAVITDEYKVPSKKFKVLGNTDRHSIKKNLIGALLFDSGETAEATRLKRTARRRYTRRKNRICYLQEIFSNEMAKVDDSFFHRLEESFLVEEDKKHERHPIFGNIVDEVAYHEKYPTIYHLRKKLVDSTDKADLRLIYLALAHMIKFRGHFLIEGDLNPDNSDVDKLFIQLVQTYNQLFEENPINASGVDAKAILSARLSKSRRLENLIAQLPGEKKNGLFGNLIALSLGLTPNFKSNFDLAEDAKLQLSKDTYDDDLDNLLAQIGDQYADLFLAAKNLSDAILLSDILRVNTEITKAPLSASMIKRYDEHHQDLTLLKALVRQQLPEKYKEIFFDQSKNGYAGYIDGGASQEEFYKFIKPILEKMDGTEELLVKLNREDLLRKQRTFDNGSIPHQIHLGELHAILRRQEDFYPFLKDNREKIEKILTFRIPYYVGPLARGNSRFAWMTRKSEETITPWNFEEVVDKGASAQSFIERMTNFDKNLPNEKVLPKHSLLYEYFTVYNELTKVKYVTEGMRKPAFLSGEQKKAIVDLLFKTNRKVTVKQLKEDYFKKIECFDSVEISGVEDRFNASLGTYHDLLKIIKDKDFLDNEENEDILEDIVLTLTLFEDREMIEERLKTYAHLFDDKVMKQLKRRRYTGWGRLSRKLINGIRDKQSGKTILDFLKSDGFANRNFMQLIHDDSLTFKEDIQKAQVSGQGDSLHEHIANLAGSPAIKKGILQTVKVVDELVKVMGRHKPENIVIEMARENQTTQKGQKNSRERMKRIEEGIKELGSQILKEHPVENTQLQNEKLYLYYLQNGRDMYVDQELDINRLSDYDVDHIVPQSFLKDDSIDNKVLTRSDKARGKSDNVPSEEVVKKMKNYWRQLLNAKLITQRKFDNLTKAERGGLSELDKAGFIKRQLVETRQITKHVAQILDSRMNTKYDENDKLIREVKVITLKSKLVSDFRKDFQFYKVREINNYHHAHDAYLNAVVGTALIKKYPKLESEFVYGDYKVYDVRKMIAKSEQEIGKATAKYFFYSNIMNFFKTEITLANGEIRKRPLIETNGETGEIVWDKGRDFATVRKVLSMPQVNIVKKTEVQTGGFSKESILPKRNSDKLIARKKDWDPKKYGGFDSPTVAYSVLVVAKVEKGKSKKLKSVKELLGITIMERSSFEKNPIDFLEAKGYKEVKKDLIIKLPKYSLFELENGRKRMLASAGELQKGNELALPSKYVNFLYLASHYEKLKGSPEDNEQKQLFVEQHKHYLDEIIEQISEFSKRVILADANLDKVLSAYNKHRDKPIREQAENIIHLFTLTNLGAPAAFKYFDTTIDRKRYTSTKEVLDATLIHQSITGLYETRIDLSQLGGDGGGSSGGGPAPGGVLNLEEEYRLHEKPVPSSIDPSWLQLFPTVWAERAGMGLANQVPPVVVELRSGASPVAVRQYPMSKEAREGIRPHIQRFLDLGVLVPCQSPWNTPLLPVKKPGTNDYRPVQDLREINKRVQDIHPTVPNPYNLLSSLPPSHTWYSVLDLKDAFFCLKLHPNSQPLFAFEWRDPEKGNTGQLTWTRLPQGFKNSPTLFNEALHRDLAPFRALNPQVVLLQYVDDLLVAAPTYRDCKEGTQKLLQELSKLGYRVSAKKAQLCQKEVTYLGYLLKEGKRWLTPARKATVMKIPPPTTPRQVREFLGTAGFCRLWIPGFASLAAPLYPLTKPSIPFIWTEEHQKAFDRIKEALLSAPALALPDLTKPFTLYVDERAGVARGVLTQTLGPWRRPVAYLSKKLDPVASGWPTCLKAVAAVALLLKDADKLTLGQNVTVIASHSLESIVRQPPDRWMTNARMTHYQSLLLNERVSFAPPAVLNPATLLPVESEATPVHRCSEILAEETGTRRDLKDQPLPGVPAWYTDGSSFIAEGKRRAGAAIVDGKRTVWASSLPEGTSAQKAELVALTQALRLAEGKDINIYTDSRYAFATAHIHGAIYKQRGWLTSAGKDIKNKEEILALLEAIHLPKRVAIIHCPGHQKGNDPVATGNRRADEAAKQAALSTRVLAETTKPAGKRTADGSEFEKRTADGSEFESPKKKAKVE

SEQ ID NO: 869 - protein, 2089 aa, synthetic construct
MPAAKRVKLDGGDKKYSIGLDIGTNSVGWAVITDEYKVPSKKFKVLGNTDRHSIKKNLIGALLFDSGETAEATRLKRTARRRYTRRKNRICYLQEIFSNEMAKVDDSFFHRLEESFLVEEDKKHERHPIFGNIVDEVAYHEKYPTIYHLRKKLVDSTDKADLRLIYLALAHMIKFRGHFLIEGDLNPDNSDVDKLFIQLVQTYNQLFEENPINASGVDAKAILSARLSKSRRLENLIAQLPGEKKNGLFGNLIALSLGLTPNFKSNFDLAEDAKLQLSKDTYDDDLDNLLAQIGDQYADLFLAAKNLSDAILLSDILRVNTEITKAPLSASMIKRYDEHHQDLTLLKALVRQQLPEKYKEIFFDQSKNGYAGYIDGGASQEEFYKFIKPILEKMDGTEELLVKLNREDLLRKQRTFDNGSIPHQIHLGELHAILRRQEDFYPFLKDNREKIEKILTFRIPYYVGPLARGNSRFAWMTRKSEETITPWNFEEVVDKGASAQSFIERMTNFDKNLPNEKVLPKHSLLYEYFTVYNELTKVKYVTEGMRKPAFLSGEQKKAIVDLLFKTNRKVTVKQLKEDYFKKIECFDSVEISGVEDRFNASLGTYHDLLKIIKDKDFLDNEENEDILEDIVLTLTLFEDREMIEERLKTYAHLFDDKVMKQLKRRRYTGWGRLSRKLINGIRDKQSGKTILDFLKSDGFANRNFMQLIHDDSLTFKEDIQKAQVSGQGDSLHEHIANLAGSPAIKKGILQTVKVVDELVKVMGRHKPENIVIEMARENQTTQKGQKNSRERMKRIEEGIKELGSQILKEHPVENTQLQNEKLYLYYLQNGRDMYVDQELDINRLSDYDVDHIVPQSFLKDDSIDNKVLTRSDKARGKSDNVPSEEVVKKMKNYWRQLLNAKLITQRKFDNLTKAERGGLSELDKAGFIKRQLVETRQITKHVAQILDSRMNTKYDENDKLIREVKVITLKSKLVSDFRKDFQFYKVREINNYHHAHDAYLNAVVGTALIKKYPKLESEFVYGDYKVYDVRKMIAKSEQEIGKATAKYFFYSNIMNFFKTEITLANGEIRKRPLIETNGETGEIVWDKGRDFATVRKVLSMPQVNIVKKTEVQTGGFSKESILPKRNSDKLIARKKDWDPKKYGGFDSPTVAYSVLVVAKVEKGKSKKLKSVKELLGITIMERSSFEKNPIDFLEAKGYKEVKKDLIIKLPKYSLFELENGRKRMLASAGELQKGNELALPSKYVNFLYLASHYEKLKGSPEDNEQKQLFVEQHKHYLDEIIEQISEFSKRVILADANLDKVLSAYNKHRDKPIREQAENIIHLFTLTNLGAPAAFKYFDTTIDRKRYTSTKEVLDATLIHQSITGLYETRIDLSQLGGDGGGGSGGSGGVLNLEEEYRLHEKPVPSSIDPSWLQLFPTVWAERAGMGLANQVPPVVVELRSGASPVAVRQYPMSKEAREGIRPHIQRFLDLGVLVPCQSPWNTPLLPVKKPGTNDYRPVQDLREINKRVQDIHPTVPNPYNLLSSLPPSHTWYSVLDLKDAFFCLKLHPNSQPLFAFEWRDPEKGNTGQLTWTRLPQGFKNSPTLFNEALHRDLAPFRALNPQVVLLQYVDDLLVAAPTYRDCKEGTQKLLQELSKLGYRVSAKKAQLCQKEVTYLGYLLKEGKRWLTPARKATVMKIPPPTTPRQVREFLGTAGFCRLWIPGFASLAAPLYPLTKPSIPFIWTEEHQKAFDRIKEALLSAPALALPDLTKPFTLYVDERAGVARGVLTQTLGPWRRPVAYLSKKLDPVASGWPTCLKAVAAVALLLKDADKLTLGQNVTVIASHSLESIVRQPPDRWMTNARMTHYQSLLLNERVSFAPPAVLNPATLLPVESEATPVHRCSEILAEETGTRRDLKDQPLPGVPAWYTDGSSFIAEGKRRAGAAIVDGKRTVWASSLPEGTSAQKAELVALTQALRLAEGKDINIYTDSRYAFATAHIHGAIYKQRGWLTSAGKDIKNKEEILALLEAIHLPKRVAIIHCPGHQKGNDPVATGNRRADEAAKQAALSTRVLAETTKPAGKRTADGSEFEKRTADGSEFESPKKKAKVE

SEQ ID NO: 870 - protein, 2094 aa, synthetic construct
MPAAKRVKLDGGDKKYSIGLDIGTNSVGWAVITDEYKVPSKKFKVLGNTDRHSIKKNLIGALLFDSGETAEATRLKRTARRRYTRRKNRICYLQEIFSNEMAKVDDSFFHRLEESFLVEEDKKHERHPIFGNIVDEVAYHEKYPTIYHLRKKLVDSTDKADLRLIYLALAHMIKFRGHFLIEGDLNPDNSDVDKLFIQLVQTYNQLFEENPINASGVDAKAILSARLSKSRRLENLIAQLPGEKKNGLFGNLIALSLGLTPNFKSNFDLAEDAKLQLSKDTYDDDLDNLLAQIGDQYADLFLAAKNLSDAILLSDILRVNTEITKAPLSASMIKRYDEHHQDLTLLKALVRQQLPEKYKEIFFDQSKNGYAGYIDGGASQEEFYKFIKPILEKMDGTEELLVKLNREDLLRKQRTFDNGSIPHQIHLGELHAILRRQEDFYPFLKDNREKIEKILTFRIPYYVGPLARGNSRFAWMTRKSEETITPWNFEEVVDKGASAQSFIERMTNFDKNLPNEKVLPKHSLLYEYFTVYNELTKVKYVTEGMRKPAFLSGEQKKAIVDLLFKTNRKVTVKQLKEDYFKKIECFDSVEISGVEDRFNASLGTYHDLLKIIKDKDFLDNEENEDILEDIVLTLTLFEDREMIEERLKTYAHLFDDKVMKQLKRRRYTGWGRLSRKLINGIRDKQSGKTILDFLKSDGFANRNFMQLIHDDSLTFKEDIQKAQVSGQGDSLHEHIANLAGSPAIKKGILQTVKVVDELVKVMGRHKPENIVIEMARENQTTQKGQKNSRERMKRIEEGIKELGSQILKEHPVENTQLQNEKLYLYYLQNGRDMYVDQELDINRLSDYDVDHIVPQSFLKDDSIDNKVLTRSDKARGKSDNVPSEEVVKKMKNYWRQLLNAKLITQRKFDNLTKAERGGLSELDKAGFIKRQLVETRQITKHVAQILDSRMNTKYDENDKLIREVKVITLKSKLVSDFRKDFQFYKVREINNYHHAHDAYLNAVVGTALIKKYPKLESEFVYGDYKVYDVRKMIAKSEQEIGKATAKYFFYSNIMNFFKTEITLANGEIRKRPLIETNGETGEIVWDKGRDFATVRKVLSMPQVNIVKKTEVQTGGFSKESILPKRNSDKLIARKKDWDPKKYGGFDSPTVAYSVLVVAKVEKGKSKKLKSVKELLGITIMERSSFEKNPIDFLEAKGYKEVKKDLIIKLPKYSLFELENGRKRMLASAGELQKGNELALPSKYVNFLYLASHYEKLKGSPEDNEQKQLFVEQHKHYLDEIIEQISEFSKRVILADANLDKVLSAYNKHRDKPIREQAENIIHLFTLTNLGAPAAFKYFDTTIDRKRYTSTKEVLDATLIHQSITGLYETRIDLSQLGGDGGGGGPAPEAAAKGGVLNLEEEYRLHEKPVPSSIDPSWLQLFPTVWAERAGMGLANQVPPVVVELRSGASPVAVRQYPMSKEAREGIRPHIQRFLDLGVLVPCQSPWNTPLLPVKKPGTNDYRPVQDLREINKRVQDIHPTVPNPYNLLSSLPPSHTWYSVLDLKDAFFCLKLHPNSQPLFAFEWRDPEKGNTGQLTWTRLPQGFKNSPTLFNEALHRDLAPFRALNPQVVLLQYVDDLLVAAPTYRDCKEGTQKLLQELSKLGYRVSAKKAQLCQKEVTYLGYLLKEGKRWLTPARKATVMKIPPPTTPRQVREFLGTAGFCRLWIPGFASLAAPLYPLTKPSIPFIWTEEHQKAFDRIKEALLSAPALALPDLTKPFTLYVDERAGVARGVLTQTLGPWRRPVAYLSKKLDPVASGWPTCLKAVAAVALLLKDADKLTLGQNVTVIASHSLESIVRQPPDRWMTNARMTHYQSLLLNERVSFAPPAVLNPATLLPVESEATPVHRCSEILAEETGTRRDLKDQPLPGVPAWYTDGSSFIAEGKRRAGAAIVDGKRTVWASSLPEGTSAQKAELVALTQALRLAEGKDINIYTDSRYAFATAHIHGAIYKQRGWLTSAGKDIKNKEEILALLEAIHLPKRVAIIHCPGHQKGNDPVATGNRRADEAAKQAALSTRVLAETTKPAGKRTADGSEFEKRTADGSEFESPKKKAKVE

SEQ ID NO: 871 - protein, 2129 aa, synthetic construct
MPAAKRVKLDGGDKKYSIGLDIGTNSVGWAVITDEYKVPSKKFKVLGNTDRHSIKKNLIGALLFDSGETAEATRLKRTARRRYTRRKNRICYLQEIFSNEMAKVDDSFFHRLEESFLVEEDKKHERHPIFGNIVDEVAYHEKYPTIYHLRKKLVDSTDKADLRLIYLALAHMIKFRGHFLIEGDLNPDNSDVDKLFIQLVQTYNQLFEENPINASGVDAKAILSARLSKSRRLENLIAQLPGEKKNGLFGNLIALSLGLTPNFKSNFDLAEDAKLQLSKDTYDDDLDNLLAQIGDQYADLFLAAKNLSDAILLSDILRVNTEITKAPLSASMIKRYDEHHQDLTLLKALVRQQLPEKYKEIFFDQSKNGYAGYIDGGASQEEFYKFIKPILEKMDGTEELLVKLNREDLLRKQRTFDNGSIPHQIHLGELHAILRRQEDFYPFLKDNREKIEKILTFRIPYYVGPLARGNSRFAWMTRKSEETITPWNFEEVVDKGASAQSFIERMTNFDKNLPNEKVLPKHSLLYEYFTVYNELTKVKYVTEGMRKPAFLSGEQKKAIVDLLFKTNRKVTVKQLKEDYFKKIECFDSVEISGVEDRFNASLGTYHDLLKIIKDKDFLDNEENEDILEDIVLTLTLFEDREMIEERLKTYAHLFDDKVMKQLKRRRYTGWGRLSRKLINGIRDKQSGKTILDFLKSDGFANRNFMQLIHDDSLTFKEDIQKAQVSGQGDSLHEHIANLAGSPAIKKGILQTVKVVDELVKVMGRHKPENIVIEMARENQTTQKGQKNSRERMKRIEEGIKELGSQILKEHPVENTQLQNEKLYLYYLQNGRDMYVDQELDINRLSDYDVDHIVPQSFLKDDSIDNKVLTRSDKARGKSDNVPSEEVVKKMKNYWRQLLNAKLITQRKFDNLTKAERGGLSELDKAGFIKRQLVETRQITKHVAQILDSRMNTKYDENDKLIREVKVITLKSKLVSDFRKDFQFYKVREINNYHHAHDAYLNAVVGTALIKKYPKLESEFVYGDYKVYDVRKMIAKSEQEIGKATAKYFFYSNIMNFFKTEITLANGEIRKRPLIETNGETGEIVWDKGRDFATVRKVLSMPQVNIVKKTEVQTGGFSKESILPKRNSDKLIARKKDWDPKKYGGFDSPTVAYSVLVVAKVEKGKSKKLKSVKELLGITIMERSSFEKNPIDFLEAKGYKEVKKDLIIKLPKYSLFELENGRKRMLASAGELQKGNELALPSKYVNFLYLASHYEKLKGSPEDNEQKQLFVEQHKHYLDEIIEQISEFSKRVILADANLDKVLSAYNKHRDKPIREQAENIIHLFTLTNLGAPAAFKYFDTTIDRKRYTSTKEVLDATLIHQSITGLYETRIDLSQLGGDGGAEAAAKEAAAKEAAAKEAAAKALEAEAAAKEAAAKEAAAKEAAAKAGGVLNLEEEYRLHEKPVPSSIDPSWLQLFPTVWAERAGMGLANQVPPVVVELRSGASPVAVRQYPMSKEAREGIRPHIQRFLDLGVLVPCQSPWNTPLLPVKKPGTNDYRPVQDLREINKRVQDIHPTVPNPYNLLSSLPPSHTWYSVLDLKDAFFCLKLHPNSQPLFAFEWRDPEKGNTGQLTWTRLPQGFKNSPTLFNEALHRDLAPFRALNPQVVLLQYVDDLLVAAPTYRDCKEGTQKLLQELSKLGYRVSAKKAQLCQKEVTYLGYLLKEGKRWLTPARKATVMKIPPPTTPRQVREFLGKAGFCRLFIPGFASLAAPLYPLTKPSIPFIWTEEHQKAFDRIKEALLSAPALALPDLTKPFTLYVDERAGVARGVLTQTLGPWRRPVAYLSKKLDPVASGWPTCLKAVAAVALLLKDADKLTLGQNVTVIASHSLESIVRQPPDRWMTNARMTHYQSLLLNERVSFAPPAVLNPATLLPVESEATPVHRCSEILAEETGTRRDLKDQPLPGVPAWYTDGSSFIAEGKRRAGAAIVDGKRTVWASSLPEGTSAQKAELVALTQALRLAEGKDINIYTDSRYAFATAHIHGAIYKQRGWLTSAGKDIKNKEEILALLEAIHLPKRVAIIHCPGHQKGNDPVATGNRRADEAAKQAALSTRVLAETTKPAGKRTADGSEFEKRTADGSEFESPKKKAKVE

SEQ ID NO: 872 - protein, 2092 aa, synthetic construct
MPAAKRVKLDGGDKKYSIGLDIGTNSVGWAVITDEYKVPSKKFKVLGNTDRHSIKKNLIGALLFDSGETAEATRLKRTARRRYTRRKNRICYLQEIFSNEMAKVDDSFFHRLEESFLVEEDKKHERHPIFGNIVDEVAYHEKYPTIYHLRKKLVDSTDKADLRLIYLALAHMIKFRGHFLIEGDLNPDNSDVDKLFIQLVQTYNQLFEENPINASGVDAKAILSARLSKSRRLENLIAQLPGEKKNGLFGNLIALSLGLTPNFKSNFDLAEDAKLQLSKDTYDDDLDNLLAQIGDQYADLFLAAKNLSDAILLSDILRVNTEITKAPLSASMIKRYDEHHQDLTLLKALVRQQLPEKYKEIFFDQSKNGYAGYIDGGASQEEFYKFIKPILEKMDGTEELLVKLNREDLLRKQRTFDNGSIPHQIHLGELHAILRRQEDFYPFLKDNREKIEKILTFRIPYYVGPLARGNSRFAWMTRKSEETITPWNFEEVVDKGASAQSFIERMTNFDKNLPNEKVLPKHSLLYEYFTVYNELTKVKYVTEGMRKPAFLSGEQKKAIVDLLFKTNRKVTVKQLKEDYFKKIECFDSVEISGVEDRFNASLGTYHDLLKIIKDKDFLDNEENEDILEDIVLTLTLFEDREMIEERLKTYAHLFDDKVMKQLKRRRYTGWGRLSRKLINGIRDKQSGKTILDFLKSDGFANRNFMQLIHDDSLTFKEDIQKAQVSGQGDSLHEHIANLAGSPAIKKGILQTVKVVDELVKVMGRHKPENIVIEMARENQTTQKGQKNSRERMKRIEEGIKELGSQILKEHPVENTQLQNEKLYLYYLQNGRDMYVDQELDINRLSDYDVDHIVPQSFLKDDSIDNKVLTRSDKARGKSDNVPSEEVVKKMKNYWRQLLNAKLITQRKFDNLTKAERGGLSELDKAGFIKRQLVETRQITKHVAQILDSRMNTKYDENDKLIREVKVITLKSKLVSDFRKDFQFYKVREINNYHHAHDAYLNAVVGTALIKKYPKLESEFVYGDYKVYDVRKMIAKSEQEIGKATAKYFFYSNIMNFFKTEITLANGEIRKRPLIETNGETGEIVWDKGRDFATVRKVLSMPQVNIVKKTEVQTGGFSKESILPKRNSDKLIARKKDWDPKKYGGFDSPTVAYSVLVVAKVEKGKSKKLKSVKELLGITIMERSSFEKNPIDFLEAKGYKEVKKDLIIKLPKYSLFELENGRKRMLASAGELQKGNELALPSKYVNFLYLASHYEKLKGSPEDNEQKQLFVEQHKHYLDEIIEQISEFSKRVILADANLDKVLSAYNKHRDKPIREQAENIIHLFTLTNLGAPAAFKYFDTTIDRKRYTSTKEVLDATLIHQSITGLYETRIDLSQLGGDGGPAPGGGGSSGGVLNLEEEYRLHEKPVPSSIDPSWLQLFPTVWAERAGMGLANQVPPVVVELRSGASPVAVRQYPMSKEAREGIRPHIQRFLDLGVLVPCQSPWNTPLLPVKKPGTNDYRPVQDLREINKRVQDIHPTVPNPYNLLSSLPPSHTWYSVLDLKDAFFCLKLHPNSQPLFAFEWRDPEKGNTGQLTWTRLPQGFKNSPTLFNEALHRDLAPFRALNPQVVLLQYVDDLLVAAPTYRDCKEGTQKLLQELSKLGYRVSAKKAQLCQKEVTYLGYLLKEGKRWLTPARKATVMKIPPPTTPRQVREFLGKAGFCRLFIPGFASLAAPLYPLTKPSIPFIWTEEHQKAFDRIKEALLSAPALALPDLTKPFTLYVDERAGVARGVLTQTLGPWRRPVAYLSKKLDPVASGWPTCLKAVAAVALLLKDADKLTLGQNVTVIASHSLESIVRQPPDRWMTNARMTHYQSLLLNERVSFAPPAVLNPATLLPVESEATPVHRCSEILAEETGTRRDLKDQPLPGVPAWYTDGSSFIAEGKRRAGAAIVDGKRTVWASSLPEGTSAQKAELVALTQALRLAEGKDINIYTDSRYAFATAHIHGAIYKQRGWLTSAGKDIKNKEEILALLEAIHLPKRVAIIHCPGHQKGNDPVATGNRRADEAAKQAALSTRVLAETTKPAGKRTADGSEFEKRTADGSEFESPKKKAKVE

SEQ ID NO: 873 - protein, 2108 aa, synthetic construct
MPAAKRVKLDGGDKKYSIGLDIGTNSVGWAVITDEYKVPSKKFKVLGNTDRHSIKKNLIGALLFDSGETAEATRLKRTARRRYTRRKNRICYLQEIFSNEMAKVDDSFFHRLEESFLVEEDKKHERHPIFGNIVDEVAYHEKYPTIYHLRKKLVDSTDKADLRLIYLALAHMIKFRGHFLIEGDLNPDNSDVDKLFIQLVQTYNQLFEENPINASGVDAKAILSARLSKSRRLENLIAQLPGEKKNGLFGNLIALSLGLTPNFKSNFDLAEDAKLQLSKDTYDDDLDNLLAQIGDQYADLFLAAKNLSDAILLSDILRVNTEITKAPLSASMIKRYDEHHQDLTLLKALVRQQLPEKYKEIFFDQSKNGYAGYIDGGASQEEFYKFIKPILEKMDGTEELLVKLNREDLLRKQRTFDNGSIPHQIHLGELHAILRRQEDFYPFLKDNREKIEKILTFRIPYYVGPLARGNSRFAWMTRKSEETITPWNFEEVVDKGASAQSFIERMTNFDKNLPNEKVLPKHSLLYEYFTVYNELTKVKYVTEGMRKPAFLSGEQKKAIVDLLFKTNRKVTVKQLKEDYFKKIECFDSVEISGVEDRFNASLGTYHDLLKIIKDKDFLDNEENEDILEDIVLTLTLFEDREMIEERLKTYAHLFDDKVMKQLKRRRYTGWGRLSRKLINGIRDKQSGKTILDFLKSDGFANRNFMQLIHDDSLTFKEDIQKAQVSGQGDSLHEHIANLAGSPAIKKGILQTVKVVDELVKVMGRHKPENIVIEMARENQTTQKGQKNSRERMKRIEEGIKELGSQILKEHPVENTQLQNEKLYLYYLQNGRDMYVDQELDINRLSDYDVDHIVPQSFLKDDSIDNKVLTRSDKARGKSDNVPSEEVVKKMKNYWRQLLNAKLITQRKFDNLTKAERGGLSELDKAGFIKRQLVETRQITKHVAQILDSRMNTKYDENDKLIREVKVITLKSKLVSDFRKDFQFYKVREINNYHHAHDAYLNAVVGTALIKKYPKLESEFVYGDYKVYDVRKMIAKSEQEIGKATAKYFFYSNIMNFFKTEITLANGEIRKRPLIETNGETGEIVWDKGRDFATVRKVLSMPQVNIVKKTEVQTGGFSKESILPKRNSDKLIARKKDWDPKKYGGFDSPTVAYSVLVVAKVEKGKSKKLKSVKELLGITIMERSSFEKNPIDFLEAKGYKEVKKDLIIKLPKYSLFELENGRKRMLASAGELQKGNELALPSKYVNFLYLASHYEKLKGSPEDNEQKQLFVEQHKHYLDEIIEQISEFSKRVILADANLDKVLSAYNKHRDKPIREQAENIIHLFTLTNLGAPAAFKYFDTTIDRKRYTSTKEVLDATLIHQSITGLYETRIDLSQLGGDGGGGGGSGGGGSGGGGSGGGGSGGGGSGGVLNLEEEYRLHEKPVPSSIDPSWLQLFPTVWAERAGMGLANQVPPVVVELRSGASPVAVRQYPMSKEAREGIRPHIQRFLDLGVLVPCQSPWNTPLLPVKKPGTNDYRPVQDLREINKRVQDIHPTVPNPYNLLSSLPPSHTWYSVLDLKDAFFCLKLHPNSQPLFAFEWRDPEKGNTGQLTWTRLPQGFKNSPTLFNEALHRDLAPFRALNPQVVLLQYVDDLLVAAPTYRDCKEGTQKLLQELSKLGYRVSAKKAQLCQKEVTYLGYLLKEGKRWLTPARKATVMKIPPPTTPRQVREFLGKAGFCRLFIPGFASLAAPLYPLTKPSIPFIWTEEHQKAFDRIKEALLSAPALALPDLTKPFTLYVDERAGVARGVLTQTLGPWRRPVAYLSKKLDPVASGWPTCLKAVAAVALLLKDADKLTLGQNVTVIASHSLESIVRQPPDRWMTNARMTHYQSLLLNERVSFAPPAVLNPATLLPVESEATPVHRCSEILAEETGTRRDLKDQPLPGVPAWYTDGSSFIAEGKRRAGAAIVDGKRTVWASSLPEGTSAQKAELVALTQALRLAEGKDINIYTDSRYAFATAHIHGAIYKQRGWLTSAGKDIKNKEEILALLEAIHLPKRVAIIHCPGHQKGNDPVATGNRRADEAAKQAALSTRVLAETTKPAGKRTADGSEFEKRTADGSEFESPKKKAKVE

SEQ ID NO: 874 - protein, 2094 aa, synthetic construct
MPAAKRVKLDGGDKKYSIGLDIGTNSVGWAVITDEYKVPSKKFKVLGNTDRHSIKKNLIGALLFDSGETAEATRLKRTARRRYTRRKNRICYLQEIFSNEMAKVDDSFFHRLEESFLVEEDKKHERHPIFGNIVDEVAYHEKYPTIYHLRKKLVDSTDKADLRLIYLALAHMIKFRGHFLIEGDLNPDNSDVDKLFIQLVQTYNQLFEENPINASGVDAKAILSARLSKSRRLENLIAQLPGEKKNGLFGNLIALSLGLTPNFKSNFDLAEDAKLQLSKDTYDDDLDNLLAQIGDQYADLFLAAKNLSDAILLSDILRVNTEITKAPLSASMIKRYDEHHQDLTLLKALVRQQLPEKYKEIFFDQSKNGYAGYIDGGASQEEFYKFIKPILEKMDGTEELLVKLNREDLLRKQRTFDNGSIPHQIHLGELHAILRRQEDFYPFLKDNREKIEKILTFRIPYYVGPLARGNSRFAWMTRKSEETITPWNFEEVVDKGASAQSFIERMTNFDKNLPNEKVLPKHSLLYEYFTVYNELTKVKYVTEGMRKPAFLSGEQKKAIVDLLFKTNRKVTVKQLKEDYFKKIECFDSVEISGVEDRFNASLGTYHDLLKIIKDKDFLDNEENEDILEDIVLTLTLFEDREMIEERLKTYAHLFDDKVMKQLKRRRYTGWGRLSRKLINGIRDKQSGKTILDFLKSDGFANRNFMQLIHDDSLTFKEDIQKAQVSGQGDSLHEHIANLAGSPAIKKGILQTVKVVDELVKVMGRHKPENIVIEMARENQTTQKGQKNSRERMKRIEEGIKELGSQILKEHPVENTQLQNEKLYLYYLQNGRDMYVDQELDINRLSDYDVDHIVPQSFLKDDSIDNKVLTRSDKARGKSDNVPSEEVVKKMKNYWRQLLNAKLITQRKFDNLTKAERGGLSELDKAGFIKRQLVETRQITKHVAQILDSRMNTKYDENDKLIREVKVITLKSKLVSDFRKDFQFYKVREINNYHHAHDAYLNAVVGTALIKKYPKLESEFVYGDYKVYDVRKMIAKSEQEIGKATAKYFFYSNIMNFFKTEITLANGEIRKRPLIETNGETGEIVWDKGRDFATVRKVLSMPQVNIVKKTEVQTGGFSKESILPKRNSDKLIARKKDWDPKKYGGFDSPTVAYSVLVVAKVEKGKSKKLKSVKELLGITIMERSSFEKNPIDFLEAKGYKEVKKDLIIKLPKYSLFELENGRKRMLASAGELQKGNELALPSKYVNFLYLASHYEKLKGSPEDNEQKQLFVEQHKHYLDEIIEQISEFSKRVILADANLDKVLSAYNKHRDKPIREQAENIIHLFTLTNLGAPAAFKYFDTTIDRKRYTSTKEVLDATLIHQSITGLYETRIDLSQLGGDGGEAAAKPAPGSSGGVLNLEEEYRLHEKPVPSSIDPSWLQLFPTVWAERAGMGLANQVPPVVVELRSGASPVAVRQYPMSKEAREGIRPHIQRFLDLGVLVPCQSPWNTPLLPVKKPGTNDYRPVQDLREINKRVQDIHPTVPNPYNLLSSLPPSHTWYSVLDLKDAFFCLKLHPNSQPLFAFEWRDPEKGNTGQLTWTRLPQGFKNSPTLFNEALHRDLAPFRALNPQVVLLQYVDDLLVAAPTYRDCKEGTQKLLQELSKLGYRVSAKKAQLCQKEVTYLGYLLKEGKRWLTPARKATVMKIPPPTTPRQVREFLGKAGFCRLFIPGFASLAAPLYPLTKPSIPFIWTEEHQKAFDRIKEALLSAPALALPDLTKPFTLYVDERAGVARGVLTQTLGPWRRPVAYLSKKLDPVASGWPTCLKAVAAVALLLKDADKLTLGQNVTVIASHSLESIVRQPPDRWMTNARMTHYQSLLLNERVSFAPPAVLNPATLLPVESEATPVHRCSEILAEETGTRRDLKDQPLPGVPAWYTDGSSFIAEGKRRAGAAIVDGKRTVWASSLPEGTSAQKAELVALTQALRLAEGKDINIYTDSRYAFATAHIHGAIYKQRGWLTSAGKDIKNKEEILALLEAIHLPKRVAIIHCPGHQKGNDPVATGNRRADEAAKQAALSTRVLAETTKPAGKRTADGSEFEKRTADGSEFESPKKKAKVE

SEQ ID NO: 875 - protein, 2092 aa, synthetic construct
MPAAKRVKLDGGDKKYSIGLDIGTNSVGWAVITDEYKVPSKKFKVLGNTDRHSIKKNLIGALLFDSGETAEATRLKRTARRRYTRRKNRICYLQEIFSNEMAKVDDSFFHRLEESFLVEEDKKHERHPIFGNIVDEVAYHEKYPTIYHLRKKLVDSTDKADLRLIYLALAHMIKFRGHFLIEGDLNPDNSDVDKLFIQLVQTYNQLFEENPINASGVDAKAILSARLSKSRRLENLIAQLPGEKKNGLFGNLIALSLGLTPNFKSNFDLAEDAKLQLSKDTYDDDLDNLLAQIGDQYADLFLAAKNLSDAILLSDILRVNTEITKAPLSASMIKRYDEHHQDLTLLKALVRQQLPEKYKEIFFDQSKNGYAGYIDGGASQEEFYKFIKPILEKMDGTEELLVKLNREDLLRKQRTFDNGSIPHQIHLGELHAILRRQEDFYPFLKDNREKIEKILTFRIPYYVGPLARGNSRFAWMTRKSEETITPWNFEEVVDKGASAQSFIERMTNFDKNLPNEKVLPKHSLLYEYFTVYNELTKVKYVTEGMRKPAFLSGEQKKAIVDLLFKTNRKVTVKQLKEDYFKKIECFDSVEISGVEDRFNASLGTYHDLLKIIKDKDFLDNEENEDILEDIVLTLTLFEDREMIEERLKTYAHLFDDKVMKQLKRRRYTGWGRLSRKLINGIRDKQSGKTILDFLKSDGFANRNFMQLIHDDSLTFKEDIQKAQVSGQGDSLHEHIANLAGSPAIKKGILQTVKVVDELVKVMGRHKPENIVIEMARENQTTQKGQKNSRERMKRIEEGIKELGSQILKEHPVENTQLQNEKLYLYYLQNGRDMYVDQELDINRLSDYDVDHIVPQSFLKDDSIDNKVLTRSDKARGKSDNVPSEEVVKKMKNYWRQLLNAKLITQRKFDNLTKAERGGLSELDKAGFIKRQLVETRQITKHVAQILDSRMNTKYDENDKLIREVKVITLKSKLVSDFRKDFQFYKVREINNYHHAHDAYLNAVVGTALIKKYPKLESEFVYGDYKVYDVRKMIAKSEQEIGKATAKYFFYSNIMNFFKTEITLANGEIRKRPLIETNGETGEIVWDKGRDFATVRKVLSMPQVNIVKKTEVQTGGFSKESILPKRNSDKLIARKKDWDPKKYGGFDSPTVAYSVLVVAKVEKGKSKKLKSVKELLGITIMERSSFEKNPIDFLEAKGYKEVKKDLIIKLPKYSLFELENGRKRMLASAGELQKGNELALPSKYVNFLYLASHYEKLKGSPEDNEQKQLFVEQHKHYLDEIIEQISEFSKRVILADANLDKVLSAYNKHRDKPIREQAENIIHLFTLTNLGAPAAFKYFDTTIDRKRYTSTKEVLDATLIHQSITGLYETRIDLSQLGGDGGGGSPAPGSSGGVLNLEEEYRLHEKPVPSSIDPSWLQLFPTVWAERAGMGLANQVPPVVVELRSGASPVAVRQYPMSKEAREGIRPHIQRFLDLGVLVPCQSPWNTPLLPVKKPGTNDYRPVQDLREINKRVQDIHPTVPNPYNLLSSLPPSHTWYSVLDLKDAFFCLKLHPNSQPLFAFEWRDPEKGNTGQLTWTRLPQGFKNSPTLFNEALHRDLAPFRALNPQVVLLQYVDDLLVAAPTYRDCKEGTQKLLQELSKLGYRVSAKKAQLCQKEVTYLGYLLKEGKRWLTPARKATVMKIPPPTTPRQVREFLGKAGFCRLFIPGFASLAAPLYPLTKPSIPFIWTEEHQKAFDRIKEALLSAPALALPDLTKPFTLYVDERAGVARGVLTQTLGPWRRPVAYLSKKLDPVASGWPTCLKAVAAVALLLKDADKLTLGQNVTVIASHSLESIVRQPPDRWMTNARMTHYQSLLLNERVSFAPPAVLNPATLLPVESEATPVHRCSEILAEETGTRRDLKDQPLPGVPAWYTDGSSFIAEGKRRAGAAIVDGKRTVWASSLPEGTSAQKAELVALTQALRLAEGKDINIYTDSRYAFATAHIHGAIYKQRGWLTSAGKDIKNKEEILALLEAIHLPKRVAIIHCPGHQKGNDPVATGNRRADEAAKQAALSTRVLAETTKPAGKRTADGSEFEKRTADGSEFESPKKKAKVE

SEQ ID NO: 876 - protein, 2086 aa, synthetic construct
MPAAKRVKLDGGDKKYSIGLDIGTNSVGWAVITDEYKVPSKKFKVLGNTDRHSIKKNLIGALLFDSGETAEATRLKRTARRRYTRRKNRICYLQEIFSNEMAKVDDSFFHRLEESFLVEEDKKHERHPIFGNIVDEVAYHEKYPTIYHLRKKLVDSTDKADLRLIYLALAHMIKFRGHFLIEGDLNPDNSDVDKLFIQLVQTYNQLFEENPINASGVDAKAILSARLSKSRRLENLIAQLPGEKKNGLFGNLIALSLGLTPNFKSNFDLAEDAKLQLSKDTYDDDLDNLLAQIGDQYADLFLAAKNLSDAILLSDILRVNTEITKAPLSASMIKRYDEHHQDLTLLKALVRQQLPEKYKEIFFDQSKNGYAGYIDGGASQEEFYKFIKPILEKMDGTEELLVKLNREDLLRKQRTFDNGSIPHQIHLGELHAILRRQEDFYPFLKDNREKIEKILTFRIPYYVGPLARGNSRFAWMTRKSEETITPWNFEEVVDKGASAQSFIERMTNFDKNLPNEKVLPKHSLLYEYFTVYNELTKVKYVTEGMRKPAFLSGEQKKAIVDLLFKTNRKVTVKQLKEDYFKKIECFDSVEISGVEDRFNASLGTYHDLLKIIKDKDFLDNEENEDILEDIVLTLTLFEDREMIEERLKTYAHLFDDKVMKQLKRRRYTGWGRLSRKLINGIRDKQSGKTILDFLKSDGFANRNFMQLIHDDSLTFKEDIQKAQVSGQGDSLHEHIANLAGSPAIKKGILQTVKVVDELVKVMGRHKPENIVIEMARENQTTQKGQKNSRERMKRIEEGIKELGSQILKEHPVENTQLQNEKLYLYYLQNGRDMYVDQELDINRLSDYDVDHIVPQSFLKDDSIDNKVLTRSDKARGKSDNVPSEEVVKKMKNYWRQLLNAKLITQRKFDNLTKAERGGLSELDKAGFIKRQLVETRQITKHVAQILDSRMNTKYDENDKLIREVKVITLKSKLVSDFRKDFQFYKVREINNYHHAHDAYLNAVVGTALIKKYPKLESEFVYGDYKVYDVRKMIAKSEQEIGKATAKYFFYSNIMNFFKTEITLANGEIRKRPLIETNGETGEIVWDKGRDFATVRKVLSMPQVNIVKKTEVQTGGFSKESILPKRNSDKLIARKKDWDPKKYGGFDSPTVAYSVLVVAKVEKGKSKKLKSVKELLGITIMERSSFEKNPIDFLEAKGYKEVKKDLIIKLPKYSLFELENGRKRMLASAGELQKGNELALPSKYVNFLYLASHYEKLKGSPEDNEQKQLFVEQHKHYLDEIIEQISEFSKRVILADANLDKVLSAYNKHRDKPIREQAENIIHLFTLTNLGAPAAFKYFDTTIDRKRYTSTKEVLDATLIHQSITGLYETRIDLSQLGGDGGGSSGGVLNLEEEYRLHEKPVPSSIDPSWLQLFPTVWAERAGMGLANQVPPVVVELRSGASPVAVRQYPMSKEAREGIRPHIQRFLDLGVLVPCQSPWNTPLLPVKKPGTNDYRPVQDLREINKRVQDIHPTVPNPYNLLSSLPPSHTWYSVLDLKDAFFCLKLHPNSQPLFAFEWRDPEKGNTGQLTWTRLPQGFKNSPTLFNEALHRDLAPFRALNPQVVLLQYVDDLLVAAPTYRDCKEGTQKLLQELSKLGYRVSAKKAQLCQKEVTYLGYLLKEGKRWLTPARKATVMKIPPPTTPRQVREFLGKAGFCRLFIPGFASLAAPLYPLTKPSIPFIWTEEHQKAFDRIKEALLSAPALALPDLTKPFTLYVDERAGVARGVLTQTLGPWRRPVAYLSKKLDPVASGWPTCLKAVAAVALLLKDADKLTLGQNVTVIASHSLESIVRQPPDRWMTNARMTHYQSLLLNERVSFAPPAVLNPATLLPVESEATPVHRCSEILAEETGTRRDLKDQPLPGVPAWYTDGSSFIAEGKRRAGAAIVDGKRTVWASSLPEGTSAQKAELVALTQALRLAEGKDINIYTDSRYAFATAHIHGAIYKQRGWLTSAGKDIKNKEEILALLEAIHLPKRVAIIHCPGHQKGNDPVATGNRRADEAAKQAALSTRVLAETTKPAGKRTADGSEFEKRTADGSEFESPKKKAKVE

SEQ ID NO: 877 - protein, 2099 aa, synthetic construct
MPAAKRVKLDGGDKKYSIGLDIGTNSVGWAVITDEYKVPSKKFKVLGNTDRHSIKKNLIGALLFDSGETAEATRLKRTARRRYTRRKNRICYLQEIFSNEMAKVDDSFFHRLEESFLVEEDKKHERHPIFGNIVDEVAYHEKYPTIYHLRKKLVDSTDKADLRLIYLALAHMIKFRGHFLIEGDLNPDNSDVDKLFIQLVQTYNQLFEENPINASGVDAKAILSARLSKSRRLENLIAQLPGEKKNGLFGNLIALSLGLTPNFKSNFDLAEDAKLQLSKDTYDDDLDNLLAQIGDQYADLFLAAKNLSDAILLSDILRVNTEITKAPLSASMIKRYDEHHQDLTLLKALVRQQLPEKYKEIFFDQSKNGYAGYIDGGASQEEFYKFIKPILEKMDGTEELLVKLNREDLLRKQRTFDNGSIPHQIHLGELHAILRRQEDFYPFLKDNREKIEKILTFRIPYYVGPLARGNSRFAWMTRKSEETITPWNFEEVVDKGASAQSFIERMTNFDKNLPNEKVLPKHSLLYEYFTVYNELTKVKYVTEGMRKPAFLSGEQKKAIVDLLFKTNRKVTVKQLKEDYFKKIECFDSVEISGVEDRFNASLGTYHDLLKIIKDKDFLDNEENEDILEDIVLTLTLFEDREMIEERLKTYAHLFDDKVMKQLKRRRYTGWGRLSRKLINGIRDKQSGKTILDFLKSDGFANRNFMQLIHDDSLTFKEDIQKAQVSGQGDSLHEHIANLAGSPAIKKGILQTVKVVDELVKVMGRHKPENIVIEMARENQTTQKGQKNSRERMKRIEEGIKELGSQILKEHPVENTQLQNEKLYLYYLQNGRDMYVDQELDINRLSDYDVDHIVPQSFLKDDSIDNKVLTRSDKARGKSDNVPSEEVVKKMKNYWRQLLNAKLITQRKFDNLTKAERGGLSELDKAGFIKRQLVETRQITKHVAQILDSRMNTKYDENDKLIREVKVITLKSKLVSDFRKDFQFYKVREINNYHHAHDAYLNAVVGTALIKKYPKLESEFVYGDYKVYDVRKMIAKSEQEIGKATAKYFFYSNIMNFFKTEITLANGEIRKRPLIETNGETGEIVWDKGRDFATVRKVLSMPQVNIVKKTEVQTGGFSKESILPKRNSDKLIARKKDWDPKKYGGFDSPTVAYSVLVVAKVEKGKSKKLKSVKELLGITIMERSSFEKNPIDFLEAKGYKEVKKDLIIKLPKYSLFELENGRKRMLASAGELQKGNELALPSKYVNFLYLASHYEKLKGSPEDNEQKQLFVEQHKHYLDEIIEQISEFSKRVILADANLDKVLSAYNKHRDKPIREQAENIIHLFTLTNLGAPAAFKYFDTTIDRKRYTSTKEVLDATLIHQSITGLYETRIDLSQLGGDGGSGSETPGTSESATPESGGVLNLEEEYRLHEKPVPSSIDPSWLQLFPTVWAERAGMGLANQVPPVVVELRSGASPVAVRQYPMSKEAREGIRPHIQRFLDLGVLVPCQSPWNTPLLPVKKPGTNDYRPVQDLREINKRVQDIHPTVPNPYNLLSSLPPSHTWYSVLDLKDAFFCLKLHPNSQPLFAFEWRDPEKGNTGQLTWTRLPQGFKNSPTLFNEALHRDLAPFRALNPQVVLLQYVDDLLVAAPTYRDCKEGTQKLLQELSKLGYRVSAKKAQLCQKEVTYLGYLLKEGKRWLTPARKATVMKIPPPTTPRQVREFLGKAGFCRLFIPGFASLAAPLYPLTKPSIPFIWTEEHQKAFDRIKEALLSAPALALPDLTKPFTLYVDERAGVARGVLTQTLGPWRRPVAYLSKKLDPVASGWPTCLKAVAAVALLLKDADKLTLGQNVTVIASHSLESIVRQPPDRWMTNARMTHYQSLLLNERVSFAPPAVLNPATLLPVESEATPVHRCSEILAEETGTRRDLKDQPLPGVPAWYTDGSSFIAEGKRRAGAAIVDGKRTVWASSLPEGTSAQKAELVALTQALRLAEGKDINIYTDSRYAFATAHIHGAIYKQRGWLTSAGKDIKNKEEILALLEAIHLPKRVAIIHCPGHQKGNDPVATGNRRADEAAKQAALSTRVLAETTKPAGKRTADGSEFEKRTADGSEFESPKKKAKVE

SEQ ID NO: 878 - protein, 2092 aa, synthetic construct
MPAAKRVKLDGGDKKYSIGLDIGTNSVGWAVITDEYKVPSKKFKVLGNTDRHSIKKNLIGALLFDSGETAEATRLKRTARRRYTRRKNRICYLQEIFSNEMAKVDDSFFHRLEESFLVEEDKKHERHPIFGNIVDEVAYHEKYPTIYHLRKKLVDSTDKADLRLIYLALAHMIKFRGHFLIEGDLNPDNSDVDKLFIQLVQTYNQLFEENPINASGVDAKAILSARLSKSRRLENLIAQLPGEKKNGLFGNLIALSLGLTPNFKSNFDLAEDAKLQLSKDTYDDDLDNLLAQIGDQYADLFLAAKNLSDAILLSDILRVNTEITKAPLSASMIKRYDEHHQDLTLLKALVRQQLPEKYKEIFFDQSKNGYAGYIDGGASQEEFYKFIKPILEKMDGTEELLVKLNREDLLRKQRTFDNGSIPHQIHLGELHAILRRQEDFYPFLKDNREKIEKILTFRIPYYVGPLARGNSRFAWMTRKSEETITPWNFEEVVDKGASAQSFIERMTNFDKNLPNEKVLPKHSLLYEYFTVYNELTKVKYVTEGMRKPAFLSGEQKKAIVDLLFKTNRKVTVKQLKEDYFKKIECFDSVEISGVEDRFNASLGTYHDLLKIIKDKDFLDNEENEDILEDIVLTLTLFEDREMIEERLKTYAHLFDDKVMKQLKRRRYTGWGRLSRKLINGIRDKQSGKTILDFLKSDGFANRNFMQLIHDDSLTFKEDIQKAQVSGQGDSLHEHIANLAGSPAIKKGILQTVKVVDELVKVMGRHKPENIVIEMARENQTTQKGQKNSRERMKRIEEGIKELGSQILKEHPVENTQLQNEKLYLYYLQNGRDMYVDQELDINRLSDYDVDHIVPQSFLKDDSIDNKVLTRSDKARGKSDNVPSEEVVKKMKNYWRQLLNAKLITQRKFDNLTKAERGGLSELDKAGFIKRQLVETRQITKHVAQILDSRMNTKYDENDKLIREVKVITLKSKLVSDFRKDFQFYKVREINNYHHAHDAYLNAVVGTALIKKYPKLESEFVYGDYKVYDVRKMIAKSEQEIGKATAKYFFYSNIMNFFKTEITLANGEIRKRPLIETNGETGEIVWDKGRDFATVRKVLSMPQVNIVKKTEVQTGGFSKESILPKRNSDKLIARKKDWDPKKYGGFDSPTVAYSVLVVAKVEKGKSKKLKSVKELLGITIMERSSFEKNPIDFLEAKGYKEVKKDLIIKLPKYSLFELENGRKRMLASAGELQKGNELALPSKYVNFLYLASHYEKLKGSPEDNEQKQLFVEQHKHYLDEIIEQISEFSKRVILADANLDKVLSAYNKHRDKPIREQAENIIHLFTLTNLGAPAAFKYFDTTIDRKRYTSTKEVLDATLIHQSITGLYETRIDLSQLGGDGGGGGPAPGGSGGVLNLEEEYRLHEKPVPSSIDPSWLQLFPTVWAERAGMGLANQVPPVVVELRSGASPVAVRQYPMSKEAREGIRPHIQRFLDLGVLVPCQSPWNTPLLPVKKPGTNDYRPVQDLREINKRVQDIHPTVPNPYNLLSSLPPSHTWYSVLDLKDAFFCLKLHPNSQPLFAFEWRDPEKGNTGQLTWTRLPQGFKNSPTLFNEALHRDLAPFRALNPQVVLLQYVDDLLVAAPTYRDCKEGTQKLLQELSKLGYRVSAKKAQLCQKEVTYLGYLLKEGKRWLTPARKATVMKIPPPTTPRQVREFLGKAGFCRLFIPGFASLAAPLYPLTKPSIPFIWTEEHQKAFDRIKEALLSAPALALPDLTKPFTLYVDERAGVARGVLTQTLGPWRRPVAYLSKKLDPVASGWPTCLKAVAAVALLLKDADKLTLGQNVTVIASHSLESIVRQPPDRWMTNARMTHYQSLLLNERVSFAPPAVLNPATLLPVESEATPVHRCSEILAEETGTRRDLKDQPLPGVPAWYTDGSSFIAEGKRRAGAAIVDGKRTVWASSLPEGTSAQKAELVALTQALRLAEGKDINIYTDSRYAFATAHIHGAIYKQRGWLTSAGKDIKNKEEILALLEAIHLPKRVAIIHCPGHQKGNDPVATGNRRADEAAKQAALSTRVLAETTKPAGKRTADGSEFEKRTADGSEFESPKKKAKVE

SEQ ID NO: 879 - protein, 2108 aa, synthetic construct
MPAAKRVKLDGGDKKYSIGLDIGTNSVGWAVITDEYKVPSKKFKVLGNTDRHSIKKNLIGALLFDSGETAEATRLKRTARRRYTRRKNRICYLQEIFSNEMAKVDDSFFHRLEESFLVEEDKKHERHPIFGNIVDEVAYHEKYPTIYHLRKKLVDSTDKADLRLIYLALAHMIKFRGHFLIEGDLNPDNSDVDKLFIQLVQTYNQLFEENPINASGVDAKAILSARLSKSRRLENLIAQLPGEKKNGLFGNLIALSLGLTPNFKSNFDLAEDAKLQLSKDTYDDDLDNLLAQIGDQYADLFLAAKNLSDAILLSDILRVNTEITKAPLSASMIKRYDEHHQDLTLLKALVRQQLPEKYKEIFFDQSKNGYAGYIDGGASQEEFYKFIKPILEKMDGTEELLVKLNREDLLRKQRTFDNGSIPHQIHLGELHAILRRQEDFYPFLKDNREKIEKILTFRIPYYVGPLARGNSRFAWMTRKSEETITPWNFEEVVDKGASAQSFIERMTNFDKNLPNEKVLPKHSLLYEYFTVYNELTKVKYVTEGMRKPAFLSGEQKKAIVDLLFKTNRKVTVKQLKEDYFKKIECFDSVEISGVEDRFNASLGTYHDLLKIIKDKDFLDNEENEDILEDIVLTLTLFEDREMIEERLKTYAHLFDDKVMKQLKRRRYTGWGRLSRKLINGIRDKQSGKTILDFLKSDGFANRNFMQLIHDDSLTFKEDIQKAQVSGQGDSLHEHIANLAGSPAIKKGILQTVKVVDELVKVMGRHKPENIVIEMARENQTTQKGQKNSRERMKRIEEGIKELGSQILKEHPVENTQLQNEKLYLYYLQNGRDMYVDQELDINRLSDYDVDHIVPQSFLKDDSIDNKVLTRSDKARGKSDNVPSEEVVKKMKNYWRQLLNAKLITQRKFDNLTKAERGGLSELDKAGFIKRQLVETRQITKHVAQILDSRMNTKYDENDKLIREVKVITLKSKLVSDFRKDFQFYKVREINNYHHAHDAYLNAVVGTALIKKYPKLESEFVYGDYKVYDVRKMIAKSEQEIGKATAKYFFYSNIMNFFKTEITLANGEIRKRPLIETNGETGEIVWDKGRDFATVRKVLSMPQVNIVKKTEVQTGGFSKESILPKRNSDKLIARKKDWDPKKYGGFDSPTVAYSVLVVAKVEKGKSKKLKSVKELLGITIMERSSFEKNPIDFLEAKGYKEVKKDLIIKLPKYSLFELENGRKRMLASAGELQKGNELALPSKYVNFLYLASHYEKLKGSPEDNEQKQLFVEQHKHYLDEIIEQISEFSKRVILADANLDKVLSAYNKHRDKPIREQAENIIHLFTLTNLGAPAAFKYFDTTIDRKRYTSTKEVLDATLIHQSITGLYETRIDLSQLGGDGGEAAAKEAAAKEAAAKEAAAKEAAAKGGVLNLEEEYRLHEKPVPSSIDPSWLQLFPTVWAERAGMGLANQVPPVVVELRSGASPVAVRQYPMSKEAREGIRPHIQRFLDLGVLVPCQSPWNTPLLPVKKPGTNDYRPVQDLREINKRVQDIHPTVPNPYNLLSSLPPSHTWYSVLDLKDAFFCLKLHPNSQPLFAFEWRDPEKGNTGQLTWTRLPQGFKNSPTLFNEALHRDLAPFRALNPQVVLLQYVDDLLVAAPTYRDCKEGTQKLLQELSKLGYRVSAKKAQLCQKEVTYLGYLLKEGKRWLTPARKATVMKIPPPTTPRQVREFLGKAGFCRLFIPGFASLAAPLYPLTKPSIPFIWTEEHQKAFDRIKEALLSAPALALPDLTKPFTLYVDERAGVARGVLTQTLGPWRRPVAYLSKKLDPVASGWPTCLKAVAAVALLLKDADKLTLGQNVTVIASHSLESIVRQPPDRWMTNARMTHYQSLLLNERVSFAPPAVLNPATLLPVESEATPVHRCSEILAEETGTRRDLKDQPLPGVPAWYTDGSSFIAEGKRRAGAAIVDGKRTVWASSLPEGTSAQKAELVALTQALRLAEGKDINIYTDSRYAFATAHIHGAIYKQRGWLTSAGKDIKNKEEILALLEAIHLPKRVAIIHCPGHQKGNDPVATGNRRADEAAKQAALSTRVLAETTKPAGKRTADGSEFEKRTADGSEFESPKKKAKVE

SEQ ID NO: 880 - protein, 2092 aa, synthetic construct
MPAAKRVKLDGGDKKYSIGLDIGTNSVGWAVITDEYKVPSKKFKVLGNTDRHSIKKNLIGALLFDSGETAEATRLKRTARRRYTRRKNRICYLQEIFSNEMAKVDDSFFHRLEESFLVEEDKKHERHPIFGNIVDEVAYHEKYPTIYHLRKKLVDSTDKADLRLIYLALAHMIKFRGHFLIEGDLNPDNSDVDKLFIQLVQTYNQLFEENPINASGVDAKAILSARLSKSRRLENLIAQLPGEKKNGLFGNLIALSLGLTPNFKSNFDLAEDAKLQLSKDTYDDDLDNLLAQIGDQYADLFLAAKNLSDAILLSDILRVNTEITKAPLSASMIKRYDEHHQDLTLLKALVRQQLPEKYKEIFFDQSKNGYAGYIDGGASQEEFYKFIKPILEKMDGTEELLVKLNREDLLRKQRTFDNGSIPHQIHLGELHAILRRQEDFYPFLKDNREKIEKILTFRIPYYVGPLARGNSRFAWMTRKSEETITPWNFEEVVDKGASAQSFIERMTNFDKNLPNEKVLPKHSLLYEYFTVYNELTKVKYVTEGMRKPAFLSGEQKKAIVDLLFKTNRKVTVKQLKEDYFKKIECFDSVEISGVEDRFNASLGTYHDLLKIIKDKDFLDNEENEDILEDIVLTLTLFEDREMIEERLKTYAHLFDDKVMKQLKRRRYTGWGRLSRKLINGIRDKQSGKTILDFLKSDGFANRNFMQLIHDDSLTFKEDIQKAQVSGQGDSLHEHIANLAGSPAIKKGILQTVKVVDELVKVMGRHKPENIVIEMARENQTTQKGQKNSRERMKRIEEGIKELGSQILKEHPVENTQLQNEKLYLYYLQNGRDMYVDQELDINRLSDYDVDHIVPQSFLKDDSIDNKVLTRSDKARGKSDNVPSEEVVKKMKNYWRQLLNAKLITQRKFDNLTKAERGGLSELDKAGFIKRQLVETRQITKHVAQILDSRMNTKYDENDKLIREVKVITLKSKLVSDFRKDFQFYKVREINNYHHAHDAYLNAVVGTALIKKYPKLESEFVYGDYKVYDVRKMIAKSEQEIGKATAKYFFYSNIMNFFKTEITLANGEIRKRPLIETNGETGEIVWDKGRDFATVRKVLSMPQVNIVKKTEVQTGGFSKESILPKRNSDKLIARKKDWDPKKYGGFDSPTVAYSVLVVAKVEKGKSKKLKSVKELLGITIMERSSFEKNPIDFLEAKGYKEVKKDLIIKLPKYSLFELENGRKRMLASAGELQKGNELALPSKYVNFLYLASHYEKLKGSPEDNEQKQLFVEQHKHYLDEIIEQISEFSKRVILADANLDKVLSAYNKHRDKPIREQAENIIHLFTLTNLGAPAAFKYFDTTIDRKRYTSTKEVLDATLIHQSITGLYETRIDLSQLGGDGGPAPGGSGSSGGVLNLEEEYRLHEKPVPSSIDPSWLQLFPTVWAERAGMGLANQVPPVVVELRSGASPVAVRQYPMSKEAREGIRPHIQRFLDLGVLVPCQSPWNTPLLPVKKPGTNDYRPVQDLREINKRVQDIHPTVPNPYNLLSSLPPSHTWYSVLDLKDAFFCLKLHPNSQPLFAFEWRDPEKGNTGQLTWTRLPQGFKNSPTLFNEALHRDLAPFRALNPQVVLLQYVDDLLVAAPTYRDCKEGTQKLLQELSKLGYRVSAKKAQLCQKEVTYLGYLLKEGKRWLTPARKATVMKIPPPTTPRQVREFLGKAGFCRLFIPGFASLAAPLYPLTKPSIPFIWTEEHQKAFDRIKEALLSAPALALPDLTKPFTLYVDERAGVARGVLTQTLGPWRRPVAYLSKKLDPVASGWPTCLKAVAAVALLLKDADKLTLGQNVTVIASHSLESIVRQPPDRWMTNARMTHYQSLLLNERVSFAPPAVLNPATLLPVESEATPVHRCSEILAEETGTRRDLKDQPLPGVPAWYTDGSSFIAEGKRRAGAAIVDGKRTVWASSLPEGTSAQKAELVALTQALRLAEGKDINIYTDSRYAFATAHIHGAIYKQRGWLTSAGKDIKNKEEILALLEAIHLPKRVAIIHCPGHQKGNDPVATGNRRADEAAKQAALSTRVLAETTKPAGKRTADGSEFEKRTADGSEFESPKKKAKVE

SEQ ID NO: 881 - protein, 2089 aa, synthetic construct
MPAAKRVKLDGGDKKYSIGLDIGTNSVGWAVITDEYKVPSKKFKVLGNTDRHSIKKNLIGALLFDSGETAEATRLKRTARRRYTRRKNRICYLQEIFSNEMAKVDDSFFHRLEESFLVEEDKKHERHPIFGNIVDEVAYHEKYPTIYHLRKKLVDSTDKADLRLIYLALAHMIKFRGHFLIEGDLNPDNSDVDKLFIQLVQTYNQLFEENPINASGVDAKAILSARLSKSRRLENLIAQLPGEKKNGLFGNLIALSLGLTPNFKSNFDLAEDAKLQLSKDTYDDDLDNLLAQIGDQYADLFLAAKNLSDAILLSDILRVNTEITKAPLSASMIKRYDEHHQDLTLLKALVRQQLPEKYKEIFFDQSKNGYAGYIDGGASQEEFYKFIKPILEKMDGTEELLVKLNREDLLRKQRTFDNGSIPHQIHLGELHAILRRQEDFYPFLKDNREKIEKILTFRIPYYVGPLARGNSRFAWMTRKSEETITPWNFEEVVDKGASAQSFIERMTNFDKNLPNEKVLPKHSLLYEYFTVYNELTKVKYVTEGMRKPAFLSGEQKKAIVDLLFKTNRKVTVKQLKEDYFKKIECFDSVEISGVEDRFNASLGTYHDLLKIIKDKDFLDNEENEDILEDIVLTLTLFEDREMIEERLKTYAHLFDDKVMKQLKRRRYTGWGRLSRKLINGIRDKQSGKTILDFLKSDGFANRNFMQLIHDDSLTFKEDIQKAQVSGQGDSLHEHIANLAGSPAIKKGILQTVKVVDELVKVMGRHKPENIVIEMARENQTTQKGQKNSRERMKRIEEGIKELGSQILKEHPVENTQLQNEKLYLYYLQNGRDMYVDQELDINRLSDYDVDHIVPQSFLKDDSIDNKVLTRSDKARGKSDNVPSEEVVKKMKNYWRQLLNAKLITQRKFDNLTKAERGGLSELDKAGFIKRQLVETRQITKHVAQILDSRMNTKYDENDKLIREVKVITLKSKLVSDFRKDFQFYKVREINNYHHAHDAYLNAVVGTALIKKYPKLESEFVYGDYKVYDVRKMIAKSEQEIGKATAKYFFYSNIMNFFKTEITLANGEIRKRPLIETNGETGEIVWDKGRDFATVRKVLSMPQVNIVKKTEVQTGGFSKESILPKRNSDKLIARKKDWDPKKYGGFDSPTVAYSVLVVAKVEKGKSKKLKSVKELLGITIMERSSFEKNPIDFLEAKGYKEVKKDLIIKLPKYSLFELENGRKRMLASAGELQKGNELALPSKYVNFLYLASHYEKLKGSPEDNEQKQLFVEQHKHYLDEIIEQISEFSKRVILADANLDKVLSAYNKHRDKPIREQAENIIHLFTLTNLGAPAAFKYFDTTIDRKRYTSTKEVLDATLIHQSITGLYETRIDLSQLGGDGGGGSGSSGGVLNLEEEYRLHEKPVPSSIDPSWLQLFPTVWAERAGMGLANQVPPVVVELRSGASPVAVRQYPMSKEAREGIRPHIQRFLDLGVLVPCQSPWNTPLLPVKKPGTNDYRPVQDLREINKRVQDIHPTVPNPYNLLSSLPPSHTWYSVLDLKDAFFCLKLHPNSQPLFAFEWRDPEKGNTGQLTWTRLPQGFKNSPTLFNEALHRDLAPFRALNPQVVLLQYVDDLLVAAPTYRDCKEGTQKLLQELSKLGYRVSAKKAQLCQKEVTYLGYLLKEGKRWLTPARKATVMKIPPPTTPRQVREFLGKAGFCRLFIPGFASLAAPLYPLTKPSIPFIWTEEHQKAFDRIKEALLSAPALALPDLTKPFTLYVDERAGVARGVLTQTLGPWRRPVAYLSKKLDPVASGWPTCLKAVAAVALLLKDADKLTLGQNVTVIASHSLESIVRQPPDRWMTNARMTHYQSLLLNERVSFAPPAVLNPATLLPVESEATPVHRCSEILAEETGTRRDLKDQPLPGVPAWYTDGSSFIAEGKRRAGAAIVDGKRTVWASSLPEGTSAQKAELVALTQALRLAEGKDINIYTDSRYAFATAHIHGAIYKQRGWLTSAGKDIKNKEEILALLEAIHLPKRVAIIHCPGHQKGNDPVATGNRRADEAAKQAALSTRVLAETTKPAGKRTADGSEFEKRTADGSEFESPKKKAKVE

SEQ ID NO: 882 - protein, 2089 aa, synthetic construct
MPAAKRVKLDGGDKKYSIGLDIGTNSVGWAVITDEYKVPSKKFKVLGNTDRHSIKKNLIGALLFDSGETAEATRLKRTARRRYTRRKNRICYLQEIFSNEMAKVDDSFFHRLEESFLVEEDKKHERHPIFGNIVDEVAYHEKYPTIYHLRKKLVDSTDKADLRLIYLALAHMIKFRGHFLIEGDLNPDNSDVDKLFIQLVQTYNQLFEENPINASGVDAKAILSARLSKSRRLENLIAQLPGEKKNGLFGNLIALSLGLTPNFKSNFDLAEDAKLQLSKDTYDDDLDNLLAQIGDQYADLFLAAKNLSDAILLSDILRVNTEITKAPLSASMIKRYDEHHQDLTLLKALVRQQLPEKYKEIFFDQSKNGYAGYIDGGASQEEFYKFIKPILEKMDGTEELLVKLNREDLLRKQRTFDNGSIPHQIHLGELHAILRRQEDFYPFLKDNREKIEKILTFRIPYYVGPLARGNSRFAWMTRKSEETITPWNFEEVVDKGASAQSFIERMTNFDKNLPNEKVLPKHSLLYEYFTVYNELTKVKYVTEGMRKPAFLSGEQKKAIVDLLFKTNRKVTVKQLKEDYFKKIECFDSVEISGVEDRFNASLGTYHDLLKIIKDKDFLDNEENEDILEDIVLTLTLFEDREMIEERLKTYAHLFDDKVMKQLKRRRYTGWGRLSRKLINGIRDKQSGKTILDFLKSDGFANRNFMQLIHDDSLTFKEDIQKAQVSGQGDSLHEHIANLAGSPAIKKGILQTVKVVDELVKVMGRHKPENIVIEMARENQTTQKGQKNSRERMKRIEEGIKELGSQILKEHPVENTQLQNEKLYLYYLQNGRDMYVDQELDINRLSDYDVDHIVPQSFLKDDSIDNKVLTRSDKARGKSDNVPSEEVVKKMKNYWRQLLNAKLITQRKFDNLTKAERGGLSELDKAGFIKRQLVETRQITKHVAQILDSRMNTKYDENDKLIREVKVITLKSKLVSDFRKDFQFYKVREINNYHHAHDAYLNAVVGTALIKKYPKLESEFVYGDYKVYDVRKMIAKSEQEIGKATAKYFFYSNIMNFFKTEITLANGEIRKRPLIETNGETGEIVWDKGRDFATVRKVLSMPQVNIVKKTEVQTGGFSKESILPKRNSDKLIARKKDWDPKKYGGFDSPTVAYSVLVVAKVEKGKSKKLKSVKELLGITIMERSSFEKNPIDFLEAKGYKEVKKDLIIKLPKYSLFELENGRKRMLASAGELQKGNELALPSKYVNFLYLASHYEKLKGSPEDNEQKQLFVEQHKHYLDEIIEQISEFSKRVILADANLDKVLSAYNKHRDKPIREQAENIIHLFTLTNLGAPAAFKYFDTTIDRKRYTSTKEVLDATLIHQSITGLYETRIDLSQLGGDGGGGGGGGGGVLNLEEEYRLHEKPVPSSIDPSWLQLFPTVWAERAGMGLANQVPPVVVELRSGASPVAVRQYPMSKEAREGIRPHIQRFLDLGVLVPCQSPWNTPLLPVKKPGTNDYRPVQDLREINKRVQDIHPTVPNPYNLLSSLPPSHTWYSVLDLKDAFFCLKLHPNSQPLFAFEWRDPEKGNTGQLTWTRLPQGFKNSPTLFNEALHRDLAPFRALNPQVVLLQYVDDLLVAAPTYRDCKEGTQKLLQELSKLGYRVSAKKAQLCQKEVTYLGYLLKEGKRWLTPARKATVMKIPPPTTPRQVREFLGKAGFCRLFIPGFASLAAPLYPLTKPSIPFIWTEEHQKAFDRIKEALLSAPALALPDLTKPFTLYVDERAGVARGVLTQTLGPWRRPVAYLSKKLDPVASGWPTCLKAVAAVALLLKDADKLTLGQNVTVIASHSLESIVRQPPDRWMTNARMTHYQSLLLNERVSFAPPAVLNPATLLPVESEATPVHRCSEILAEETGTRRDLKDQPLPGVPAWYTDGSSFIAEGKRRAGAAIVDGKRTVWASSLPEGTSAQKAELVALTQALRLAEGKDINIYTDSRYAFATAHIHGAIYKQRGWLTSAGKDIKNKEEILALLEAIHLPKRVAIIHCPGHQKGNDPVATGNRRADEAAKQAALSTRVLAETTKPAGKRTADGSEFEKRTADGSEFESPKKKAKVE

SEQ ID NO: 883 - protein, 2091 aa, synthetic construct
MPAAKRVKLDGGDKKYSIGLDIGTNSVGWAVITDEYKVPSKKFKVLGNTDRHSIKKNLIGALLFDSGETAEATRLKRTARRRYTRRKNRICYLQEIFSNEMAKVDDSFFHRLEESFLVEEDKKHERHPIFGNIVDEVAYHEKYPTIYHLRKKLVDSTDKADLRLIYLALAHMIKFRGHFLIEGDLNPDNSDVDKLFIQLVQTYNQLFEENPINASGVDAKAILSARLSKSRRLENLIAQLPGEKKNGLFGNLIALSLGLTPNFKSNFDLAEDAKLQLSKDTYDDDLDNLLAQIGDQYADLFLAAKNLSDAILLSDILRVNTEITKAPLSASMIKRYDEHHQDLTLLKALVRQQLPEKYKEIFFDQSKNGYAGYIDGGASQEEFYKFIKPILEKMDGTEELLVKLNREDLLRKQRTFDNGSIPHQIHLGELHAILRRQEDFYPFLKDNREKIEKILTFRIPYYVGPLARGNSRFAWMTRKSEETITPWNFEEVVDKGASAQSFIERMTNFDKNLPNEKVLPKHSLLYEYFTVYNELTKVKYVTEGMRKPAFLSGEQKKAIVDLLFKTNRKVTVKQLKEDYFKKIECFDSVEISGVEDRFNASLGTYHDLLKIIKDKDFLDNEENEDILEDIVLTLTLFEDREMIEERLKTYAHLFDDKVMKQLKRRRYTGWGRLSRKLINGIRDKQSGKTILDFLKSDGFANRNFMQLIHDDSLTFKEDIQKAQVSGQGDSLHEHIANLAGSPAIKKGILQTVKVVDELVKVMGRHKPENIVIEMARENQTTQKGQKNSRERMKRIEEGIKELGSQILKEHPVENTQLQNEKLYLYYLQNGRDMYVDQELDINRLSDYDVDHIVPQSFLKDDSIDNKVLTRSDKARGKSDNVPSEEVVKKMKNYWRQLLNAKLITQRKFDNLTKAERGGLSELDKAGFIKRQLVETRQITKHVAQILDSRMNTKYDENDKLIREVKVITLKSKLVSDFRKDFQFYKVREINNYHHAHDAYLNAVVGTALIKKYPKLESEFVYGDYKVYDVRKMIAKSEQEIGKATAKYFFYSNIMNFFKTEITLANGEIRKRPLIETNGETGEIVWDKGRDFATVRKVLSMPQVNIVKKTEVQTGGFSKESILPKRNSDKLIARKKDWDPKKYGGFDSPTVAYSVLVVAKVEKGKSKKLKSVKELLGITIMERSSFEKNPIDFLEAKGYKEVKKDLIIKLPKYSLFELENGRKRMLASAGELQKGNELALPSKYVNFLYLASHYEKLKGSPEDNEQKQLFVEQHKHYLDEIIEQISEFSKRVILADANLDKVLSAYNKHRDKPIREQAENIIHLFTLTNLGAPAAFKYFDTTIDRKRYTSTKEVLDATLIHQSITGLYETRIDLSQLGGDGGGSSEAAAKGGVLNLEEEYRLHEKPVPSSIDPSWLQLFPTVWAERAGMGLANQVPPVVVELRSGASPVAVRQYPMSKEAREGIRPHIQRFLDLGVLVPCQSPWNTPLLPVKKPGTNDYRPVQDLREINKRVQDIHPTVPNPYNLLSSLPPSHTWYSVLDLKDAFFCLKLHPNSQPLFAFEWRDPEKGNTGQLTWTRLPQGFKNSPTLFNEALHRDLAPFRALNPQVVLLQYVDDLLVAAPTYRDCKEGTQKLLQELSKLGYRVSAKKAQLCQKEVTYLGYLLKEGKRWLTPARKATVMKIPPPTTPRQVREFLGKAGFCRLFIPGFASLAAPLYPLTKPSIPFIWTEEHQKAFDRIKEALLSAPALALPDLTKPFTLYVDERAGVARGVLTQTLGPWRRPVAYLSKKLDPVASGWPTCLKAVAAVALLLKDADKLTLGQNVTVIASHSLESIVRQPPDRWMTNARMTHYQSLLLNERVSFAPPAVLNPATLLPVESEATPVHRCSEILAEETGTRRDLKDQPLPGVPAWYTDGSSFIAEGKRRAGAAIVDGKRTVWASSLPEGTSAQKAELVALTQALRLAEGKDINIYTDSRYAFATAHIHGAIYKQRGWLTSAGKDIKNKEEILALLEAIHLPKRVAIIHCPGHQKGNDPVATGNRRADEAAKQAALSTRVLAETTKPAGKRTADGSEFEKRTADGSEFESPKKKAKVE

SEQ ID NO: 884 - protein, 2089 aa, synthetic construct
MPAAKRVKLDGGDKKYSIGLDIGTNSVGWAVITDEYKVPSKKFKVLGNTDRHSIKKNLIGALLFDSGETAEATRLKRTARRRYTRRKNRICYLQEIFSNEMAKVDDSFFHRLEESFLVEEDKKHERHPIFGNIVDEVAYHEKYPTIYHLRKKLVDSTDKADLRLIYLALAHMIKFRGHFLIEGDLNPDNSDVDKLFIQLVQTYNQLFEENPINASGVDAKAILSARLSKSRRLENLIAQLPGEKKNGLFGNLIALSLGLTPNFKSNFDLAEDAKLQLSKDTYDDDLDNLLAQIGDQYADLFLAAKNLSDAILLSDILRVNTEITKAPLSASMIKRYDEHHQDLTLLKALVRQQLPEKYKEIFFDQSKNGYAGYIDGGASQEEFYKFIKPILEKMDGTEELLVKLNREDLLRKQRTFDNGSIPHQIHLGELHAILRRQEDFYPFLKDNREKIEKILTFRIPYYVGPLARGNSRFAWMTRKSEETITPWNFEEVVDKGASAQSFIERMTNFDKNLPNEKVLPKHSLLYEYFTVYNELTKVKYVTEGMRKPAFLSGEQKKAIVDLLFKTNRKVTVKQLKEDYFKKIECFDSVEISGVEDRFNASLGTYHDLLKIIKDKDFLDNEENEDILEDIVLTLTLFEDREMIEERLKTYAHLFDDKVMKQLKRRRYTGWGRLSRKLINGIRDKQSGKTILDFLKSDGFANRNFMQLIHDDSLTFKEDIQKAQVSGQGDSLHEHIANLAGSPAIKKGILQTVKVVDELVKVMGRHKPENIVIEMARENQTTQKGQKNSRERMKRIEEGIKELGSQILKEHPVENTQLQNEKLYLYYLQNGRDMYVDQELDINRLSDYDVDHIVPQSFLKDDSIDNKVLTRSDKARGKSDNVPSEEVVKKMKNYWRQLLNAKLITQRKFDNLTKAERGGLSELDKAGFIKRQLVETRQITKHVAQILDSRMNTKYDENDKLIREVKVITLKSKLVSDFRKDFQFYKVREINNYHHAHDAYLNAVVGTALIKKYPKLESEFVYGDYKVYDVRKMIAKSEQEIGKATAKYFFYSNIMNFFKTEITLANGEIRKRPLIETNGETGEIVWDKGRDFATVRKVLSMPQVNIVKKTEVQTGGFSKESILPKRNSDKLIARKKDWDPKKYGGFDSPTVAYSVLVVAKVEKGKSKKLKSVKELLGITIMERSSFEKNPIDFLEAKGYKEVKKDLIIKLPKYSLFELENGRKRMLASAGELQKGNELALPSKYVNFLYLASHYEKLKGSPEDNEQKQLFVEQHKHYLDEIIEQISEFSKRVILADANLDKVLSAYNKHRDKPIREQAENIIHLFTLTNLGAPAAFKYFDTTIDRKRYTSTKEVLDATLIHQSITGLYETRIDLSQLGGDGGGSSPAPGGVLNLEEEYRLHEKPVPSSIDPSWLQLFPTVWAERAGMGLANQVPPVVVELRSGASPVAVRQYPMSKEAREGIRPHIQRFLDLGVLVPCQSPWNTPLLPVKKPGTNDYRPVQDLREINKRVQDIHPTVPNPYNLLSSLPPSHTWYSVLDLKDAFFCLKLHPNSQPLFAFEWRDPEKGNTGQLTWTRLPQGFKNSPTLFNEALHRDLAPFRALNPQVVLLQYVDDLLVAAPTYRDCKEGTQKLLQELSKLGYRVSAKKAQLCQKEVTYLGYLLKEGKRWLTPARKATVMKIPPPTTPRQVREFLGKAGFCRLFIPGFASLAAPLYPLTKPSIPFIWTEEHQKAFDRIKEALLSAPALALPDLTKPFTLYVDERAGVARGVLTQTLGPWRRPVAYLSKKLDPVASGWPTCLKAVAAVALLLKDADKLTLGQNVTVIASHSLESIVRQPPDRWMTNARMTHYQSLLLNERVSFAPPAVLNPATLLPVESEATPVHRCSEILAEETGTRRDLKDQPLPGVPAWYTDGSSFIAEGKRRAGAAIVDGKRTVWASSLPEGTSAQKAELVALTQALRLAEGKDINIYTDSRYAFATAHIHGAIYKQRGWLTSAGKDIKNKEEILALLEAIHLPKRVAIIHCPGHQKGNDPVATGNRRADEAAKQAALSTRVLAETTKPAGKRTADGSEFEKRTADGSEFESPKKKAKVE

SEQ ID NO: 885 - protein, 2092 aa, synthetic construct
MPAAKRVKLDGGDKKYSIGLDIGTNSVGWAVITDEYKVPSKKFKVLGNTDRHSIKKNLIGALLFDSGETAEATRLKRTARRRYTRRKNRICYLQEIFSNEMAKVDDSFFHRLEESFLVEEDKKHERHPIFGNIVDEVAYHEKYPTIYHLRKKLVDSTDKADLRLIYLALAHMIKFRGHFLIEGDLNPDNSDVDKLFIQLVQTYNQLFEENPINASGVDAKAILSARLSKSRRLENLIAQLPGEKKNGLFGNLIALSLGLTPNFKSNFDLAEDAKLQLSKDTYDDDLDNLLAQIGDQYADLFLAAKNLSDAILLSDILRVNTEITKAPLSASMIKRYDEHHQDLTLLKALVRQQLPEKYKEIFFDQSKNGYAGYIDGGASQEEFYKFIKPILEKMDGTEELLVKLNREDLLRKQRTFDNGSIPHQIHLGELHAILRRQEDFYPFLKDNREKIEKILTFRIPYYVGPLARGNSRFAWMTRKSEETITPWNFEEVVDKGASAQSFIERMTNFDKNLPNEKVLPKHSLLYEYFTVYNELTKVKYVTEGMRKPAFLSGEQKKAIVDLLFKTNRKVTVKQLKEDYFKKIECFDSVEISGVEDRFNASLGTYHDLLKIIKDKDFLDNEENEDILEDIVLTLTLFEDREMIEERLKTYAHLFDDKVMKQLKRRRYTGWGRLSRKLINGIRDKQSGKTILDFLKSDGFANRNFMQLIHDDSLTFKEDIQKAQVSGQGDSLHEHIANLAGSPAIKKGILQTVKVVDELVKVMGRHKPENIVIEMARENQTTQKGQKNSRERMKRIEEGIKELGSQILKEHPVENTQLQNEKLYLYYLQNGRDMYVDQELDINRLSDYDVDHIVPQSFLKDDSIDNKVLTRSDKARGKSDNVPSEEVVKKMKNYWRQLLNAKLITQRKFDNLTKAERGGLSELDKAGFIKRQLVETRQITKHVAQILDSRMNTKYDENDKLIREVKVITLKSKLVSDFRKDFQFYKVREINNYHHAHDAYLNAVVGTALIKKYPKLESEFVYGDYKVYDVRKMIAKSEQEIGKATAKYFFYSNIMNFFKTEITLANGEIRKRPLIETNGETGEIVWDKGRDFATVRKVLSMPQVNIVKKTEVQTGGFSKESILPKRNSDKLIARKKDWDPKKYGGFDSPTVAYSVLVVAKVEKGKSKKLKSVKELLGITIMERSSFEKNPIDFLEAKGYKEVKKDLIIKLPKYSLFELENGRKRMLASAGELQKGNELALPSKYVNFLYLASHYEKLKGSPEDNEQKQLFVEQHKHYLDEIIEQISEFSKRVILADANLDKVLSAYNKHRDKPIREQAENIIHLFTLTNLGAPAAFKYFDTTIDRKRYTSTKEVLDATLIHQSITGLYETRIDLSQLGGDGGGGSGGSGGSGGVLNLEEEYRLHEKPVPSSIDPSWLQLFPTVWAERAGMGLANQVPPVVVELRSGASPVAVRQYPMSKEAREGIRPHIQRFLDLGVLVPCQSPWNTPLLPVKKPGTNDYRPVQDLREINKRVQDIHPTVPNPYNLLSSLPPSHTWYSVLDLKDAFFCLKLHPNSQPLFAFEWRDPEKGNTGQLTWTRLPQGFKNSPTLFNEALHRDLAPFRALNPQVVLLQYVDDLLVAAPTYRDCKEGTQKLLQELSKLGYRVSAKKAQLCQKEVTYLGYLLKEGKRWLTPARKATVMKIPPPTTPRQVREFLGKAGFCRLFIPGFASLAAPLYPLTKPSIPFIWTEEHQKAFDRIKEALLSAPALALPDLTKPFTLYVDERAGVARGVLTQTLGPWRRPVAYLSKKLDPVASGWPTCLKAVAAVALLLKDADKLTLGQNVTVIASHSLESIVRQPPDRWMTNARMTHYQSLLLNERVSFAPPAVLNPATLLPVESEATPVHRCSEILAEETGTRRDLKDQPLPGVPAWYTDGSSFIAEGKRRAGAAIVDGKRTVWASSLPEGTSAQKAELVALTQALRLAEGKDINIYTDSRYAFATAHIHGAIYKQRGWLTSAGKDIKNKEEILALLEAIHLPKRVAIIHCPGHQKGNDPVATGNRRADEAAKQAALSTRVLAETTKPAGKRTADGSEFEKRTADGSEFESPKKKAKVE

SEQ ID NO: 886 - protein, 2095 aa, synthetic construct
MPAAKRVKLDGGDKKYSIGLDIGTNSVGWAVITDEYKVPSKKFKVLGNTDRHSIKKNLIGALLFDSGETAEATRLKRTARRRYTRRKNRICYLQEIFSNEMAKVDDSFFHRLEESFLVEEDKKHERHPIFGNIVDEVAYHEKYPTIYHLRKKLVDSTDKADLRLIYLALAHMIKFRGHFLIEGDLNPDNSDVDKLFIQLVQTYNQLFEENPINASGVDAKAILSARLSKSRRLENLIAQLPGEKKNGLFGNLIALSLGLTPNFKSNFDLAEDAKLQLSKDTYDDDLDNLLAQIGDQYADLFLAAKNLSDAILLSDILRVNTEITKAPLSASMIKRYDEHHQDLTLLKALVRQQLPEKYKEIFFDQSKNGYAGYIDGGASQEEFYKFIKPILEKMDGTEELLVKLNREDLLRKQRTFDNGSIPHQIHLGELHAILRRQEDFYPFLKDNREKIEKILTFRIPYYVGPLARGNSRFAWMTRKSEETITPWNFEEVVDKGASAQSFIERMTNFDKNLPNEKVLPKHSLLYEYFTVYNELTKVKYVTEGMRKPAFLSGEQKKAIVDLLFKTNRKVTVKQLKEDYFKKIECFDSVEISGVEDRFNASLGTYHDLLKIIKDKDFLDNEENEDILEDIVLTLTLFEDREMIEERLKTYAHLFDDKVMKQLKRRRYTGWGRLSRKLINGIRDKQSGKTILDFLKSDGFANRNFMQLIHDDSLTFKEDIQKAQVSGQGDSLHEHIANLAGSPAIKKGILQTVKVVDELVKVMGRHKPENIVIEMARENQTTQKGQKNSRERMKRIEEGIKELGSQILKEHPVENTQLQNEKLYLYYLQNGRDMYVDQELDINRLSDYDVDHIVPQSFLKDDSIDNKVLTRSDKARGKSDNVPSEEVVKKMKNYWRQLLNAKLITQRKFDNLTKAERGGLSELDKAGFIKRQLVETRQITKHVAQILDSRMNTKYDENDKLIREVKVITLKSKLVSDFRKDFQFYKVREINNYHHAHDAYLNAVVGTALIKKYPKLESEFVYGDYKVYDVRKMIAKSEQEIGKATAKYFFYSNIMNFFKTEITLANGEIRKRPLIETNGETGEIVWDKGRDFATVRKVLSMPQVNIVKKTEVQTGGFSKESILPKRNSDKLIARKKDWDPKKYGGFDSPTVAYSVLVVAKVEKGKSKKLKSVKELLGITIMERSSFEKNPIDFLEAKGYKEVKKDLIIKLPKYSLFELENGRKRMLASAGELQKGNELALPSKYVNFLYLASHYEKLKGSPEDNEQKQLFVEQHKHYLDEIIEQISEFSKRVILADANLDKVLSAYNKHRDKPIREQAENIIHLFTLTNLGAPAAFKYFDTTIDRKRYTSTKEVLDATLIHQSITGLYETRIDLSQLGGDGGGGSGGSGGSGGSGGVLNLEEEYRLHEKPVPSSIDPSWLQLFPTVWAERAGMGLANQVPPVVVELRSGASPVAVRQYPMSKEAREGIRPHIQRFLDLGVLVPCQSPWNTPLLPVKKPGTNDYRPVQDLREINKRVQDIHPTVPNPYNLLSSLPPSHTWYSVLDLKDAFFCLKLHPNSQPLFAFEWRDPEKGNTGQLTWTRLPQGFKNSPTLFNEALHRDLAPFRALNPQVVLLQYVDDLLVAAPTYRDCKEGTQKLLQELSKLGYRVSAKKAQLCQKEVTYLGYLLKEGKRWLTPARKATVMKIPPPTTPRQVREFLGKAGFCRLFIPGFASLAAPLYPLTKPSIPFIWTEEHQKAFDRIKEALLSAPALALPDLTKPFTLYVDERAGVARGVLTQTLGPWRRPVAYLSKKLDPVASGWPTCLKAVAAVALLLKDADKLTLGQNVTVIASHSLESIVRQPPDRWMTNARMTHYQSLLLNERVSFAPPAVLNPATLLPVESEATPVHRCSEILAEETGTRRDLKDQPLPGVPAWYTDGSSFIAEGKRRAGAAIVDGKRTVWASSLPEGTSAQKAELVALTQALRLAEGKDINIYTDSRYAFATAHIHGAIYKQRGWLTSAGKDIKNKEEILALLEAIHLPKRVAIIHCPGHQKGNDPVATGNRRADEAAKQAALSTRVLAETTKPAGKRTADGSEFEKRTADGSEFESPKKKAKVE

SEQ ID NO: 887 - protein, 2095 aa, synthetic construct
MPAAKRVKLDGGDKKYSIGLDIGTNSVGWAVITDEYKVPSKKFKVLGNTDRHSIKKNLIGALLFDSGETAEATRLKRTARRRYTRRKNRICYLQEIFSNEMAKVDDSFFHRLEESFLVEEDKKHERHPIFGNIVDEVAYHEKYPTIYHLRKKLVDSTDKADLRLIYLALAHMIKFRGHFLIEGDLNPDNSDVDKLFIQLVQTYNQLFEENPINASGVDAKAILSARLSKSRRLENLIAQLPGEKKNGLFGNLIALSLGLTPNFKSNFDLAEDAKLQLSKDTYDDDLDNLLAQIGDQYADLFLAAKNLSDAILLSDILRVNTEITKAPLSASMIKRYDEHHQDLTLLKALVRQQLPEKYKEIFFDQSKNGYAGYIDGGASQEEFYKFIKPILEKMDGTEELLVKLNREDLLRKQRTFDNGSIPHQIHLGELHAILRRQEDFYPFLKDNREKIEKILTFRIPYYVGPLARGNSRFAWMTRKSEETITPWNFEEVVDKGASAQSFIERMTNFDKNLPNEKVLPKHSLLYEYFTVYNELTKVKYVTEGMRKPAFLSGEQKKAIVDLLFKTNRKVTVKQLKEDYFKKIECFDSVEISGVEDRFNASLGTYHDLLKIIKDKDFLDNEENEDILEDIVLTLTLFEDREMIEERLKTYAHLFDDKVMKQLKRRRYTGWGRLSRKLINGIRDKQSGKTILDFLKSDGFANRNFMQLIHDDSLTFKEDIQKAQVSGQGDSLHEHIANLAGSPAIKKGILQTVKVVDELVKVMGRHKPENIVIEMARENQTTQKGQKNSRERMKRIEEGIKELGSQILKEHPVENTQLQNEKLYLYYLQNGRDMYVDQELDINRLSDYDVDHIVPQSFLKDDSIDNKVLTRSDKARGKSDNVPSEEVVKKMKNYWRQLLNAKLITQRKFDNLTKAERGGLSELDKAGFIKRQLVETRQITKHVAQILDSRMNTKYDENDKLIREVKVITLKSKLVSDFRKDFQFYKVREINNYHHAHDAYLNAVVGTALIKKYPKLESEFVYGDYKVYDVRKMIAKSEQEIGKATAKYFFYSNIMNFFKTEITLANGEIRKRPLIETNGETGEIVWDKGRDFATVRKVLSMPQVNIVKKTEVQTGGFSKESILPKRNSDKLIARKKDWDPKKYGGFDSPTVAYSVLVVAKVEKGKSKKLKSVKELLGITIMERSSFEKNPIDFLEAKGYKEVKKDLIIKLPKYSLFELENGRKRMLASAGELQKGNELALPSKYVNFLYLASHYEKLKGSPEDNEQKQLFVEQHKHYLDEIIEQISEFSKRVILADANLDKVLSAYNKHRDKPIREQAENIIHLFTLTNLGAPAAFKYFDTTIDRKRYTSTKEVLDATLIHQSITGLYETRIDLSQLGGDGGGSSGSSGSSGSSGGVLNLEEEYRLHEKPVPSSIDPSWLQLFPTVWAERAGMGLANQVPPVVVELRSGASPVAVRQYPMSKEAREGIRPHIQRFLDLGVLVPCQSPWNTPLLPVKKPGTNDYRPVQDLREINKRVQDIHPTVPNPYNLLSSLPPSHTWYSVLDLKDAFFCLKLHPNSQPLFAFEWRDPEKGNTGQLTWTRLPQGFKNSPTLFNEALHRDLAPFRALNPQVVLLQYVDDLLVAAPTYRDCKEGTQKLLQELSKLGYRVSAKKAQLCQKEVTYLGYLLKEGKRWLTPARKATVMKIPPPTTPRQVREFLGKAGFCRLFIPGFASLAAPLYPLTKPSIPFIWTEEHQKAFDRIKEALLSAPALALPDLTKPFTLYVDERAGVARGVLTQTLGPWRRPVAYLSKKLDPVASGWPTCLKAVAAVALLLKDADKLTLGQNVTVIASHSLESIVRQPPDRWMTNARMTHYQSLLLNERVSFAPPAVLNPATLLPVESEATPVHRCSEILAEETGTRRDLKDQPLPGVPAWYTDGSSFIAEGKRRAGAAIVDGKRTVWASSLPEGTSAQKAELVALTQALRLAEGKDINIYTDSRYAFATAHIHGAIYKQRGWLTSAGKDIKNKEEILALLEAIHLPKRVAIIHCPGHQKGNDPVATGNRRADEAAKQAALSTRVLAETTKPAGKRTADGSEFEKRTADGSEFESPKKKAKVE

SEQ ID NO: 888 - protein, 2092 aa, synthetic construct
MPAAKRVKLDGGDKKYSIGLDIGTNSVGWAVITDEYKVPSKKFKVLGNTDRHSIKKNLIGALLFDSGETAEATRLKRTARRRYTRRKNRICYLQEIFSNEMAKVDDSFFHRLEESFLVEEDKKHERHPIFGNIVDEVAYHEKYPTIYHLRKKLVDSTDKADLRLIYLALAHMIKFRGHFLIEGDLNPDNSDVDKLFIQLVQTYNQLFEENPINASGVDAKAILSARLSKSRRLENLIAQLPGEKKNGLFGNLIALSLGLTPNFKSNFDLAEDAKLQLSKDTYDDDLDNLLAQIGDQYADLFLAAKNLSDAILLSDILRVNTEITKAPLSASMIKRYDEHHQDLTLLKALVRQQLPEKYKEIFFDQSKNGYAGYIDGGASQEEFYKFIKPILEKMDGTEELLVKLNREDLLRKQRTFDNGSIPHQIHLGELHAILRRQEDFYPFLKDNREKIEKILTFRIPYYVGPLARGNSRFAWMTRKSEETITPWNFEEVVDKGASAQSFIERMTNFDKNLPNEKVLPKHSLLYEYFTVYNELTKVKYVTEGMRKPAFLSGEQKKAIVDLLFKTNRKVTVKQLKEDYFKKIECFDSVEISGVEDRFNASLGTYHDLLKIIKDKDFLDNEENEDILEDIVLTLTLFEDREMIEERLKTYAHLFDDKVMKQLKRRRYTGWGRLSRKLINGIRDKQSGKTILDFLKSDGFANRNFMQLIHDDSLTFKEDIQKAQVSGQGDSLHEHIANLAGSPAIKKGILQTVKVVDELVKVMGRHKPENIVIEMARENQTTQKGQKNSRERMKRIEEGIKELGSQILKEHPVENTQLQNEKLYLYYLQNGRDMYVDQELDINRLSDYDVDHIVPQSFLKDDSIDNKVLTRSDKARGKSDNVPSEEVVKKMKNYWRQLLNAKLITQRKFDNLTKAERGGLSELDKAGFIKRQLVETRQITKHVAQILDSRMNTKYDENDKLIREVKVITLKSKLVSDFRKDFQFYKVREINNYHHAHDAYLNAVVGTALIKKYPKLESEFVYGDYKVYDVRKMIAKSEQEIGKATAKYFFYSNIMNFFKTEITLANGEIRKRPLIETNGETGEIVWDKGRDFATVRKVLSMPQVNIVKKTEVQTGGFSKESILPKRNSDKLIARKKDWDPKKYGGFDSPTVAYSVLVVAKVEKGKSKKLKSVKELLGITIMERSSFEKNPIDFLEAKGYKEVKKDLIIKLPKYSLFELENGRKRMLASAGELQKGNELALPSKYVNFLYLASHYEKLKGSPEDNEQKQLFVEQHKHYLDEIIEQISEFSKRVILADANLDKVLSAYNKHRDKPIREQAENIIHLFTLTNLGAPAAFKYFDTTIDRKRYTSTKEVLDATLIHQSITGLYETRIDLSQLGGDGGGGGGSSPAPGGVLNLEEEYRLHEKPVPSSIDPSWLQLFPTVWAERAGMGLANQVPPVVVELRSGASPVAVRQYPMSKEAREGIRPHIQRFLDLGVLVPCQSPWNTPLLPVKKPGTNDYRPVQDLREINKRVQDIHPTVPNPYNLLSSLPPSHTWYSVLDLKDAFFCLKLHPNSQPLFAFEWRDPEKGNTGQLTWTRLPQGFKNSPTLFNEALHRDLAPFRALNPQVVLLQYVDDLLVAAPTYRDCKEGTQKLLQELSKLGYRVSAKKAQLCQKEVTYLGYLLKEGKRWLTPARKATVMKIPPPTTPRQVREFLGKAGFCRLFIPGFASLAAPLYPLTKPSIPFIWTEEHQKAFDRIKEALLSAPALALPDLTKPFTLYVDERAGVARGVLTQTLGPWRRPVAYLSKKLDPVASGWPTCLKAVAAVALLLKDADKLTLGQNVTVIASHSLESIVRQPPDRWMTNARMTHYQSLLLNERVSFAPPAVLNPATLLPVESEATPVHRCSEILAEETGTRRDLKDQPLPGVPAWYTDGSSFIAEGKRRAGAAIVDGKRTVWASSLPEGTSAQKAELVALTQALRLAEGKDINIYTDSRYAFATAHIHGAIYKQRGWLTSAGKDIKNKEEILALLEAIHLPKRVAIIHCPGHQKGNDPVATGNRRADEAAKQAALSTRVLAETTKPAGKRTADGSEFEKRTADGSEFESPKKKAKVE

SEQ ID NO: 889 - protein, 2092 aa, synthetic construct
MPAAKRVKLDGGDKKYSIGLDIGTNSVGWAVITDEYKVPSKKFKVLGNTDRHSIKKNLIGALLFDSGETAEATRLKRTARRRYTRRKNRICYLQEIFSNEMAKVDDSFFHRLEESFLVEEDKKHERHPIFGNIVDEVAYHEKYPTIYHLRKKLVDSTDKADLRLIYLALAHMIKFRGHFLIEGDLNPDNSDVDKLFIQLVQTYNQLFEENPINASGVDAKAILSARLSKSRRLENLIAQLPGEKKNGLFGNLIALSLGLTPNFKSNFDLAEDAKLQLSKDTYDDDLDNLLAQIGDQYADLFLAAKNLSDAILLSDILRVNTEITKAPLSASMIKRYDEHHQDLTLLKALVRQQLPEKYKEIFFDQSKNGYAGYIDGGASQEEFYKFIKPILEKMDGTEELLVKLNREDLLRKQRTFDNGSIPHQIHLGELHAILRRQEDFYPFLKDNREKIEKILTFRIPYYVGPLARGNSRFAWMTRKSEETITPWNFEEVVDKGASAQSFIERMTNFDKNLPNEKVLPKHSLLYEYFTVYNELTKVKYVTEGMRKPAFLSGEQKKAIVDLLFKTNRKVTVKQLKEDYFKKIECFDSVEISGVEDRFNASLGTYHDLLKIIKDKDFLDNEENEDILEDIVLTLTLFEDREMIEERLKTYAHLFDDKVMKQLKRRRYTGWGRLSRKLINGIRDKQSGKTILDFLKSDGFANRNFMQLIHDDSLTFKEDIQKAQVSGQGDSLHEHIANLAGSPAIKKGILQTVKVVDELVKVMGRHKPENIVIEMARENQTTQKGQKNSRERMKRIEEGIKELGSQILKEHPVENTQLQNEKLYLYYLQNGRDMYVDQELDINRLSDYDVDHIVPQSFLKDDSIDNKVLTRSDKARGKSDNVPSEEVVKKMKNYWRQLLNAKLITQRKFDNLTKAERGGLSELDKAGFIKRQLVETRQITKHVAQILDSRMNTKYDENDKLIREVKVITLKSKLVSDFRKDFQFYKVREINNYHHAHDAYLNAVVGTALIKKYPKLESEFVYGDYKVYDVRKMIAKSEQEIGKATAKYFFYSNIMNFFKTEITLANGEIRKRPLIETNGETGEIVWDKGRDFATVRKVLSMPQVNIVKKTEVQTGGFSKESILPKRNSDKLIARKKDWDPKKYGGFDSPTVAYSVLVVAKVEKGKSKKLKSVKELLGITIMERSSFEKNPIDFLEAKGYKEVKKDLIIKLPKYSLFELENGRKRMLASAGELQKGNELALPSKYVNFLYLASHYEKLKGSPEDNEQKQLFVEQHKHYLDEIIEQISEFSKRVILADANLDKVLSAYNKHRDKPIREQAENIIHLFTLTNLGAPAAFKYFDTTIDRKRYTSTKEVLDATLIHQSITGLYETRIDLSQLGGDGGPAPGGSGGGGGVLNLEEEYRLHEKPVPSSIDPSWLQLFPTVWAERAGMGLANQVPPVVVELRSGASPVAVRQYPMSKEAREGIRPHIQRFLDLGVLVPCQSPWNTPLLPVKKPGTNDYRPVQDLREINKRVQDIHPTVPNPYNLLSSLPPSHTWYSVLDLKDAFFCLKLHPNSQPLFAFEWRDPEKGNTGQLTWTRLPQGFKNSPTLFNEALHRDLAPFRALNPQVVLLQYVDDLLVAAPTYRDCKEGTQKLLQELSKLGYRVSAKKAQLCQKEVTYLGYLLKEGKRWLTPARKATVMKIPPPTTPRQVREFLGKAGFCRLFIPGFASLAAPLYPLTKPSIPFIWTEEHQKAFDRIKEALLSAPALALPDLTKPFTLYVDERAGVARGVLTQTLGPWRRPVAYLSKKLDPVASGWPTCLKAVAAVALLLKDADKLTLGQNVTVIASHSLESIVRQPPDRWMTNARMTHYQSLLLNERVSFAPPAVLNPATLLPVESEATPVHRCSEILAEETGTRRDLKDQPLPGVPAWYTDGSSFIAEGKRRAGAAIVDGKRTVWASSLPEGTSAQKAELVALTQALRLAEGKDINIYTDSRYAFATAHIHGAIYKQRGWLTSAGKDIKNKEEILALLEAIHLPKRVAIIHCPGHQKGNDPVATGNRRADEAAKQAALSTRVLAETTKPAGKRTADGSEFEKRTADGSEFESPKKKAKVE

SEQ ID NO: 890 - protein, 2096 aa, synthetic construct
MPAAKRVKLDGGDKKYSIGLDIGTNSVGWAVITDEYKVPSKKFKVLGNTDRHSIKKNLIGALLFDSGETAEATRLKRTARRRYTRRKNRICYLQEIFSNEMAKVDDSFFHRLEESFLVEEDKKHERHPIFGNIVDEVAYHEKYPTIYHLRKKLVDSTDKADLRLIYLALAHMIKFRGHFLIEGDLNPDNSDVDKLFIQLVQTYNQLFEENPINASGVDAKAILSARLSKSRRLENLIAQLPGEKKNGLFGNLIALSLGLTPNFKSNFDLAEDAKLQLSKDTYDDDLDNLLAQIGDQYADLFLAAKNLSDAILLSDILRVNTEITKAPLSASMIKRYDEHHQDLTLLKALVRQQLPEKYKEIFFDQSKNGYAGYIDGGASQEEFYKFIKPILEKMDGTEELLVKLNREDLLRKQRTFDNGSIPHQIHLGELHAILRRQEDFYPFLKDNREKIEKILTFRIPYYVGPLARGNSRFAWMTRKSEETITPWNFEEVVDKGASAQSFIERMTNFDKNLPNEKVLPKHSLLYEYFTVYNELTKVKYVTEGMRKPAFLSGEQKKAIVDLLFKTNRKVTVKQLKEDYFKKIECFDSVEISGVEDRFNASLGTYHDLLKIIKDKDFLDNEENEDILEDIVLTLTLFEDREMIEERLKTYAHLFDDKVMKQLKRRRYTGWGRLSRKLINGIRDKQSGKTILDFLKSDGFANRNFMQLIHDDSLTFKEDIQKAQVSGQGDSLHEHIANLAGSPAIKKGILQTVKVVDELVKVMGRHKPENIVIEMARENQTTQKGQKNSRERMKRIEEGIKELGSQILKEHPVENTQLQNEKLYLYYLQNGRDMYVDQELDINRLSDYDVDHIVPQSFLKDDSIDNKVLTRSDKARGKSDNVPSEEVVKKMKNYWRQLLNAKLITQRKFDNLTKAERGGLSELDKAGFIKRQLVETRQITKHVAQILDSRMNTKYDENDKLIREVKVITLKSKLVSDFRKDFQFYKVREINNYHHAHDAYLNAVVGTALIKKYPKLESEFVYGDYKVYDVRKMIAKSEQEIGKATAKYFFYSNIMNFFKTEITLANGEIRKRPLIETNGETGEIVWDKGRDFATVRKVLSMPQVNIVKKTEVQTGGFSKESILPKRNSDKLIARKKDWDPKKYGGFDSPTVAYSVLVVAKVEKGKSKKLKSVKELLGITIMERSSFEKNPIDFLEAKGYKEVKKDLIIKLPKYSLFELENGRKRMLASAGELQKGNELALPSKYVNFLYLASHYEKLKGSPEDNEQKQLFVEQHKHYLDEIIEQISEFSKRVILADANLDKVLSAYNKHRDKPIREQAENIIHLFTLTNLGAPAAFKYFDTTIDRKRYTSTKEVLDATLIHQSITGLYETRIDLSQLGGDGGPAPAPAPAPAPAPGGVLNLEEEYRLHEKPVPSSIDPSWLQLFPTVWAERAGMGLANQVPPVVVELRSGASPVAVRQYPMSKEAREGIRPHIQRFLDLGVLVPCQSPWNTPLLPVKKPGTNDYRPVQDLREINKRVQDIHPTVPNPYNLLSSLPPSHTWYSVLDLKDAFFCLKLHPNSQPLFAFEWRDPEKGNTGQLTWTRLPQGFKNSPTLFNEALHRDLAPFRALNPQVVLLQYVDDLLVAAPTYRDCKEGTQKLLQELSKLGYRVSAKKAQLCQKEVTYLGYLLKEGKRWLTPARKATVMKIPPPTTPRQVREFLGKAGFCRLFIPGFASLAAPLYPLTKPSIPFIWTEEHQKAFDRIKEALLSAPALALPDLTKPFTLYVDERAGVARGVLTQTLGPWRRPVAYLSKKLDPVASGWPTCLKAVAAVALLLKDADKLTLGQNVTVIASHSLESIVRQPPDRWMTNARMTHYQSLLLNERVSFAPPAVLNPATLLPVESEATPVHRCSEILAEETGTRRDLKDQPLPGVPAWYTDGSSFIAEGKRRAGAAIVDGKRTVWASSLPEGTSAQKAELVALTQALRLAEGKDINIYTDSRYAFATAHIHGAIYKQRGWLTSAGKDIKNKEEILALLEAIHLPKRVAIIHCPGHQKGNDPVATGNRRADEAAKQAALSTRVLAETTKPAGKRTADGSEFEKRTADGSEFESPKKKAKVE

SEQ ID NO: 891 - protein, 2094 aa, synthetic construct
MPAAKRVKLDGGDKKYSIGLDIGTNSVGWAVITDEYKVPSKKFKVLGNTDRHSIKKNLIGALLFDSGETAEATRLKRTARRRYTRRKNRICYLQEIFSNEMAKVDDSFFHRLEESFLVEEDKKHERHPIFGNIVDEVAYHEKYPTIYHLRKKLVDSTDKADLRLIYLALAHMIKFRGHFLIEGDLNPDNSDVDKLFIQLVQTYNQLFEENPINASGVDAKAILSARLSKSRRLENLIAQLPGEKKNGLFGNLIALSLGLTPNFKSNFDLAEDAKLQLSKDTYDDDLDNLLAQIGDQYADLFLAAKNLSDAILLSDILRVNTEITKAPLSASMIKRYDEHHQDLTLLKALVRQQLPEKYKEIFFDQSKNGYAGYIDGGASQEEFYKFIKPILEKMDGTEELLVKLNREDLLRKQRTFDNGSIPHQIHLGELHAILRRQEDFYPFLKDNREKIEKILTFRIPYYVGPLARGNSRFAWMTRKSEETITPWNFEEVVDKGASAQSFIERMTNFDKNLPNEKVLPKHSLLYEYFTVYNELTKVKYVTEGMRKPAFLSGEQKKAIVDLLFKTNRKVTVKQLKEDYFKKIECFDSVEISGVEDRFNASLGTYHDLLKIIKDKDFLDNEENEDILEDIVLTLTLFEDREMIEERLKTYAHLFDDKVMKQLKRRRYTGWGRLSRKLINGIRDKQSGKTILDFLKSDGFANRNFMQLIHDDSLTFKEDIQKAQVSGQGDSLHEHIANLAGSPAIKKGILQTVKVVDELVKVMGRHKPENIVIEMARENQTTQKGQKNSRERMKRIEEGIKELGSQILKEHPVENTQLQNEKLYLYYLQNGRDMYVDQELDINRLSDYDVDHIVPQSFLKDDSIDNKVLTRSDKARGKSDNVPSEEVVKKMKNYWRQLLNAKLITQRKFDNLTKAERGGLSELDKAGFIKRQLVETRQITKHVAQILDSRMNTKYDENDKLIREVKVITLKSKLVSDFRKDFQFYKVREINNYHHAHDAYLNAVVGTALIKKYPKLESEFVYGDYKVYDVRKMIAKSEQEIGKATAKYFFYSNIMNFFKTEITLANGEIRKRPLIETNGETGEIVWDKGRDFATVRKVLSMPQVNIVKKTEVQTGGFSKESILPKRNSDKLIARKKDWDPKKYGGFDSPTVAYSVLVVAKVEKGKSKKLKSVKELLGITIMERSSFEKNPIDFLEAKGYKEVKKDLIIKLPKYSLFELENGRKRMLASAGELQKGNELALPSKYVNFLYLASHYEKLKGSPEDNEQKQLFVEQHKHYLDEIIEQISEFSKRVILADANLDKVLSAYNKHRDKPIREQAENIIHLFTLTNLGAPAAFKYFDTTIDRKRYTSTKEVLDATLIHQSITGLYETRIDLSQLGGDGGEAAAKGSSGGGGGVLNLEEEYRLHEKPVPSSIDPSWLQLFPTVWAERAGMGLANQVPPVVVELRSGASPVAVRQYPMSKEAREGIRPHIQRFLDLGVLVPCQSPWNTPLLPVKKPGTNDYRPVQDLREINKRVQDIHPTVPNPYNLLSSLPPSHTWYSVLDLKDAFFCLKLHPNSQPLFAFEWRDPEKGNTGQLTWTRLPQGFKNSPTLFNEALHRDLAPFRALNPQVVLLQYVDDLLVAAPTYRDCKEGTQKLLQELSKLGYRVSAKKAQLCQKEVTYLGYLLKEGKRWLTPARKATVMKIPPPTTPRQVREFLGKAGFCRLFIPGFASLAAPLYPLTKPSIPFIWTEEHQKAFDRIKEALLSAPALALPDLTKPFTLYVDERAGVARGVLTQTLGPWRRPVAYLSKKLDPVASGWPTCLKAVAAVALLLKDADKLTLGQNVTVIASHSLESIVRQPPDRWMTNARMTHYQSLLLNERVSFAPPAVLNPATLLPVESEATPVHRCSEILAEETGTRRDLKDQPLPGVPAWYTDGSSFIAEGKRRAGAAIVDGKRTVWASSLPEGTSAQKAELVALTQALRLAEGKDINIYTDSRYAFATAHIHGAIYKQRGWLTSAGKDIKNKEEILALLEAIHLPKRVAIIHCPGHQKGNDPVATGNRRADEAAKQAALSTRVLAETTKPAGKRTADGSEFEKRTADGSEFESPKKKAKVE

SEQ ID NO: 892 - protein, 2094 aa, synthetic construct
MPAAKRVKLDGGDKKYSIGLDIGTNSVGWAVITDEYKVPSKKFKVLGNTDRHSIKKNLIGALLFDSGETAEATRLKRTARRRYTRRKNRICYLQEIFSNEMAKVDDSFFHRLEESFLVEEDKKHERHPIFGNIVDEVAYHEKYPTIYHLRKKLVDSTDKADLRLIYLALAHMIKFRGHFLIEGDLNPDNSDVDKLFIQLVQTYNQLFEENPINASGVDAKAILSARLSKSRRLENLIAQLPGEKKNGLFGNLIALSLGLTPNFKSNFDLAEDAKLQLSKDTYDDDLDNLLAQIGDQYADLFLAAKNLSDAILLSDILRVNTEITKAPLSASMIKRYDEHHQDLTLLKALVRQQLPEKYKEIFFDQSKNGYAGYIDGGASQEEFYKFIKPILEKMDGTEELLVKLNREDLLRKQRTFDNGSIPHQIHLGELHAILRRQEDFYPFLKDNREKIEKILTFRIPYYVGPLARGNSRFAWMTRKSEETITPWNFEEVVDKGASAQSFIERMTNFDKNLPNEKVLPKHSLLYEYFTVYNELTKVKYVTEGMRKPAFLSGEQKKAIVDLLFKTNRKVTVKQLKEDYFKKIECFDSVEISGVEDRFNASLGTYHDLLKIIKDKDFLDNEENEDILEDIVLTLTLFEDREMIEERLKTYAHLFDDKVMKQLKRRRYTGWGRLSRKLINGIRDKQSGKTILDFLKSDGFANRNFMQLIHDDSLTFKEDIQKAQVSGQGDSLHEHIANLAGSPAIKKGILQTVKVVDELVKVMGRHKPENIVIEMARENQTTQKGQKNSRERMKRIEEGIKELGSQILKEHPVENTQLQNEKLYLYYLQNGRDMYVDQELDINRLSDYDVDHIVPQSFLKDDSIDNKVLTRSDKARGKSDNVPSEEVVKKMKNYWRQLLNAKLITQRKFDNLTKAERGGLSELDKAGFIKRQLVETRQITKHVAQILDSRMNTKYDENDKLIREVKVITLKSKLVSDFRKDFQFYKVREINNYHHAHDAYLNAVVGTALIKKYPKLESEFVYGDYKVYDVRKMIAKSEQEIGKATAKYFFYSNIMNFFKTEITLANGEIRKRPLIETNGETGEIVWDKGRDFATVRKVLSMPQVNIVKKTEVQTGGFSKESILPKRNSDKLIARKKDWDPKKYGGFDSPTVAYSVLVVAKVEKGKSKKLKSVKELLGITIMERSSFEKNPIDFLEAKGYKEVKKDLIIKLPKYSLFELENGRKRMLASAGELQKGNELALPSKYVNFLYLASHYEKLKGSPEDNEQKQLFVEQHKHYLDEIIEQISEFSKRVILADANLDKVLSAYNKHRDKPIREQAENIIHLFTLTNLGAPAAFKYFDTTIDRKRYTSTKEVLDATLIHQSITGLYETRIDLSQLGGDGGPAPEAAAKGSSGGVLNLEEEYRLHEKPVPSSIDPSWLQLFPTVWAERAGMGLANQVPPVVVELRSGASPVAVRQYPMSKEAREGIRPHIQRFLDLGVLVPCQSPWNTPLLPVKKPGTNDYRPVQDLREINKRVQDIHPTVPNPYNLLSSLPPSHTWYSVLDLKDAFFCLKLHPNSQPLFAFEWRDPEKGNTGQLTWTRLPQGFKNSPTLFNEALHRDLAPFRALNPQVVLLQYVDDLLVAAPTYRDCKEGTQKLLQELSKLGYRVSAKKAQLCQKEVTYLGYLLKEGKRWLTPARKATVMKIPPPTTPRQVREFLGKAGFCRLFIPGFASLAAPLYPLTKPSIPFIWTEEHQKAFDRIKEALLSAPALALPDLTKPFTLYVDERAGVARGVLTQTLGPWRRPVAYLSKKLDPVASGWPTCLKAVAAVALLLKDADKLTLGQNVTVIASHSLESIVRQPPDRWMTNARMTHYQSLLLNERVSFAPPAVLNPATLLPVESEATPVHRCSEILAEETGTRRDLKDQPLPGVPAWYTDGSSFIAEGKRRAGAAIVDGKRTVWASSLPEGTSAQKAELVALTQALRLAEGKDINIYTDSRYAFATAHIHGAIYKQRGWLTSAGKDIKNKEEILALLEAIHLPKRVAIIHCPGHQKGNDPVATGNRRADEAAKQAALSTRVLAETTKPAGKRTADGSEFEKRTADGSEFESPKKKAKVE

SEQ ID NO: 893 - protein, 2113 aa, synthetic construct
MPAAKRVKLDGGDKKYSIGLDIGTNSVGWAVITDEYKVPSKKFKVLGNTDRHSIKKNLIGALLFDSGETAEATRLKRTARRRYTRRKNRICYLQEIFSNEMAKVDDSFFHRLEESFLVEEDKKHERHPIFGNIVDEVAYHEKYPTIYHLRKKLVDSTDKADLRLIYLALAHMIKFRGHFLIEGDLNPDNSDVDKLFIQLVQTYNQLFEENPINASGVDAKAILSARLSKSRRLENLIAQLPGEKKNGLFGNLIALSLGLTPNFKSNFDLAEDAKLQLSKDTYDDDLDNLLAQIGDQYADLFLAAKNLSDAILLSDILRVNTEITKAPLSASMIKRYDEHHQDLTLLKALVRQQLPEKYKEIFFDQSKNGYAGYIDGGASQEEFYKFIKPILEKMDGTEELLVKLNREDLLRKQRTFDNGSIPHQIHLGELHAILRRQEDFYPFLKDNREKIEKILTFRIPYYVGPLARGNSRFAWMTRKSEETITPWNFEEVVDKGASAQSFIERMTNFDKNLPNEKVLPKHSLLYEYFTVYNELTKVKYVTEGMRKPAFLSGEQKKAIVDLLFKTNRKVTVKQLKEDYFKKIECFDSVEISGVEDRFNASLGTYHDLLKIIKDKDFLDNEENEDILEDIVLTLTLFEDREMIEERLKTYAHLFDDKVMKQLKRRRYTGWGRLSRKLINGIRDKQSGKTILDFLKSDGFANRNFMQLIHDDSLTFKEDIQKAQVSGQGDSLHEHIANLAGSPAIKKGILQTVKVVDELVKVMGRHKPENIVIEMARENQTTQKGQKNSRERMKRIEEGIKELGSQILKEHPVENTQLQNEKLYLYYLQNGRDMYVDQELDINRLSDYDVDHIVPQSFLKDDSIDNKVLTRSDKARGKSDNVPSEEVVKKMKNYWRQLLNAKLITQRKFDNLTKAERGGLSELDKAGFIKRQLVETRQITKHVAQILDSRMNTKYDENDKLIREVKVITLKSKLVSDFRKDFQFYKVREINNYHHAHDAYLNAVVGTALIKKYPKLESEFVYGDYKVYDVRKMIAKSEQEIGKATAKYFFYSNIMNFFKTEITLANGEIRKRPLIETNGETGEIVWDKGRDFATVRKVLSMPQVNIVKKTEVQTGGFSKESILPKRNSDKLIARKKDWDPKKYGGFDSPTVAYSVLVVAKVEKGKSKKLKSVKELLGITIMERSSFEKNPIDFLEAKGYKEVKKDLIIKLPKYSLFELENGRKRMLASAGELQKGNELALPSKYVNFLYLASHYEKLKGSPEDNEQKQLFVEQHKHYLDEIIEQISEFSKRVILADANLDKVLSAYNKHRDKPIREQAENIIHLFTLTNLGAPAAFKYFDTTIDRKRYTSTKEVLDATLIHQSITGLYETRIDLSQLGGDGGEAAAKEAAAKEAAAKEAAAKEAAAKEAAAKGGVLNLEEEYRLHEKPVPSSIDPSWLQLFPTVWAERAGMGLANQVPPVVVELRSGASPVAVRQYPMSKEAREGIRPHIQRFLDLGVLVPCQSPWNTPLLPVKKPGTNDYRPVQDLREINKRVQDIHPTVPNPYNLLSSLPPSHTWYSVLDLKDAFFCLKLHPNSQPLFAFEWRDPEKGNTGQLTWTRLPQGFKNSPTLFNEALHRDLAPFRALNPQVVLLQYVDDLLVAAPTYRDCKEGTQKLLQELSKLGYRVSAKKAQLCQKEVTYLGYLLKEGKRWLTPARKATVMKIPPPTTPRQVREFLGKAGFCRLFIPGFASLAAPLYPLTKPSIPFIWTEEHQKAFDRIKEALLSAPALALPDLTKPFTLYVDERAGVARGVLTQTLGPWRRPVAYLSKKLDPVASGWPTCLKAVAAVALLLKDADKLTLGQNVTVIASHSLESIVRQPPDRWMTNARMTHYQSLLLNERVSFAPPAVLNPATLLPVESEATPVHRCSEILAEETGTRRDLKDQPLPGVPAWYTDGSSFIAEGKRRAGAAIVDGKRTVWASSLPEGTSAQKAELVALTQALRLAEGKDINIYTDSRYAFATAHIHGAIYKQRGWLTSAGKDIKNKEEILALLEAIHLPKRVAIIHCPGHQKGNDPVATGNRRADEAAKQAALSTRVLAETTKPAGKRTADGSEFEKRTADGSEFESPKKKAKVE

SEQ ID NO: 894 - protein, 2088 aa, synthetic construct
MPAAKRVKLDGGDKKYSIGLDIGTNSVGWAVITDEYKVPSKKFKVLGNTDRHSIKKNLIGALLFDSGETAEATRLKRTARRRYTRRKNRICYLQEIFSNEMAKVDDSFFHRLEESFLVEEDKKHERHPIFGNIVDEVAYHEKYPTIYHLRKKLVDSTDKADLRLIYLALAHMIKFRGHFLIEGDLNPDNSDVDKLFIQLVQTYNQLFEENPINASGVDAKAILSARLSKSRRLENLIAQLPGEKKNGLFGNLIALSLGLTPNFKSNFDLAEDAKLQLSKDTYDDDLDNLLAQIGDQYADLFLAAKNLSDAILLSDILRVNTEITKAPLSASMIKRYDEHHQDLTLLKALVRQQLPEKYKEIFFDQSKNGYAGYIDGGASQEEFYKFIKPILEKMDGTEELLVKLNREDLLRKQRTFDNGSIPHQIHLGELHAILRRQEDFYPFLKDNREKIEKILTFRIPYYVGPLARGNSRFAWMTRKSEETITPWNFEEVVDKGASAQSFIERMTNFDKNLPNEKVLPKHSLLYEYFTVYNELTKVKYVTEGMRKPAFLSGEQKKAIVDLLFKTNRKVTVKQLKEDYFKKIECFDSVEISGVEDRFNASLGTYHDLLKIIKDKDFLDNEENEDILEDIVLTLTLFEDREMIEERLKTYAHLFDDKVMKQLKRRRYTGWGRLSRKLINGIRDKQSGKTILDFLKSDGFANRNFMQLIHDDSLTFKEDIQKAQVSGQGDSLHEHIANLAGSPAIKKGILQTVKVVDELVKVMGRHKPENIVIEMARENQTTQKGQKNSRERMKRIEEGIKELGSQILKEHPVENTQLQNEKLYLYYLQNGRDMYVDQELDINRLSDYDVDHIVPQSFLKDDSIDNKVLTRSDKARGKSDNVPSEEVVKKMKNYWRQLLNAKLITQRKFDNLTKAERGGLSELDKAGFIKRQLVETRQITKHVAQILDSRMNTKYDENDKLIREVKVITLKSKLVSDFRKDFQFYKVREINNYHHAHDAYLNAVVGTALIKKYPKLESEFVYGDYKVYDVRKMIAKSEQEIGKATAKYFFYSNIMNFFKTEITLANGEIRKRPLIETNGETGEIVWDKGRDFATVRKVLSMPQVNIVKKTEVQTGGFSKESILPKRNSDKLIARKKDWDPKKYGGFDSPTVAYSVLVVAKVEKGKSKKLKSVKELLGITIMERSSFEKNPIDFLEAKGYKEVKKDLIIKLPKYSLFELENGRKRMLASAGELQKGNELALPSKYVNFLYLASHYEKLKGSPEDNEQKQLFVEQHKHYLDEIIEQISEFSKRVILADANLDKVLSAYNKHRDKPIREQAENIIHLFTLTNLGAPAAFKYFDTTIDRKRYTSTKEVLDATLIHQSITGLYETRIDLSQLGGDGGEAAAKGGVLNLEEEYRLHEKPVPSSIDPSWLQLFPTVWAERAGMGLANQVPPVVVELRSGASPVAVRQYPMSKEAREGIRPHIQRFLDLGVLVPCQSPWNTPLLPVKKPGTNDYRPVQDLREINKRVQDIHPTVPNPYNLLSSLPPSHTWYSVLDLKDAFFCLKLHPNSQPLFAFEWRDPEKGNTGQLTWTRLPQGFKNSPTLFNEALHRDLAPFRALNPQVVLLQYVDDLLVAAPTYRDCKEGTQKLLQELSKLGYRVSAKKAQLCQKEVTYLGYLLKEGKRWLTPARKATVMKIPPPTTPRQVREFLGKAGFCRLFIPGFASLAAPLYPLTKPSIPFIWTEEHQKAFDRIKEALLSAPALALPDLTKPFTLYVDERAGVARGVLTQTLGPWRRPVAYLSKKLDPVASGWPTCLKAVAAVALLLKDADKLTLGQNVTVIASHSLESIVRQPPDRWMTNARMTHYQSLLLNERVSFAPPAVLNPATLLPVESEATPVHRCSEILAEETGTRRDLKDQPLPGVPAWYTDGSSFIAEGKRRAGAAIVDGKRTVWASSLPEGTSAQKAELVALTQALRLAEGKDINIYTDSRYAFATAHIHGAIYKQRGWLTSAGKDIKNKEEILALLEAIHLPKRVAIIHCPGHQKGNDPVATGNRRADEAAKQAALSTRVLAETTKPAGKRTADGSEFEKRTADGSEFESPKKKAKVE

SEQ ID NO: 895 - protein, 2088 aa, synthetic construct
MPAAKRVKLDGGDKKYSIGLDIGTNSVGWAVITDEYKVPSKKFKVLGNTDRHSIKKNLIGALLFDSGETAEATRLKRTARRRYTRRKNRICYLQEIFSNEMAKVDDSFFHRLEESFLVEEDKKHERHPIFGNIVDEVAYHEKYPTIYHLRKKLVDSTDKADLRLIYLALAHMIKFRGHFLIEGDLNPDNSDVDKLFIQLVQTYNQLFEENPINASGVDAKAILSARLSKSRRLENLIAQLPGEKKNGLFGNLIALSLGLTPNFKSNFDLAEDAKLQLSKDTYDDDLDNLLAQIGDQYADLFLAAKNLSDAILLSDILRVNTEITKAPLSASMIKRYDEHHQDLTLLKALVRQQLPEKYKEIFFDQSKNGYAGYIDGGASQEEFYKFIKPILEKMDGTEELLVKLNREDLLRKQRTFDNGSIPHQIHLGELHAILRRQEDFYPFLKDNREKIEKILTFRIPYYVGPLARGNSRFAWMTRKSEETITPWNFEEVVDKGASAQSFIERMTNFDKNLPNEKVLPKHSLLYEYFTVYNELTKVKYVTEGMRKPAFLSGEQKKAIVDLLFKTNRKVTVKQLKEDYFKKIECFDSVEISGVEDRFNASLGTYHDLLKIIKDKDFLDNEENEDILEDIVLTLTLFEDREMIEERLKTYAHLFDDKVMKQLKRRRYTGWGRLSRKLINGIRDKQSGKTILDFLKSDGFANRNFMQLIHDDSLTFKEDIQKAQVSGQGDSLHEHIANLAGSPAIKKGILQTVKVVDELVKVMGRHKPENIVIEMARENQTTQKGQKNSRERMKRIEEGIKELGSQILKEHPVENTQLQNEKLYLYYLQNGRDMYVDQELDINRLSDYDVDHIVPQSFLKDDSIDNKVLTRSDKARGKSDNVPSEEVVKKMKNYWRQLLNAKLITQRKFDNLTKAERGGLSELDKAGFIKRQLVETRQITKHVAQILDSRMNTKYDENDKLIREVKVITLKSKLVSDFRKDFQFYKVREINNYHHAHDAYLNAVVGTALIKKYPKLESEFVYGDYKVYDVRKMIAKSEQEIGKATAKYFFYSNIMNFFKTEITLANGEIRKRPLIETNGETGEIVWDKGRDFATVRKVLSMPQVNIVKKTEVQTGGFSKESILPKRNSDKLIARKKDWDPKKYGGFDSPTVAYSVLVVAKVEKGKSKKLKSVKELLGITIMERSSFEKNPIDFLEAKGYKEVKKDLIIKLPKYSLFELENGRKRMLASAGELQKGNELALPSKYVNFLYLASHYEKLKGSPEDNEQKQLFVEQHKHYLDEIIEQISEFSKRVILADANLDKVLSAYNKHRDKPIREQAENIIHLFTLTNLGAPAAFKYFDTTIDRKRYTSTKEVLDATLIHQSITGLYETRIDLSQLGGDGGGGGGGGGVLNLEEEYRLHEKPVPSSIDPSWLQLFPTVWAERAGMGLANQVPPVVVELRSGASPVAVRQYPMSKEAREGIRPHIQRFLDLGVLVPCQSPWNTPLLPVKKPGTNDYRPVQDLREINKRVQDIHPTVPNPYNLLSSLPPSHTWYSVLDLKDAFFCLKLHPNSQPLFAFEWRDPEKGNTGQLTWTRLPQGFKNSPTLFNEALHRDLAPFRALNPQVVLLQYVDDLLVAAPTYRDCKEGTQKLLQELSKLGYRVSAKKAQLCQKEVTYLGYLLKEGKRWLTPARKATVMKIPPPTTPRQVREFLGKAGFCRLFIPGFASLAAPLYPLTKPSIPFIWTEEHQKAFDRIKEALLSAPALALPDLTKPFTLYVDERAGVARGVLTQTLGPWRRPVAYLSKKLDPVASGWPTCLKAVAAVALLLKDADKLTLGQNVTVIASHSLESIVRQPPDRWMTNARMTHYQSLLLNERVSFAPPAVLNPATLLPVESEATPVHRCSEILAEETGTRRDLKDQPLPGVPAWYTDGSSFIAEGKRRAGAAIVDGKRTVWASSLPEGTSAQKAELVALTQALRLAEGKDINIYTDSRYAFATAHIHGAIYKQRGWLTSAGKDIKNKEEILALLEAIHLPKRVAIIHCPGHQKGNDPVATGNRRADEAAKQAALSTRVLAETTKPAGKRTADGSEFEKRTADGSEFESPKKKAKVE

SEQ ID NO: 896 - protein, 2094 aa, synthetic construct
MPAAKRVKLDGGDKKYSIGLDIGTNSVGWAVITDEYKVPSKKFKVLGNTDRHSIKKNLIGALLFDSGETAEATRLKRTARRRYTRRKNRICYLQEIFSNEMAKVDDSFFHRLEESFLVEEDKKHERHPIFGNIVDEVAYHEKYPTIYHLRKKLVDSTDKADLRLIYLALAHMIKFRGHFLIEGDLNPDNSDVDKLFIQLVQTYNQLFEENPINASGVDAKAILSARLSKSRRLENLIAQLPGEKKNGLFGNLIALSLGLTPNFKSNFDLAEDAKLQLSKDTYDDDLDNLLAQIGDQYADLFLAAKNLSDAILLSDILRVNTEITKAPLSASMIKRYDEHHQDLTLLKALVRQQLPEKYKEIFFDQSKNGYAGYIDGGASQEEFYKFIKPILEKMDGTEELLVKLNREDLLRKQRTFDNGSIPHQIHLGELHAILRRQEDFYPFLKDNREKIEKILTFRIPYYVGPLARGNSRFAWMTRKSEETITPWNFEEVVDKGASAQSFIERMTNFDKNLPNEKVLPKHSLLYEYFTVYNELTKVKYVTEGMRKPAFLSGEQKKAIVDLLFKTNRKVTVKQLKEDYFKKIECFDSVEISGVEDRFNASLGTYHDLLKIIKDKDFLDNEENEDILEDIVLTLTLFEDREMIEERLKTYAHLFDDKVMKQLKRRRYTGWGRLSRKLINGIRDKQSGKTILDFLKSDGFANRNFMQLIHDDSLTFKEDIQKAQVSGQGDSLHEHIANLAGSPAIKKGILQTVKVVDELVKVMGRHKPENIVIEMARENQTTQKGQKNSRERMKRIEEGIKELGSQILKEHPVENTQLQNEKLYLYYLQNGRDMYVDQELDINRLSDYDVDHIVPQSFLKDDSIDNKVLTRSDKARGKSDNVPSEEVVKKMKNYWRQLLNAKLITQRKFDNLTKAERGGLSELDKAGFIKRQLVETRQITKHVAQILDSRMNTKYDENDKLIREVKVITLKSKLVSDFRKDFQFYKVREINNYHHAHDAYLNAVVGTALIKKYPKLESEFVYGDYKVYDVRKMIAKSEQEIGKATAKYFFYSNIMNFFKTEITLANGEIRKRPLIETNGETGEIVWDKGRDFATVRKVLSMPQVNIVKKTEVQTGGFSKESILPKRNSDKLIARKKDWDPKKYGGFDSPTVAYSVLVVAKVEKGKSKKLKSVKELLGITIMERSSFEKNPIDFLEAKGYKEVKKDLIIKLPKYSLFELENGRKRMLASAGELQKGNELALPSKYVNFLYLASHYEKLKGSPEDNEQKQLFVEQHKHYLDEIIEQISEFSKRVILADANLDKVLSAYNKHRDKPIREQAENIIHLFTLTNLGAPAAFKYFDTTIDRKRYTSTKEVLDATLIHQSITGLYETRIDLSQLGGDGGPAPEAAAKGGGGGVLNLEEEYRLHEKPVPSSIDPSWLQLFPTVWAERAGMGLANQVPPVVVELRSGASPVAVRQYPMSKEAREGIRPHIQRFLDLGVLVPCQSPWNTPLLPVKKPGTNDYRPVQDLREINKRVQDIHPTVPNPYNLLSSLPPSHTWYSVLDLKDAFFCLKLHPNSQPLFAFEWRDPEKGNTGQLTWTRLPQGFKNSPTLFNEALHRDLAPFRALNPQVVLLQYVDDLLVAAPTYRDCKEGTQKLLQELSKLGYRVSAKKAQLCQKEVTYLGYLLKEGKRWLTPARKATVMKIPPPTTPRQVREFLGKAGFCRLFIPGFASLAAPLYPLTKPSIPFIWTEEHQKAFDRIKEALLSAPALALPDLTKPFTLYVDERAGVARGVLTQTLGPWRRPVAYLSKKLDPVASGWPTCLKAVAAVALLLKDADKLTLGQNVTVIASHSLESIVRQPPDRWMTNARMTHYQSLLLNERVSFAPPAVLNPATLLPVESEATPVHRCSEILAEETGTRRDLKDQPLPGVPAWYTDGSSFIAEGKRRAGAAIVDGKRTVWASSLPEGTSAQKAELVALTQALRLAEGKDINIYTDSRYAFATAHIHGAIYKQRGWLTSAGKDIKNKEEILALLEAIHLPKRVAIIHCPGHQKGNDPVATGNRRADEAAKQAALSTRVLAETTKPAGKRTADGSEFEKRTADGSEFESPKKKAKVE

SEQ ID NO: 897 - protein, 2091 aa, synthetic construct
MPAAKRVKLDGGDKKYSIGLDIGTNSVGWAVITDEYKVPSKKFKVLGNTDRHSIKKNLIGALLFDSGETAEATRLKRTARRRYTRRKNRICYLQEIFSNEMAKVDDSFFHRLEESFLVEEDKKHERHPIFGNIVDEVAYHEKYPTIYHLRKKLVDSTDKADLRLIYLALAHMIKFRGHFLIEGDLNPDNSDVDKLFIQLVQTYNQLFEENPINASGVDAKAILSARLSKSRRLENLIAQLPGEKKNGLFGNLIALSLGLTPNFKSNFDLAEDAKLQLSKDTYDDDLDNLLAQIGDQYADLFLAAKNLSDAILLSDILRVNTEITKAPLSASMIKRYDEHHQDLTLLKALVRQQLPEKYKEIFFDQSKNGYAGYIDGGASQEEFYKFIKPILEKMDGTEELLVKLNREDLLRKQRTFDNGSIPHQIHLGELHAILRRQEDFYPFLKDNREKIEKILTFRIPYYVGPLARGNSRFAWMTRKSEETITPWNFEEVVDKGASAQSFIERMTNFDKNLPNEKVLPKHSLLYEYFTVYNELTKVKYVTEGMRKPAFLSGEQKKAIVDLLFKTNRKVTVKQLKEDYFKKIECFDSVEISGVEDRFNASLGTYHDLLKIIKDKDFLDNEENEDILEDIVLTLTLFEDREMIEERLKTYAHLFDDKVMKQLKRRRYTGWGRLSRKLINGIRDKQSGKTILDFLKSDGFANRNFMQLIHDDSLTFKEDIQKAQVSGQGDSLHEHIANLAGSPAIKKGILQTVKVVDELVKVMGRHKPENIVIEMARENQTTQKGQKNSRERMKRIEEGIKELGSQILKEHPVENTQLQNEKLYLYYLQNGRDMYVDQELDINRLSDYDVDHIVPQSFLKDDSIDNKVLTRSDKARGKSDNVPSEEVVKKMKNYWRQLLNAKLITQRKFDNLTKAERGGLSELDKAGFIKRQLVETRQITKHVAQILDSRMNTKYDENDKLIREVKVITLKSKLVSDFRKDFQFYKVREINNYHHAHDAYLNAVVGTALIKKYPKLESEFVYGDYKVYDVRKMIAKSEQEIGKATAKYFFYSNIMNFFKTEITLANGEIRKRPLIETNGETGEIVWDKGRDFATVRKVLSMPQVNIVKKTEVQTGGFSKESILPKRNSDKLIARKKDWDPKKYGGFDSPTVAYSVLVVAKVEKGKSKKLKSVKELLGITIMERSSFEKNPIDFLEAKGYKEVKKDLIIKLPKYSLFELENGRKRMLASAGELQKGNELALPSKYVNFLYLASHYEKLKGSPEDNEQKQLFVEQHKHYLDEIIEQISEFSKRVILADANLDKVLSAYNKHRDKPIREQAENIIHLFTLTNLGAPAAFKYFDTTIDRKRYTSTKEVLDATLIHQSITGLYETRIDLSQLGGDGGEAAAKGGSGGVLNLEEEYRLHEKPVPSSIDPSWLQLFPTVWAERAGMGLANQVPPVVVELRSGASPVAVRQYPMSKEAREGIRPHIQRFLDLGVLVPCQSPWNTPLLPVKKPGTNDYRPVQDLREINKRVQDIHPTVPNPYNLLSSLPPSHTWYSVLDLKDAFFCLKLHPNSQPLFAFEWRDPEKGNTGQLTWTRLPQGFKNSPTLFNEALHRDLAPFRALNPQVVLLQYVDDLLVAAPTYRDCKEGTQKLLQELSKLGYRVSAKKAQLCQKEVTYLGYLLKEGKRWLTPARKATVMKIPPPTTPRQVREFLGKAGFCRLFIPGFASLAAPLYPLTKPSIPFIWTEEHQKAFDRIKEALLSAPALALPDLTKPFTLYVDERAGVARGVLTQTLGPWRRPVAYLSKKLDPVASGWPTCLKAVAAVALLLKDADKLTLGQNVTVIASHSLESIVRQPPDRWMTNARMTHYQSLLLNERVSFAPPAVLNPATLLPVESEATPVHRCSEILAEETGTRRDLKDQPLPGVPAWYTDGSSFIAEGKRRAGAAIVDGKRTVWASSLPEGTSAQKAELVALTQALRLAEGKDINIYTDSRYAFATAHIHGAIYKQRGWLTSAGKDIKNKEEILALLEAIHLPKRVAIIHCPGHQKGNDPVATGNRRADEAAKQAALSTRVLAETTKPAGKRTADGSEFEKRTADGSEFESPKKKAKVE

SEQ ID NO: 898 - protein, 2094 aa, synthetic construct
MPAAKRVKLDGGDKKYSIGLDIGTNSVGWAVITDEYKVPSKKFKVLGNTDRHSIKKNLIGALLFDSGETAEATRLKRTARRRYTRRKNRICYLQEIFSNEMAKVDDSFFHRLEESFLVEEDKKHERHPIFGNIVDEVAYHEKYPTIYHLRKKLVDSTDKADLRLIYLALAHMIKFRGHFLIEGDLNPDNSDVDKLFIQLVQTYNQLFEENPINASGVDAKAILSARLSKSRRLENLIAQLPGEKKNGLFGNLIALSLGLTPNFKSNFDLAEDAKLQLSKDTYDDDLDNLLAQIGDQYADLFLAAKNLSDAILLSDILRVNTEITKAPLSASMIKRYDEHHQDLTLLKALVRQQLPEKYKEIFFDQSKNGYAGYIDGGASQEEFYKFIKPILEKMDGTEELLVKLNREDLLRKQRTFDNGSIPHQIHLGELHAILRRQEDFYPFLKDNREKIEKILTFRIPYYVGPLARGNSRFAWMTRKSEETITPWNFEEVVDKGASAQSFIERMTNFDKNLPNEKVLPKHSLLYEYFTVYNELTKVKYVTEGMRKPAFLSGEQKKAIVDLLFKTNRKVTVKQLKEDYFKKIECFDSVEISGVEDRFNASLGTYHDLLKIIKDKDFLDNEENEDILEDIVLTLTLFEDREMIEERLKTYAHLFDDKVMKQLKRRRYTGWGRLSRKLINGIRDKQSGKTILDFLKSDGFANRNFMQLIHDDSLTFKEDIQKAQVSGQGDSLHEHIANLAGSPAIKKGILQTVKVVDELVKVMGRHKPENIVIEMARENQTTQKGQKNSRERMKRIEEGIKELGSQILKEHPVENTQLQNEKLYLYYLQNGRDMYVDQELDINRLSDYDVDHIVPQSFLKDDSIDNKVLTRSDKARGKSDNVPSEEVVKKMKNYWRQLLNAKLITQRKFDNLTKAERGGLSELDKAGFIKRQLVETRQITKHVAQILDSRMNTKYDENDKLIREVKVITLKSKLVSDFRKDFQFYKVREINNYHHAHDAYLNAVVGTALIKKYPKLESEFVYGDYKVYDVRKMIAKSEQEIGKATAKYFFYSNIMNFFKTEITLANGEIRKRPLIETNGETGEIVWDKGRDFATVRKVLSMPQVNIVKKTEVQTGGFSKESILPKRNSDKLIARKKDWDPKKYGGFDSPTVAYSVLVVAKVEKGKSKKLKSVKELLGITIMERSSFEKNPIDFLEAKGYKEVKKDLIIKLPKYSLFELENGRKRMLASAGELQKGNELALPSKYVNFLYLASHYEKLKGSPEDNEQKQLFVEQHKHYLDEIIEQISEFSKRVILADANLDKVLSAYNKHRDKPIREQAENIIHLFTLTNLGAPAAFKYFDTTIDRKRYTSTKEVLDATLIHQSITGLYETRIDLSQLGGDGGGGSPAPEAAAKGGVLNLEEEYRLHEKPVPSSIDPSWLQLFPTVWAERAGMGLANQVPPVVVELRSGASPVAVRQYPMSKEAREGIRPHIQRFLDLGVLVPCQSPWNTPLLPVKKPGTNDYRPVQDLREINKRVQDIHPTVPNPYNLLSSLPPSHTWYSVLDLKDAFFCLKLHPNSQPLFAFEWRDPEKGNTGQLTWTRLPQGFKNSPTLFNEALHRDLAPFRALNPQVVLLQYVDDLLVAAPTYRDCKEGTQKLLQELSKLGYRVSAKKAQLCQKEVTYLGYLLKEGKRWLTPARKATVMKIPPPTTPRQVREFLGKAGFCRLFIPGFASLAAPLYPLTKPSIPFIWTEEHQKAFDRIKEALLSAPALALPDLTKPFTLYVDERAGVARGVLTQTLGPWRRPVAYLSKKLDPVASGWPTCLKAVAAVALLLKDADKLTLGQNVTVIASHSLESIVRQPPDRWMTNARMTHYQSLLLNERVSFAPPAVLNPATLLPVESEATPVHRCSEILAEETGTRRDLKDQPLPGVPAWYTDGSSFIAEGKRRAGAAIVDGKRTVWASSLPEGTSAQKAELVALTQALRLAEGKDINIYTDSRYAFATAHIHGAIYKQRGWLTSAGKDIKNKEEILALLEAIHLPKRVAIIHCPGHQKGNDPVATGNRRADEAAKQAALSTRVLAETTKPAGKRTADGSEFEKRTADGSEFESPKKKAKVE

SEQ ID NO: 899 - protein, 2101 aa, synthetic construct
MPAAKRVKLDGGDKKYSIGLDIGTNSVGWAVITDEYKVPSKKFKVLGNTDRHSIKKNLIGALLFDSGETAEATRLKRTARRRYTRRKNRICYLQEIFSNEMAKVDDSFFHRLEESFLVEEDKKHERHPIFGNIVDEVAYHEKYPTIYHLRKKLVDSTDKADLRLIYLALAHMIKFRGHFLIEGDLNPDNSDVDKLFIQLVQTYNQLFEENPINASGVDAKAILSARLSKSRRLENLIAQLPGEKKNGLFGNLIALSLGLTPNFKSNFDLAEDAKLQLSKDTYDDDLDNLLAQIGDQYADLFLAAKNLSDAILLSDILRVNTEITKAPLSASMIKRYDEHHQDLTLLKALVRQQLPEKYKEIFFDQSKNGYAGYIDGGASQEEFYKFIKPILEKMDGTEELLVKLNREDLLRKQRTFDNGSIPHQIHLGELHAILRRQEDFYPFLKDNREKIEKILTFRIPYYVGPLARGNSRFAWMTRKSEETITPWNFEEVVDKGASAQSFIERMTNFDKNLPNEKVLPKHSLLYEYFTVYNELTKVKYVTEGMRKPAFLSGEQKKAIVDLLFKTNRKVTVKQLKEDYFKKIECFDSVEISGVEDRFNASLGTYHDLLKIIKDKDFLDNEENEDILEDIVLTLTLFEDREMIEERLKTYAHLFDDKVMKQLKRRRYTGWGRLSRKLINGIRDKQSGKTILDFLKSDGFANRNFMQLIHDDSLTFKEDIQKAQVSGQGDSLHEHIANLAGSPAIKKGILQTVKVVDELVKVMGRHKPENIVIEMARENQTTQKGQKNSRERMKRIEEGIKELGSQILKEHPVENTQLQNEKLYLYYLQNGRDMYVDQELDINRLSDYDVDHIVPQSFLKDDSIDNKVLTRSDKARGKSDNVPSEEVVKKMKNYWRQLLNAKLITQRKFDNLTKAERGGLSELDKAGFIKRQLVETRQITKHVAQILDSRMNTKYDENDKLIREVKVITLKSKLVSDFRKDFQFYKVREINNYHHAHDAYLNAVVGTALIKKYPKLESEFVYGDYKVYDVRKMIAKSEQEIGKATAKYFFYSNIMNFFKTEITLANGEIRKRPLIETNGETGEIVWDKGRDFATVRKVLSMPQVNIVKKTEVQTGGFSKESILPKRNSDKLIARKKDWDPKKYGGFDSPTVAYSVLVVAKVEKGKSKKLKSVKELLGITIMERSSFEKNPIDFLEAKGYKEVKKDLIIKLPKYSLFELENGRKRMLASAGELQKGNELALPSKYVNFLYLASHYEKLKGSPEDNEQKQLFVEQHKHYLDEIIEQISEFSKRVILADANLDKVLSAYNKHRDKPIREQAENIIHLFTLTNLGAPAAFKYFDTTIDRKRYTSTKEVLDATLIHQSITGLYETRIDLSQLGGDGGGGSGGSGGSGGSGGSGGSGGVLNLEEEYRLHEKPVPSSIDPSWLQLFPTVWAERAGMGLANQVPPVVVELRSGASPVAVRQYPMSKEAREGIRPHIQRFLDLGVLVPCQSPWNTPLLPVKKPGTNDYRPVQDLREINKRVQDIHPTVPNPYNLLSSLPPSHTWYSVLDLKDAFFCLKLHPNSQPLFAFEWRDPEKGNTGQLTWTRLPQGFKNSPTLFNEALHRDLAPFRALNPQVVLLQYVDDLLVAAPTYRDCKEGTQKLLQELSKLGYRVSAKKAQLCQKEVTYLGYLLKEGKRWLTPARKATVMKIPPPTTPRQVREFLGKAGFCRLFIPGFASLAAPLYPLTKPSIPFIWTEEHQKAFDRIKEALLSAPALALPDLTKPFTLYVDERAGVARGVLTQTLGPWRRPVAYLSKKLDPVASGWPTCLKAVAAVALLLKDADKLTLGQNVTVIASHSLESIVRQPPDRWMTNARMTHYQSLLLNERVSFAPPAVLNPATLLPVESEATPVHRCSEILAEETGTRRDLKDQPLPGVPAWYTDGSSFIAEGKRRAGAAIVDGKRTVWASSLPEGTSAQKAELVALTQALRLAEGKDINIYTDSRYAFATAHIHGAIYKQRGWLTSAGKDIKNKEEILALLEAIHLPKRVAIIHCPGHQKGNDPVATGNRRADEAAKQAALSTRVLAETTKPAGKRTADGSEFEKRTADGSEFESPKKKAKVE

SEQ ID NO: 900 - protein, 2098 aa, synthetic construct
MPAAKRVKLDGGDKKYSIGLDIGTNSVGWAVITDEYKVPSKKFKVLGNTDRHSIKKNLIGALLFDSGETAEATRLKRTARRRYTRRKNRICYLQEIFSNEMAKVDDSFFHRLEESFLVEEDKKHERHPIFGNIVDEVAYHEKYPTIYHLRKKLVDSTDKADLRLIYLALAHMIKFRGHFLIEGDLNPDNSDVDKLFIQLVQTYNQLFEENPINASGVDAKAILSARLSKSRRLENLIAQLPGEKKNGLFGNLIALSLGLTPNFKSNFDLAEDAKLQLSKDTYDDDLDNLLAQIGDQYADLFLAAKNLSDAILLSDILRVNTEITKAPLSASMIKRYDEHHQDLTLLKALVRQQLPEKYKEIFFDQSKNGYAGYIDGGASQEEFYKFIKPILEKMDGTEELLVKLNREDLLRKQRTFDNGSIPHQIHLGELHAILRRQEDFYPFLKDNREKIEKILTFRIPYYVGPLARGNSRFAWMTRKSEETITPWNFEEVVDKGASAQSFIERMTNFDKNLPNEKVLPKHSLLYEYFTVYNELTKVKYVTEGMRKPAFLSGEQKKAIVDLLFKTNRKVTVKQLKEDYFKKIECFDSVEISGVEDRFNASLGTYHDLLKIIKDKDFLDNEENEDILEDIVLTLTLFEDREMIEERLKTYAHLFDDKVMKQLKRRRYTGWGRLSRKLINGIRDKQSGKTILDFLKSDGFANRNFMQLIHDDSLTFKEDIQKAQVSGQGDSLHEHIANLAGSPAIKKGILQTVKVVDELVKVMGRHKPENIVIEMARENQTTQKGQKNSRERMKRIEEGIKELGSQILKEHPVENTQLQNEKLYLYYLQNGRDMYVDQELDINRLSDYDVDHIVPQSFLKDDSIDNKVLTRSDKARGKSDNVPSEEVVKKMKNYWRQLLNAKLITQRKFDNLTKAERGGLSELDKAGFIKRQLVETRQITKHVAQILDSRMNTKYDENDKLIREVKVITLKSKLVSDFRKDFQFYKVREINNYHHAHDAYLNAVVGTALIKKYPKLESEFVYGDYKVYDVRKMIAKSEQEIGKATAKYFFYSNIMNFFKTEITLANGEIRKRPLIETNGETGEIVWDKGRDFATVRKVLSMPQVNIVKKTEVQTGGFSKESILPKRNSDKLIARKKDWDPKKYGGFDSPTVAYSVLVVAKVEKGKSKKLKSVKELLGITIMERSSFEKNPIDFLEAKGYKEVKKDLIIKLPKYSLFELENGRKRMLASAGELQKGNELALPSKYVNFLYLASHYEKLKGSPEDNEQKQLFVEQHKHYLDEIIEQISEFSKRVILADANLDKVLSAYNKHRDKPIREQAENIIHLFTLTNLGAPAAFKYFDTTIDRKRYTSTKEVLDATLIHQSITGLYETRIDLSQLGGDGGEAAAKGGGGSEAAAKGGVLNLEEEYRLHEKPVPSSIDPSWLQLFPTVWAERAGMGLANQVPPVVVELRSGASPVAVRQYPMSKEAREGIRPHIQRFLDLGVLVPCQSPWNTPLLPVKKPGTNDYRPVQDLREINKRVQDIHPTVPNPYNLLSSLPPSHTWYSVLDLKDAFFCLKLHPNSQPLFAFEWRDPEKGNTGQLTWTRLPQGFKNSPTLFNEALHRDLAPFRALNPQVVLLQYVDDLLVAAPTYRDCKEGTQKLLQELSKLGYRVSAKKAQLCQKEVTYLGYLLKEGKRWLTPARKATVMKIPPPTTPRQVREFLGKAGFCRLFIPGFASLAAPLYPLTKPSIPFIWTEEHQKAFDRIKEALLSAPALALPDLTKPFTLYVDERAGVARGVLTQTLGPWRRPVAYLSKKLDPVASGWPTCLKAVAAVALLLKDADKLTLGQNVTVIASHSLESIVRQPPDRWMTNARMTHYQSLLLNERVSFAPPAVLNPATLLPVESEATPVHRCSEILAEETGTRRDLKDQPLPGVPAWYTDGSSFIAEGKRRAGAAIVDGKRTVWASSLPEGTSAQKAELVALTQALRLAEGKDINIYTDSRYAFATAHIHGAIYKQRGWLTSAGKDIKNKEEILALLEAIHLPKRVAIIHCPGHQKGNDPVATGNRRADEAAKQAALSTRVLAETTKPAGKRTADGSEFEKRTADGSEFESPKKKAKVE

SEQ ID NO: 901 - protein, 2094 aa, synthetic construct
MPAAKRVKLDGGDKKYSIGLDIGTNSVGWAVITDEYKVPSKKFKVLGNTDRHSIKKNLIGALLFDSGETAEATRLKRTARRRYTRRKNRICYLQEIFSNEMAKVDDSFFHRLEESFLVEEDKKHERHPIFGNIVDEVAYHEKYPTIYHLRKKLVDSTDKADLRLIYLALAHMIKFRGHFLIEGDLNPDNSDVDKLFIQLVQTYNQLFEENPINASGVDAKAILSARLSKSRRLENLIAQLPGEKKNGLFGNLIALSLGLTPNFKSNFDLAEDAKLQLSKDTYDDDLDNLLAQIGDQYADLFLAAKNLSDAILLSDILRVNTEITKAPLSASMIKRYDEHHQDLTLLKALVRQQLPEKYKEIFFDQSKNGYAGYIDGGASQEEFYKFIKPILEKMDGTEELLVKLNREDLLRKQRTFDNGSIPHQIHLGELHAILRRQEDFYPFLKDNREKIEKILTFRIPYYVGPLARGNSRFAWMTRKSEETITPWNFEEVVDKGASAQSFIERMTNFDKNLPNEKVLPKHSLLYEYFTVYNELTKVKYVTEGMRKPAFLSGEQKKAIVDLLFKTNRKVTVKQLKEDYFKKIECFDSVEISGVEDRFNASLGTYHDLLKIIKDKDFLDNEENEDILEDIVLTLTLFEDREMIEERLKTYAHLFDDKVMKQLKRRRYTGWGRLSRKLINGIRDKQSGKTILDFLKSDGFANRNFMQLIHDDSLTFKEDIQKAQVSGQGDSLHEHIANLAGSPAIKKGILQTVKVVDELVKVMGRHKPENIVIEMARENQTTQKGQKNSRERMKRIEEGIKELGSQILKEHPVENTQLQNEKLYLYYLQNGRDMYVDQELDINRLSDYDVDHIVPQSFLKDDSIDNKVLTRSDKARGKSDNVPSEEVVKKMKNYWRQLLNAKLITQRKFDNLTKAERGGLSELDKAGFIKRQLVETRQITKHVAQILDSRMNTKYDENDKLIREVKVITLKSKLVSDFRKDFQFYKVREINNYHHAHDAYLNAVVGTALIKKYPKLESEFVYGDYKVYDVRKMIAKSEQEIGKATAKYFFYSNIMNFFKTEITLANGEIRKRPLIETNGETGEIVWDKGRDFATVRKVLSMPQVNIVKKTEVQTGGFSKESILPKRNSDKLIARKKDWDPKKYGGFDSPTVAYSVLVVAKVEKGKSKKLKSVKELLGITIMERSSFEKNPIDFLEAKGYKEVKKDLIIKLPKYSLFELENGRKRMLASAGELQKGNELALPSKYVNFLYLASHYEKLKGSPEDNEQKQLFVEQHKHYLDEIIEQISEFSKRVILADANLDKVLSAYNKHRDKPIREQAENIIHLFTLTNLGAPAAFKYFDTTIDRKRYTSTKEVLDATLIHQSITGLYETRIDLSQLGGDGGGGGEAAAKGGSGGVLNLEEEYRLHEKPVPSSIDPSWLQLFPTVWAERAGMGLANQVPPVVVELRSGASPVAVRQYPMSKEAREGIRPHIQRFLDLGVLVPCQSPWNTPLLPVKKPGTNDYRPVQDLREINKRVQDIHPTVPNPYNLLSSLPPSHTWYSVLDLKDAFFCLKLHPNSQPLFAFEWRDPEKGNTGQLTWTRLPQGFKNSPTLFNEALHRDLAPFRALNPQVVLLQYVDDLLVAAPTYRDCKEGTQKLLQELSKLGYRVSAKKAQLCQKEVTYLGYLLKEGKRWLTPARKATVMKIPPPTTPRQVREFLGKAGFCRLFIPGFASLAAPLYPLTKPSIPFIWTEEHQKAFDRIKEALLSAPALALPDLTKPFTLYVDERAGVARGVLTQTLGPWRRPVAYLSKKLDPVASGWPTCLKAVAAVALLLKDADKLTLGQNVTVIASHSLESIVRQPPDRWMTNARMTHYQSLLLNERVSFAPPAVLNPATLLPVESEATPVHRCSEILAEETGTRRDLKDQPLPGVPAWYTDGSSFIAEGKRRAGAAIVDGKRTVWASSLPEGTSAQKAELVALTQALRLAEGKDINIYTDSRYAFATAHIHGAIYKQRGWLTSAGKDIKNKEEILALLEAIHLPKRVAIIHCPGHQKGNDPVATGNRRADEAAKQAALSTRVLAETTKPAGKRTADGSEFEKRTADGSEFESPKKKAKVE

SEQ ID NO: 902 - protein, 2094 aa, synthetic construct
MPAAKRVKLDGGDKKYSIGLDIGTNSVGWAVITDEYKVPSKKFKVLGNTDRHSIKKNLIGALLFDSGETAEATRLKRTARRRYTRRKNRICYLQEIFSNEMAKVDDSFFHRLEESFLVEEDKKHERHPIFGNIVDEVAYHEKYPTIYHLRKKLVDSTDKADLRLIYLALAHMIKFRGHFLIEGDLNPDNSDVDKLFIQLVQTYNQLFEENPINASGVDAKAILSARLSKSRRLENLIAQLPGEKKNGLFGNLIALSLGLTPNFKSNFDLAEDAKLQLSKDTYDDDLDNLLAQIGDQYADLFLAAKNLSDAILLSDILRVNTEITKAPLSASMIKRYDEHHQDLTLLKALVRQQLPEKYKEIFFDQSKNGYAGYIDGGASQEEFYKFIKPILEKMDGTEELLVKLNREDLLRKQRTFDNGSIPHQIHLGELHAILRRQEDFYPFLKDNREKIEKILTFRIPYYVGPLARGNSRFAWMTRKSEETITPWNFEEVVDKGASAQSFIERMTNFDKNLPNEKVLPKHSLLYEYFTVYNELTKVKYVTEGMRKPAFLSGEQKKAIVDLLFKTNRKVTVKQLKEDYFKKIECFDSVEISGVEDRFNASLGTYHDLLKIIKDKDFLDNEENEDILEDIVLTLTLFEDREMIEERLKTYAHLFDDKVMKQLKRRRYTGWGRLSRKLINGIRDKQSGKTILDFLKSDGFANRNFMQLIHDDSLTFKEDIQKAQVSGQGDSLHEHIANLAGSPAIKKGILQTVKVVDELVKVMGRHKPENIVIEMARENQTTQKGQKNSRERMKRIEEGIKELGSQILKEHPVENTQLQNEKLYLYYLQNGRDMYVDQELDINRLSDYDVDHIVPQSFLKDDSIDNKVLTRSDKARGKSDNVPSEEVVKKMKNYWRQLLNAKLITQRKFDNLTKAERGGLSELDKAGFIKRQLVETRQITKHVAQILDSRMNTKYDENDKLIREVKVITLKSKLVSDFRKDFQFYKVREINNYHHAHDAYLNAVVGTALIKKYPKLESEFVYGDYKVYDVRKMIAKSEQEIGKATAKYFFYSNIMNFFKTEITLANGEIRKRPLIETNGETGEIVWDKGRDFATVRKVLSMPQVNIVKKTEVQTGGFSKESILPKRNSDKLIARKKDWDPKKYGGFDSPTVAYSVLVVAKVEKGKSKKLKSVKELLGITIMERSSFEKNPIDFLEAKGYKEVKKDLIIKLPKYSLFELENGRKRMLASAGELQKGNELALPSKYVNFLYLASHYEKLKGSPEDNEQKQLFVEQHKHYLDEIIEQISEFSKRVILADANLDKVLSAYNKHRDKPIREQAENIIHLFTLTNLGAPAAFKYFDTTIDRKRYTSTKEVLDATLIHQSITGLYETRIDLSQLGGDGGGGSEAAAKGGGGGVLNLEEEYRLHEKPVPSSIDPSWLQLFPTVWAERAGMGLANQVPPVVVELRSGASPVAVRQYPMSKEAREGIRPHIQRFLDLGVLVPCQSPWNTPLLPVKKPGTNDYRPVQDLREINKRVQDIHPTVPNPYNLLSSLPPSHTWYSVLDLKDAFFCLKLHPNSQPLFAFEWRDPEKGNTGQLTWTRLPQGFKNSPTLFNEALHRDLAPFRALNPQVVLLQYVDDLLVAAPTYRDCKEGTQKLLQELSKLGYRVSAKKAQLCQKEVTYLGYLLKEGKRWLTPARKATVMKIPPPTTPRQVREFLGKAGFCRLFIPGFASLAAPLYPLTKPSIPFIWTEEHQKAFDRIKEALLSAPALALPDLTKPFTLYVDERAGVARGVLTQTLGPWRRPVAYLSKKLDPVASGWPTCLKAVAAVALLLKDADKLTLGQNVTVIASHSLESIVRQPPDRWMTNARMTHYQSLLLNERVSFAPPAVLNPATLLPVESEATPVHRCSEILAEETGTRRDLKDQPLPGVPAWYTDGSSFIAEGKRRAGAAIVDGKRTVWASSLPEGTSAQKAELVALTQALRLAEGKDINIYTDSRYAFATAHIHGAIYKQRGWLTSAGKDIKNKEEILALLEAIHLPKRVAIIHCPGHQKGNDPVATGNRRADEAAKQAALSTRVLAETTKPAGKRTADGSEFEKRTADGSEFESPKKKAKVE

SEQ ID NO: 903 - protein, 2092 aa, synthetic construct
MPAAKRVKLDGGDKKYSIGLDIGTNSVGWAVITDEYKVPSKKFKVLGNTDRHSIKKNLIGALLFDSGETAEATRLKRTARRRYTRRKNRICYLQEIFSNEMAKVDDSFFHRLEESFLVEEDKKHERHPIFGNIVDEVAYHEKYPTIYHLRKKLVDSTDKADLRLIYLALAHMIKFRGHFLIEGDLNPDNSDVDKLFIQLVQTYNQLFEENPINASGVDAKAILSARLSKSRRLENLIAQLPGEKKNGLFGNLIALSLGLTPNFKSNFDLAEDAKLQLSKDTYDDDLDNLLAQIGDQYADLFLAAKNLSDAILLSDILRVNTEITKAPLSASMIKRYDEHHQDLTLLKALVRQQLPEKYKEIFFDQSKNGYAGYIDGGASQEEFYKFIKPILEKMDGTEELLVKLNREDLLRKQRTFDNGSIPHQIHLGELHAILRRQEDFYPFLKDNREKIEKILTFRIPYYVGPLARGNSRFAWMTRKSEETITPWNFEEVVDKGASAQSFIERMTNFDKNLPNEKVLPKHSLLYEYFTVYNELTKVKYVTEGMRKPAFLSGEQKKAIVDLLFKTNRKVTVKQLKEDYFKKIECFDSVEISGVEDRFNASLGTYHDLLKIIKDKDFLDNEENEDILEDIVLTLTLFEDREMIEERLKTYAHLFDDKVMKQLKRRRYTGWGRLSRKLINGIRDKQSGKTILDFLKSDGFANRNFMQLIHDDSLTFKEDIQKAQVSGQGDSLHEHIANLAGSPAIKKGILQTVKVVDELVKVMGRHKPENIVIEMARENQTTQKGQKNSRERMKRIEEGIKELGSQILKEHPVENTQLQNEKLYLYYLQNGRDMYVDQELDINRLSDYDVDHIVPQSFLKDDSIDNKVLTRSDKARGKSDNVPSEEVVKKMKNYWRQLLNAKLITQRKFDNLTKAERGGLSELDKAGFIKRQLVETRQITKHVAQILDSRMNTKYDENDKLIREVKVITLKSKLVSDFRKDFQFYKVREINNYHHAHDAYLNAVVGTALIKKYPKLESEFVYGDYKVYDVRKMIAKSEQEIGKATAKYFFYSNIMNFFKTEITLANGEIRKRPLIETNGETGEIVWDKGRDFATVRKVLSMPQVNIVKKTEVQTGGFSKESILPKRNSDKLIARKKDWDPKKYGGFDSPTVAYSVLVVAKVEKGKSKKLKSVKELLGITIMERSSFEKNPIDFLEAKGYKEVKKDLIIKLPKYSLFELENGRKRMLASAGELQKGNELALPSKYVNFLYLASHYEKLKGSPEDNEQKQLFVEQHKHYLDEIIEQISEFSKRVILADANLDKVLSAYNKHRDKPIREQAENIIHLFTLTNLGAPAAFKYFDTTIDRKRYTSTKEVLDATLIHQSITGLYETRIDLSQLGGDGGGGSGGGGSSGGVLNLEEEYRLHEKPVPSSIDPSWLQLFPTVWAERAGMGLANQVPPVVVELRSGASPVAVRQYPMSKEAREGIRPHIQRFLDLGVLVPCQSPWNTPLLPVKKPGTNDYRPVQDLREINKRVQDIHPTVPNPYNLLSSLPPSHTWYSVLDLKDAFFCLKLHPNSQPLFAFEWRDPEKGNTGQLTWTRLPQGFKNSPTLFNEALHRDLAPFRALNPQVVLLQYVDDLLVAAPTYRDCKEGTQKLLQELSKLGYRVSAKKAQLCQKEVTYLGYLLKEGKRWLTPARKATVMKIPPPTTPRQVREFLGKAGFCRLFIPGFASLAAPLYPLTKPSIPFIWTEEHQKAFDRIKEALLSAPALALPDLTKPFTLYVDERAGVARGVLTQTLGPWRRPVAYLSKKLDPVASGWPTCLKAVAAVALLLKDADKLTLGQNVTVIASHSLESIVRQPPDRWMTNARMTHYQSLLLNERVSFAPPAVLNPATLLPVESEATPVHRCSEILAEETGTRRDLKDQPLPGVPAWYTDGSSFIAEGKRRAGAAIVDGKRTVWASSLPEGTSAQKAELVALTQALRLAEGKDINIYTDSRYAFATAHIHGAIYKQRGWLTSAGKDIKNKEEILALLEAIHLPKRVAIIHCPGHQKGNDPVATGNRRADEAAKQAALSTRVLAETTKPAGKRTADGSEFEKRTADGSEFESPKKKAKVE

SEQ ID NO: 904 - protein, 2088 aa, synthetic construct
MPAAKRVKLDGGDKKYSIGLDIGTNSVGWAVITDEYKVPSKKFKVLGNTDRHSIKKNLIGALLFDSGETAEATRLKRTARRRYTRRKNRICYLQEIFSNEMAKVDDSFFHRLEESFLVEEDKKHERHPIFGNIVDEVAYHEKYPTIYHLRKKLVDSTDKADLRLIYLALAHMIKFRGHFLIEGDLNPDNSDVDKLFIQLVQTYNQLFEENPINASGVDAKAILSARLSKSRRLENLIAQLPGEKKNGLFGNLIALSLGLTPNFKSNFDLAEDAKLQLSKDTYDDDLDNLLAQIGDQYADLFLAAKNLSDAILLSDILRVNTEITKAPLSASMIKRYDEHHQDLTLLKALVRQQLPEKYKEIFFDQSKNGYAGYIDGGASQEEFYKFIKPILEKMDGTEELLVKLNREDLLRKQRTFDNGSIPHQIHLGELHAILRRQEDFYPFLKDNREKIEKILTFRIPYYVGPLARGNSRFAWMTRKSEETITPWNFEEVVDKGASAQSFIERMTNFDKNLPNEKVLPKHSLLYEYFTVYNELTKVKYVTEGMRKPAFLSGEQKKAIVDLLFKTNRKVTVKQLKEDYFKKIECFDSVEISGVEDRFNASLGTYHDLLKIIKDKDFLDNEENEDILEDIVLTLTLFEDREMIEERLKTYAHLFDDKVMKQLKRRRYTGWGRLSRKLINGIRDKQSGKTILDFLKSDGFANRNFMQLIHDDSLTFKEDIQKAQVSGQGDSLHEHIANLAGSPAIKKGILQTVKVVDELVKVMGRHKPENIVIEMARENQTTQKGQKNSRERMKRIEEGIKELGSQILKEHPVENTQLQNEKLYLYYLQNGRDMYVDQELDINRLSDYDVDHIVPQSFLKDDSIDNKVLTRSDKARGKSDNVPSEEVVKKMKNYWRQLLNAKLITQRKFDNLTKAERGGLSELDKAGFIKRQLVETRQITKHVAQILDSRMNTKYDENDKLIREVKVITLKSKLVSDFRKDFQFYKVREINNYHHAHDAYLNAVVGTALIKKYPKLESEFVYGDYKVYDVRKMIAKSEQEIGKATAKYFFYSNIMNFFKTEITLANGEIRKRPLIETNGETGEIVWDKGRDFATVRKVLSMPQVNIVKKTEVQTGGFSKESILPKRNSDKLIARKKDWDPKKYGGFDSPTVAYSVLVVAKVEKGKSKKLKSVKELLGITIMERSSFEKNPIDFLEAKGYKEVKKDLIIKLPKYSLFELENGRKRMLASAGELQKGNELALPSKYVNFLYLASHYEKLKGSPEDNEQKQLFVEQHKHYLDEIIEQISEFSKRVILADANLDKVLSAYNKHRDKPIREQAENIIHLFTLTNLGAPAAFKYFDTTIDRKRYTSTKEVLDATLIHQSITGLYETRIDLSQLGGDGGPAPAPGGVLNLEEEYRLHEKPVPSSIDPSWLQLFPTVWAERAGMGLANQVPPVVVELRSGASPVAVRQYPMSKEAREGIRPHIQRFLDLGVLVPCQSPWNTPLLPVKKPGTNDYRPVQDLREINKRVQDIHPTVPNPYNLLSSLPPSHTWYSVLDLKDAFFCLKLHPNSQPLFAFEWRDPEKGNTGQLTWTRLPQGFKNSPTLFNEALHRDLAPFRALNPQVVLLQYVDDLLVAAPTYRDCKEGTQKLLQELSKLGYRVSAKKAQLCQKEVTYLGYLLKEGKRWLTPARKATVMKIPPPTTPRQVREFLGKAGFCRLFIPGFASLAAPLYPLTKPSIPFIWTEEHQKAFDRIKEALLSAPALALPDLTKPFTLYVDERAGVARGVLTQTLGPWRRPVAYLSKKLDPVASGWPTCLKAVAAVALLLKDADKLTLGQNVTVIASHSLESIVRQPPDRWMTNARMTHYQSLLLNERVSFAPPAVLNPATLLPVESEATPVHRCSEILAEETGTRRDLKDQPLPGVPAWYTDGSSFIAEGKRRAGAAIVDGKRTVWASSLPEGTSAQKAELVALTQALRLAEGKDINIYTDSRYAFATAHIHGAIYKQRGWLTSAGKDIKNKEEILALLEAIHLPKRVAIIHCPGHQKGNDPVATGNRRADEAAKQAALSTRVLAETTKPAGKRTADGSEFEKRTADGSEFESPKKKAKVE

SEQ ID NO: 905 - protein, 2094 aa, synthetic construct
MPAAKRVKLDGGDKKYSIGLDIGTNSVGWAVITDEYKVPSKKFKVLGNTDRHSIKKNLIGALLFDSGETAEATRLKRTARRRYTRRKNRICYLQEIFSNEMAKVDDSFFHRLEESFLVEEDKKHERHPIFGNIVDEVAYHEKYPTIYHLRKKLVDSTDKADLRLIYLALAHMIKFRGHFLIEGDLNPDNSDVDKLFIQLVQTYNQLFEENPINASGVDAKAILSARLSKSRRLENLIAQLPGEKKNGLFGNLIALSLGLTPNFKSNFDLAEDAKLQLSKDTYDDDLDNLLAQIGDQYADLFLAAKNLSDAILLSDILRVNTEITKAPLSASMIKRYDEHHQDLTLLKALVRQQLPEKYKEIFFDQSKNGYAGYIDGGASQEEFYKFIKPILEKMDGTEELLVKLNREDLLRKQRTFDNGSIPHQIHLGELHAILRRQEDFYPFLKDNREKIEKILTFRIPYYVGPLARGNSRFAWMTRKSEETITPWNFEEVVDKGASAQSFIERMTNFDKNLPNEKVLPKHSLLYEYFTVYNELTKVKYVTEGMRKPAFLSGEQKKAIVDLLFKTNRKVTVKQLKEDYFKKIECFDSVEISGVEDRFNASLGTYHDLLKIIKDKDFLDNEENEDILEDIVLTLTLFEDREMIEERLKTYAHLFDDKVMKQLKRRRYTGWGRLSRKLINGIRDKQSGKTILDFLKSDGFANRNFMQLIHDDSLTFKEDIQKAQVSGQGDSLHEHIANLAGSPAIKKGILQTVKVVDELVKVMGRHKPENIVIEMARENQTTQKGQKNSRERMKRIEEGIKELGSQILKEHPVENTQLQNEKLYLYYLQNGRDMYVDQELDINRLSDYDVDHIVPQSFLKDDSIDNKVLTRSDKARGKSDNVPSEEVVKKMKNYWRQLLNAKLITQRKFDNLTKAERGGLSELDKAGFIKRQLVETRQITKHVAQILDSRMNTKYDENDKLIREVKVITLKSKLVSDFRKDFQFYKVREINNYHHAHDAYLNAVVGTALIKKYPKLESEFVYGDYKVYDVRKMIAKSEQEIGKATAKYFFYSNIMNFFKTEITLANGEIRKRPLIETNGETGEIVWDKGRDFATVRKVLSMPQVNIVKKTEVQTGGFSKESILPKRNSDKLIARKKDWDPKKYGGFDSPTVAYSVLVVAKVEKGKSKKLKSVKELLGITIMERSSFEKNPIDFLEAKGYKEVKKDLIIKLPKYSLFELENGRKRMLASAGELQKGNELALPSKYVNFLYLASHYEKLKGSPEDNEQKQLFVEQHKHYLDEIIEQISEFSKRVILADANLDKVLSAYNKHRDKPIREQAENIIHLFTLTNLGAPAAFKYFDTTIDRKRYTSTKEVLDATLIHQSITGLYETRIDLSQLGGDGGEAAAKGGSGSSGGVLNLEEEYRLHEKPVPSSIDPSWLQLFPTVWAERAGMGLANQVPPVVVELRSGASPVAVRQYPMSKEAREGIRPHIQRFLDLGVLVPCQSPWNTPLLPVKKPGTNDYRPVQDLREINKRVQDIHPTVPNPYNLLSSLPPSHTWYSVLDLKDAFFCLKLHPNSQPLFAFEWRDPEKGNTGQLTWTRLPQGFKNSPTLFNEALHRDLAPFRALNPQVVLLQYVDDLLVAAPTYRDCKEGTQKLLQELSKLGYRVSAKKAQLCQKEVTYLGYLLKEGKRWLTPARKATVMKIPPPTTPRQVREFLGKAGFCRLFIPGFASLAAPLYPLTKPSIPFIWTEEHQKAFDRIKEALLSAPALALPDLTKPFTLYVDERAGVARGVLTQTLGPWRRPVAYLSKKLDPVASGWPTCLKAVAAVALLLKDADKLTLGQNVTVIASHSLESIVRQPPDRWMTNARMTHYQSLLLNERVSFAPPAVLNPATLLPVESEATPVHRCSEILAEETGTRRDLKDQPLPGVPAWYTDGSSFIAEGKRRAGAAIVDGKRTVWASSLPEGTSAQKAELVALTQALRLAEGKDINIYTDSRYAFATAHIHGAIYKQRGWLTSAGKDIKNKEEILALLEAIHLPKRVAIIHCPGHQKGNDPVATGNRRADEAAKQAALSTRVLAETTKPAGKRTADGSEFEKRTADGSEFESPKKKAKVE

SEQ ID NO: 906 - protein, 2089 aa, synthetic construct
MPAAKRVKLDGGDKKYSIGLDIGTNSVGWAVITDEYKVPSKKFKVLGNTDRHSIKKNLIGALLFDSGETAEATRLKRTARRRYTRRKNRICYLQEIFSNEMAKVDDSFFHRLEESFLVEEDKKHERHPIFGNIVDEVAYHEKYPTIYHLRKKLVDSTDKADLRLIYLALAHMIKFRGHFLIEGDLNPDNSDVDKLFIQLVQTYNQLFEENPINASGVDAKAILSARLSKSRRLENLIAQLPGEKKNGLFGNLIALSLGLTPNFKSNFDLAEDAKLQLSKDTYDDDLDNLLAQIGDQYADLFLAAKNLSDAILLSDILRVNTEITKAPLSASMIKRYDEHHQDLTLLKALVRQQLPEKYKEIFFDQSKNGYAGYIDGGASQEEFYKFIKPILEKMDGTEELLVKLNREDLLRKQRTFDNGSIPHQIHLGELHAILRRQEDFYPFLKDNREKIEKILTFRIPYYVGPLARGNSRFAWMTRKSEETITPWNFEEVVDKGASAQSFIERMTNFDKNLPNEKVLPKHSLLYEYFTVYNELTKVKYVTEGMRKPAFLSGEQKKAIVDLLFKTNRKVTVKQLKEDYFKKIECFDSVEISGVEDRFNASLGTYHDLLKIIKDKDFLDNEENEDILEDIVLTLTLFEDREMIEERLKTYAHLFDDKVMKQLKRRRYTGWGRLSRKLINGIRDKQSGKTILDFLKSDGFANRNFMQLIHDDSLTFKEDIQKAQVSGQGDSLHEHIANLAGSPAIKKGILQTVKVVDELVKVMGRHKPENIVIEMARENQTTQKGQKNSRERMKRIEEGIKELGSQILKEHPVENTQLQNEKLYLYYLQNGRDMYVDQELDINRLSDYDVDHIVPQSFLKDDSIDNKVLTRSDKARGKSDNVPSEEVVKKMKNYWRQLLNAKLITQRKFDNLTKAERGGLSELDKAGFIKRQLVETRQITKHVAQILDSRMNTKYDENDKLIREVKVITLKSKLVSDFRKDFQFYKVREINNYHHAHDAYLNAVVGTALIKKYPKLESEFVYGDYKVYDVRKMIAKSEQEIGKATAKYFFYSNIMNFFKTEITLANGEIRKRPLIETNGETGEIVWDKGRDFATVRKVLSMPQVNIVKKTEVQTGGFSKESILPKRNSDKLIARKKDWDPKKYGGFDSPTVAYSVLVVAKVEKGKSKKLKSVKELLGITIMERSSFEKNPIDFLEAKGYKEVKKDLIIKLPKYSLFELENGRKRMLASAGELQKGNELALPSKYVNFLYLASHYEKLKGSPEDNEQKQLFVEQHKHYLDEIIEQISEFSKRVILADANLDKVLSAYNKHRDKPIREQAENIIHLFTLTNLGAPAAFKYFDTTIDRKRYTSTKEVLDATLIHQSITGLYETRIDLSQLGGDGGGGSGGSGGVLNLEEEYRLHEKPVPSSIDPSWLQLFPTVWAERAGMGLANQVPPVVVELRSGASPVAVRQYPMSKEAREGIRPHIQRFLDLGVLVPCQSPWNTPLLPVKKPGTNDYRPVQDLREINKRVQDIHPTVPNPYNLLSSLPPSHTWYSVLDLKDAFFCLKLHPNSQPLFAFEWRDPEKGNTGQLTWTRLPQGFKNSPTLFNEALHRDLAPFRALNPQVVLLQYVDDLLVAAPTYRDCKEGTQKLLQELSKLGYRVSAKKAQLCQKEVTYLGYLLKEGKRWLTPARKATVMKIPPPTTPRQVREFLGKAGFCRLFIPGFASLAAPLYPLTKPSIPFIWTEEHQKAFDRIKEALLSAPALALPDLTKPFTLYVDERAGVARGVLTQTLGPWRRPVAYLSKKLDPVASGWPTCLKAVAAVALLLKDADKLTLGQNVTVIASHSLESIVRQPPDRWMTNARMTHYQSLLLNERVSFAPPAVLNPATLLPVESEATPVHRCSEILAEETGTRRDLKDQPLPGVPAWYTDGSSFIAEGKRRAGAAIVDGKRTVWASSLPEGTSAQKAELVALTQALRLAEGKDINIYTDSRYAFATAHIHGAIYKQRGWLTSAGKDIKNKEEILALLEAIHLPKRVAIIHCPGHQKGNDPVATGNRRADEAAKQAALSTRVLAETTKPAGKRTADGSEFEKRTADGSEFESPKKKAKVE

SEQ ID NO: 907 - protein, 2095 aa, synthetic construct
MPAAKRVKLDGGDKKYSIGLDIGTNSVGWAVITDEYKVPSKKFKVLGNTDRHSIKKNLIGALLFDSGETAEATRLKRTARRRYTRRKNRICYLQEIFSNEMAKVDDSFFHRLEESFLVEEDKKHERHPIFGNIVDEVAYHEKYPTIYHLRKKLVDSTDKADLRLIYLALAHMIKFRGHFLIEGDLNPDNSDVDKLFIQLVQTYNQLFEENPINASGVDAKAILSARLSKSRRLENLIAQLPGEKKNGLFGNLIALSLGLTPNFKSNFDLAEDAKLQLSKDTYDDDLDNLLAQIGDQYADLFLAAKNLSDAILLSDILRVNTEITKAPLSASMIKRYDEHHQDLTLLKALVRQQLPEKYKEIFFDQSKNGYAGYIDGGASQEEFYKFIKPILEKMDGTEELLVKLNREDLLRKQRTFDNGSIPHQIHLGELHAILRRQEDFYPFLKDNREKIEKILTFRIPYYVGPLARGNSRFAWMTRKSEETITPWNFEEVVDKGASAQSFIERMTNFDKNLPNEKVLPKHSLLYEYFTVYNELTKVKYVTEGMRKPAFLSGEQKKAIVDLLFKTNRKVTVKQLKEDYFKKIECFDSVEISGVEDRFNASLGTYHDLLKIIKDKDFLDNEENEDILEDIVLTLTLFEDREMIEERLKTYAHLFDDKVMKQLKRRRYTGWGRLSRKLINGIRDKQSGKTILDFLKSDGFANRNFMQLIHDDSLTFKEDIQKAQVSGQGDSLHEHIANLAGSPAIKKGILQTVKVVDELVKVMGRHKPENIVIEMARENQTTQKGQKNSRERMKRIEEGIKELGSQILKEHPVENTQLQNEKLYLYYLQNGRDMYVDQELDINRLSDYDVDHIVPQSFLKDDSIDNKVLTRSDKARGKSDNVPSEEVVKKMKNYWRQLLNAKLITQRKFDNLTKAERGGLSELDKAGFIKRQLVETRQITKHVAQILDSRMNTKYDENDKLIREVKVITLKSKLVSDFRKDFQFYKVREINNYHHAHDAYLNAVVGTALIKKYPKLESEFVYGDYKVYDVRKMIAKSEQEIGKATAKYFFYSNIMNFFKTEITLANGEIRKRPLIETNGETGEIVWDKGRDFATVRKVLSMPQVNIVKKTEVQTGGFSKESILPKRNSDKLIARKKDWDPKKYGGFDSPTVAYSVLVVAKVEKGKSKKLKSVKELLGITIMERSSFEKNPIDFLEAKGYKEVKKDLIIKLPKYSLFELENGRKRMLASAGELQKGNELALPSKYVNFLYLASHYEKLKGSPEDNEQKQLFVEQHKHYLDEIIEQISEFSKRVILADANLDKVLSAYNKHRDKPIREQAENIIHLFTLTNLGAPAAFKYFDTTIDRKRYTSTKEVLDATLIHQSITGLYETRIDLSQLGGDGGGSAGSAAGSGEFGGVLNLEEEYRLHEKPVPSSIDPSWLQLFPTVWAERAGMGLANQVPPVVVELRSGASPVAVRQYPMSKEAREGIRPHIQRFLDLGVLVPCQSPWNTPLLPVKKPGTNDYRPVQDLREINKRVQDIHPTVPNPYNLLSSLPPSHTWYSVLDLKDAFFCLKLHPNSQPLFAFEWRDPEKGNTGQLTWTRLPQGFKNSPTLFNEALHRDLAPFRALNPQVVLLQYVDDLLVAAPTYRDCKEGTQKLLQELSKLGYRVSAKKAQLCQKEVTYLGYLLKEGKRWLTPARKATVMKIPPPTTPRQVREFLGKAGFCRLFIPGFASLAAPLYPLTKPSIPFIWTEEHQKAFDRIKEALLSAPALALPDLTKPFTLYVDERAGVARGVLTQTLGPWRRPVAYLSKKLDPVASGWPTCLKAVAAVALLLKDADKLTLGQNVTVIASHSLESIVRQPPDRWMTNARMTHYQSLLLNERVSFAPPAVLNPATLLPVESEATPVHRCSEILAEETGTRRDLKDQPLPGVPAWYTDGSSFIAEGKRRAGAAIVDGKRTVWASSLPEGTSAQKAELVALTQALRLAEGKDINIYTDSRYAFATAHIHGAIYKQRGWLTSAGKDIKNKEEILALLEAIHLPKRVAIIHCPGHQKGNDPVATGNRRADEAAKQAALSTRVLAETTKPAGKRTADGSEFEKRTADGSEFESPKKKAKVE

SEQ ID NO: 908 - protein, 2092 aa, synthetic construct
MPAAKRVKLDGGDKKYSIGLDIGTNSVGWAVITDEYKVPSKKFKVLGNTDRHSIKKNLIGALLFDSGETAEATRLKRTARRRYTRRKNRICYLQEIFSNEMAKVDDSFFHRLEESFLVEEDKKHERHPIFGNIVDEVAYHEKYPTIYHLRKKLVDSTDKADLRLIYLALAHMIKFRGHFLIEGDLNPDNSDVDKLFIQLVQTYNQLFEENPINASGVDAKAILSARLSKSRRLENLIAQLPGEKKNGLFGNLIALSLGLTPNFKSNFDLAEDAKLQLSKDTYDDDLDNLLAQIGDQYADLFLAAKNLSDAILLSDILRVNTEITKAPLSASMIKRYDEHHQDLTLLKALVRQQLPEKYKEIFFDQSKNGYAGYIDGGASQEEFYKFIKPILEKMDGTEELLVKLNREDLLRKQRTFDNGSIPHQIHLGELHAILRRQEDFYPFLKDNREKIEKILTFRIPYYVGPLARGNSRFAWMTRKSEETITPWNFEEVVDKGASAQSFIERMTNFDKNLPNEKVLPKHSLLYEYFTVYNELTKVKYVTEGMRKPAFLSGEQKKAIVDLLFKTNRKVTVKQLKEDYFKKIECFDSVEISGVEDRFNASLGTYHDLLKIIKDKDFLDNEENEDILEDIVLTLTLFEDREMIEERLKTYAHLFDDKVMKQLKRRRYTGWGRLSRKLINGIRDKQSGKTILDFLKSDGFANRNFMQLIHDDSLTFKEDIQKAQVSGQGDSLHEHIANLAGSPAIKKGILQTVKVVDELVKVMGRHKPENIVIEMARENQTTQKGQKNSRERMKRIEEGIKELGSQILKEHPVENTQLQNEKLYLYYLQNGRDMYVDQELDINRLSDYDVDHIVPQSFLKDDSIDNKVLTRSDKARGKSDNVPSEEVVKKMKNYWRQLLNAKLITQRKFDNLTKAERGGLSELDKAGFIKRQLVETRQITKHVAQILDSRMNTKYDENDKLIREVKVITLKSKLVSDFRKDFQFYKVREINNYHHAHDAYLNAVVGTALIKKYPKLESEFVYGDYKVYDVRKMIAKSEQEIGKATAKYFFYSNIMNFFKTEITLANGEIRKRPLIETNGETGEIVWDKGRDFATVRKVLSMPQVNIVKKTEVQTGGFSKESILPKRNSDKLIARKKDWDPKKYGGFDSPTVAYSVLVVAKVEKGKSKKLKSVKELLGITIMERSSFEKNPIDFLEAKGYKEVKKDLIIKLPKYSLFELENGRKRMLASAGELQKGNELALPSKYVNFLYLASHYEKLKGSPEDNEQKQLFVEQHKHYLDEIIEQISEFSKRVILADANLDKVLSAYNKHRDKPIREQAENIIHLFTLTNLGAPAAFKYFDTTIDRKRYTSTKEVLDATLIHQSITGLYETRIDLSQLGGDGGGGSGGGPAPGGVLNLEEEYRLHEKPVPSSIDPSWLQLFPTVWAERAGMGLANQVPPVVVELRSGASPVAVRQYPMSKEAREGIRPHIQRFLDLGVLVPCQSPWNTPLLPVKKPGTNDYRPVQDLREINKRVQDIHPTVPNPYNLLSSLPPSHTWYSVLDLKDAFFCLKLHPNSQPLFAFEWRDPEKGNTGQLTWTRLPQGFKNSPTLFNEALHRDLAPFRALNPQVVLLQYVDDLLVAAPTYRDCKEGTQKLLQELSKLGYRVSAKKAQLCQKEVTYLGYLLKEGKRWLTPARKATVMKIPPPTTPRQVREFLGKAGFCRLFIPGFASLAAPLYPLTKPSIPFIWTEEHQKAFDRIKEALLSAPALALPDLTKPFTLYVDERAGVARGVLTQTLGPWRRPVAYLSKKLDPVASGWPTCLKAVAAVALLLKDADKLTLGQNVTVIASHSLESIVRQPPDRWMTNARMTHYQSLLLNERVSFAPPAVLNPATLLPVESEATPVHRCSEILAEETGTRRDLKDQPLPGVPAWYTDGSSFIAEGKRRAGAAIVDGKRTVWASSLPEGTSAQKAELVALTQALRLAEGKDINIYTDSRYAFATAHIHGAIYKQRGWLTSAGKDIKNKEEILALLEAIHLPKRVAIIHCPGHQKGNDPVATGNRRADEAAKQAALSTRVLAETTKPAGKRTADGSEFEKRTADGSEFESPKKKAKVE

SEQ ID NO: 909 - protein, 2092 aa, synthetic construct
MPAAKRVKLDGGDKKYSIGLDIGTNSVGWAVITDEYKVPSKKFKVLGNTDRHSIKKNLIGALLFDSGETAEATRLKRTARRRYTRRKNRICYLQEIFSNEMAKVDDSFFHRLEESFLVEEDKKHERHPIFGNIVDEVAYHEKYPTIYHLRKKLVDSTDKADLRLIYLALAHMIKFRGHFLIEGDLNPDNSDVDKLFIQLVQTYNQLFEENPINASGVDAKAILSARLSKSRRLENLIAQLPGEKKNGLFGNLIALSLGLTPNFKSNFDLAEDAKLQLSKDTYDDDLDNLLAQIGDQYADLFLAAKNLSDAILLSDILRVNTEITKAPLSASMIKRYDEHHQDLTLLKALVRQQLPEKYKEIFFDQSKNGYAGYIDGGASQEEFYKFIKPILEKMDGTEELLVKLNREDLLRKQRTFDNGSIPHQIHLGELHAILRRQEDFYPFLKDNREKIEKILTFRIPYYVGPLARGNSRFAWMTRKSEETITPWNFEEVVDKGASAQSFIERMTNFDKNLPNEKVLPKHSLLYEYFTVYNELTKVKYVTEGMRKPAFLSGEQKKAIVDLLFKTNRKVTVKQLKEDYFKKIECFDSVEISGVEDRFNASLGTYHDLLKIIKDKDFLDNEENEDILEDIVLTLTLFEDREMIEERLKTYAHLFDDKVMKQLKRRRYTGWGRLSRKLINGIRDKQSGKTILDFLKSDGFANRNFMQLIHDDSLTFKEDIQKAQVSGQGDSLHEHIANLAGSPAIKKGILQTVKVVDELVKVMGRHKPENIVIEMARENQTTQKGQKNSRERMKRIEEGIKELGSQILKEHPVENTQLQNEKLYLYYLQNGRDMYVDQELDINRLSDYDVDHIVPQSFLKDDSIDNKVLTRSDKARGKSDNVPSEEVVKKMKNYWRQLLNAKLITQRKFDNLTKAERGGLSELDKAGFIKRQLVETRQITKHVAQILDSRMNTKYDENDKLIREVKVITLKSKLVSDFRKDFQFYKVREINNYHHAHDAYLNAVVGTALIKKYPKLESEFVYGDYKVYDVRKMIAKSEQEIGKATAKYFFYSNIMNFFKTEITLANGEIRKRPLIETNGETGEIVWDKGRDFATVRKVLSMPQVNIVKKTEVQTGGFSKESILPKRNSDKLIARKKDWDPKKYGGFDSPTVAYSVLVVAKVEKGKSKKLKSVKELLGITIMERSSFEKNPIDFLEAKGYKEVKKDLIIKLPKYSLFELENGRKRMLASAGELQKGNELALPSKYVNFLYLASHYEKLKGSPEDNEQKQLFVEQHKHYLDEIIEQISEFSKRVILADANLDKVLSAYNKHRDKPIREQAENIIHLFTLTNLGAPAAFKYFDTTIDRKRYTSTKEVLDATLIHQSITGLYETRIDLSQLGGDGGGGSGSSGGGGGVLNLEEEYRLHEKPVPSSIDPSWLQLFPTVWAERAGMGLANQVPPVVVELRSGASPVAVRQYPMSKEAREGIRPHIQRFLDLGVLVPCQSPWNTPLLPVKKPGTNDYRPVQDLREINKRVQDIHPTVPNPYNLLSSLPPSHTWYSVLDLKDAFFCLKLHPNSQPLFAFEWRDPEKGNTGQLTWTRLPQGFKNSPTLFNEALHRDLAPFRALNPQVVLLQYVDDLLVAAPTYRDCKEGTQKLLQELSKLGYRVSAKKAQLCQKEVTYLGYLLKEGKRWLTPARKATVMKIPPPTTPRQVREFLGKAGFCRLFIPGFASLAAPLYPLTKPSIPFIWTEEHQKAFDRIKEALLSAPALALPDLTKPFTLYVDERAGVARGVLTQTLGPWRRPVAYLSKKLDPVASGWPTCLKAVAAVALLLKDADKLTLGQNVTVIASHSLESIVRQPPDRWMTNARMTHYQSLLLNERVSFAPPAVLNPATLLPVESEATPVHRCSEILAEETGTRRDLKDQPLPGVPAWYTDGSSFIAEGKRRAGAAIVDGKRTVWASSLPEGTSAQKAELVALTQALRLAEGKDINIYTDSRYAFATAHIHGAIYKQRGWLTSAGKDIKNKEEILALLEAIHLPKRVAIIHCPGHQKGNDPVATGNRRADEAAKQAALSTRVLAETTKPAGKRTADGSEFEKRTADGSEFESPKKKAKVE

SEQ ID NO: 910 - protein, 2094 aa, synthetic construct
MPAAKRVKLDGGDKKYSIGLDIGTNSVGWAVITDEYKVPSKKFKVLGNTDRHSIKKNLIGALLFDSGETAEATRLKRTARRRYTRRKNRICYLQEIFSNEMAKVDDSFFHRLEESFLVEEDKKHERHPIFGNIVDEVAYHEKYPTIYHLRKKLVDSTDKADLRLIYLALAHMIKFRGHFLIEGDLNPDNSDVDKLFIQLVQTYNQLFEENPINASGVDAKAILSARLSKSRRLENLIAQLPGEKKNGLFGNLIALSLGLTPNFKSNFDLAEDAKLQLSKDTYDDDLDNLLAQIGDQYADLFLAAKNLSDAILLSDILRVNTEITKAPLSASMIKRYDEHHQDLTLLKALVRQQLPEKYKEIFFDQSKNGYAGYIDGGASQEEFYKFIKPILEKMDGTEELLVKLNREDLLRKQRTFDNGSIPHQIHLGELHAILRRQEDFYPFLKDNREKIEKILTFRIPYYVGPLARGNSRFAWMTRKSEETITPWNFEEVVDKGASAQSFIERMTNFDKNLPNEKVLPKHSLLYEYFTVYNELTKVKYVTEGMRKPAFLSGEQKKAIVDLLFKTNRKVTVKQLKEDYFKKIECFDSVEISGVEDRFNASLGTYHDLLKIIKDKDFLDNEENEDILEDIVLTLTLFEDREMIEERLKTYAHLFDDKVMKQLKRRRYTGWGRLSRKLINGIRDKQSGKTILDFLKSDGFANRNFMQLIHDDSLTFKEDIQKAQVSGQGDSLHEHIANLAGSPAIKKGILQTVKVVDELVKVMGRHKPENIVIEMARENQTTQKGQKNSRERMKRIEEGIKELGSQILKEHPVENTQLQNEKLYLYYLQNGRDMYVDQELDINRLSDYDVDHIVPQSFLKDDSIDNKVLTRSDKARGKSDNVPSEEVVKKMKNYWRQLLNAKLITQRKFDNLTKAERGGLSELDKAGFIKRQLVETRQITKHVAQILDSRMNTKYDENDKLIREVKVITLKSKLVSDFRKDFQFYKVREINNYHHAHDAYLNAVVGTALIKKYPKLESEFVYGDYKVYDVRKMIAKSEQEIGKATAKYFFYSNIMNFFKTEITLANGEIRKRPLIETNGETGEIVWDKGRDFATVRKVLSMPQVNIVKKTEVQTGGFSKESILPKRNSDKLIARKKDWDPKKYGGFDSPTVAYSVLVVAKVEKGKSKKLKSVKELLGITIMERSSFEKNPIDFLEAKGYKEVKKDLIIKLPKYSLFELENGRKRMLASAGELQKGNELALPSKYVNFLYLASHYEKLKGSPEDNEQKQLFVEQHKHYLDEIIEQISEFSKRVILADANLDKVLSAYNKHRDKPIREQAENIIHLFTLTNLGAPAAFKYFDTTIDRKRYTSTKEVLDATLIHQSITGLYETRIDLSQLGGDGGGSSEAAAKGGGGGVLNLEEEYRLHEKPVPSSIDPSWLQLFPTVWAERAGMGLANQVPPVVVELRSGASPVAVRQYPMSKEAREGIRPHIQRFLDLGVLVPCQSPWNTPLLPVKKPGTNDYRPVQDLREINKRVQDIHPTVPNPYNLLSSLPPSHTWYSVLDLKDAFFCLKLHPNSQPLFAFEWRDPEKGNTGQLTWTRLPQGFKNSPTLFNEALHRDLAPFRALNPQVVLLQYVDDLLVAAPTYRDCKEGTQKLLQELSKLGYRVSAKKAQLCQKEVTYLGYLLKEGKRWLTPARKATVMKIPPPTTPRQVREFLGKAGFCRLFIPGFASLAAPLYPLTKPSIPFIWTEEHQKAFDRIKEALLSAPALALPDLTKPFTLYVDERAGVARGVLTQTLGPWRRPVAYLSKKLDPVASGWPTCLKAVAAVALLLKDADKLTLGQNVTVIASHSLESIVRQPPDRWMTNARMTHYQSLLLNERVSFAPPAVLNPATLLPVESEATPVHRCSEILAEETGTRRDLKDQPLPGVPAWYTDGSSFIAEGKRRAGAAIVDGKRTVWASSLPEGTSAQKAELVALTQALRLAEGKDINIYTDSRYAFATAHIHGAIYKQRGWLTSAGKDIKNKEEILALLEAIHLPKRVAIIHCPGHQKGNDPVATGNRRADEAAKQAALSTRVLAETTKPAGKRTADGSEFEKRTADGSEFESPKKKAKVE

SEQ ID NO: 911 - protein, 2098 aa, synthetic construct
MPAAKRVKLDGGDKKYSIGLDIGTNSVGWAVITDEYKVPSKKFKVLGNTDRHSIKKNLIGALLFDSGETAEATRLKRTARRRYTRRKNRICYLQEIFSNEMAKVDDSFFHRLEESFLVEEDKKHERHPIFGNIVDEVAYHEKYPTIYHLRKKLVDSTDKADLRLIYLALAHMIKFRGHFLIEGDLNPDNSDVDKLFIQLVQTYNQLFEENPINASGVDAKAILSARLSKSRRLENLIAQLPGEKKNGLFGNLIALSLGLTPNFKSNFDLAEDAKLQLSKDTYDDDLDNLLAQIGDQYADLFLAAKNLSDAILLSDILRVNTEITKAPLSASMIKRYDEHHQDLTLLKALVRQQLPEKYKEIFFDQSKNGYAGYIDGGASQEEFYKFIKPILEKMDGTEELLVKLNREDLLRKQRTFDNGSIPHQIHLGELHAILRRQEDFYPFLKDNREKIEKILTFRIPYYVGPLARGNSRFAWMTRKSEETITPWNFEEVVDKGASAQSFIERMTNFDKNLPNEKVLPKHSLLYEYFTVYNELTKVKYVTEGMRKPAFLSGEQKKAIVDLLFKTNRKVTVKQLKEDYFKKIECFDSVEISGVEDRFNASLGTYHDLLKIIKDKDFLDNEENEDILEDIVLTLTLFEDREMIEERLKTYAHLFDDKVMKQLKRRRYTGWGRLSRKLINGIRDKQSGKTILDFLKSDGFANRNFMQLIHDDSLTFKEDIQKAQVSGQGDSLHEHIANLAGSPAIKKGILQTVKVVDELVKVMGRHKPENIVIEMARENQTTQKGQKNSRERMKRIEEGIKELGSQILKEHPVENTQLQNEKLYLYYLQNGRDMYVDQELDINRLSDYDVDHIVPQSFLKDDSIDNKVLTRSDKARGKSDNVPSEEVVKKMKNYWRQLLNAKLITQRKFDNLTKAERGGLSELDKAGFIKRQLVETRQITKHVAQILDSRMNTKYDENDKLIREVKVITLKSKLVSDFRKDFQFYKVREINNYHHAHDAYLNAVVGTALIKKYPKLESEFVYGDYKVYDVRKMIAKSEQEIGKATAKYFFYSNIMNFFKTEITLANGEIRKRPLIETNGETGEIVWDKGRDFATVRKVLSMPQVNIVKKTEVQTGGFSKESILPKRNSDKLIARKKDWDPKKYGGFDSPTVAYSVLVVAKVEKGKSKKLKSVKELLGITIMERSSFEKNPIDFLEAKGYKEVKKDLIIKLPKYSLFELENGRKRMLASAGELQKGNELALPSKYVNFLYLASHYEKLKGSPEDNEQKQLFVEQHKHYLDEIIEQISEFSKRVILADANLDKVLSAYNKHRDKPIREQAENIIHLFTLTNLGAPAAFKYFDTTIDRKRYTSTKEVLDATLIHQSITGLYETRIDLSQLGGDGGGGGGSEAAAKGGGGSGGVLNLEEEYRLHEKPVPSSIDPSWLQLFPTVWAERAGMGLANQVPPVVVELRSGASPVAVRQYPMSKEAREGIRPHIQRFLDLGVLVPCQSPWNTPLLPVKKPGTNDYRPVQDLREINKRVQDIHPTVPNPYNLLSSLPPSHTWYSVLDLKDAFFCLKLHPNSQPLFAFEWRDPEKGNTGQLTWTRLPQGFKNSPTLFNEALHRDLAPFRALNPQVVLLQYVDDLLVAAPTYRDCKEGTQKLLQELSKLGYRVSAKKAQLCQKEVTYLGYLLKEGKRWLTPARKATVMKIPPPTTPRQVREFLGKAGFCRLFIPGFASLAAPLYPLTKPSIPFIWTEEHQKAFDRIKEALLSAPALALPDLTKPFTLYVDERAGVARGVLTQTLGPWRRPVAYLSKKLDPVASGWPTCLKAVAAVALLLKDADKLTLGQNVTVIASHSLESIVRQPPDRWMTNARMTHYQSLLLNERVSFAPPAVLNPATLLPVESEATPVHRCSEILAEETGTRRDLKDQPLPGVPAWYTDGSSFIAEGKRRAGAAIVDGKRTVWASSLPEGTSAQKAELVALTQALRLAEGKDINIYTDSRYAFATAHIHGAIYKQRGWLTSAGKDIKNKEEILALLEAIHLPKRVAIIHCPGHQKGNDPVATGNRRADEAAKQAALSTRVLAETTKPAGKRTADGSEFEKRTADGSEFESPKKKAKVE

SEQ ID NO: 912 - protein, 2094 aa, synthetic construct
MPAAKRVKLDGGDKKYSIGLDIGTNSVGWAVITDEYKVPSKKFKVLGNTDRHSIKKNLIGALLFDSGETAEATRLKRTARRRYTRRKNRICYLQEIFSNEMAKVDDSFFHRLEESFLVEEDKKHERHPIFGNIVDEVAYHEKYPTIYHLRKKLVDSTDKADLRLIYLALAHMIKFRGHFLIEGDLNPDNSDVDKLFIQLVQTYNQLFEENPINASGVDAKAILSARLSKSRRLENLIAQLPGEKKNGLFGNLIALSLGLTPNFKSNFDLAEDAKLQLSKDTYDDDLDNLLAQIGDQYADLFLAAKNLSDAILLSDILRVNTEITKAPLSASMIKRYDEHHQDLTLLKALVRQQLPEKYKEIFFDQSKNGYAGYIDGGASQEEFYKFIKPILEKMDGTEELLVKLNREDLLRKQRTFDNGSIPHQIHLGELHAILRRQEDFYPFLKDNREKIEKILTFRIPYYVGPLARGNSRFAWMTRKSEETITPWNFEEVVDKGASAQSFIERMTNFDKNLPNEKVLPKHSLLYEYFTVYNELTKVKYVTEGMRKPAFLSGEQKKAIVDLLFKTNRKVTVKQLKEDYFKKIECFDSVEISGVEDRFNASLGTYHDLLKIIKDKDFLDNEENEDILEDIVLTLTLFEDREMIEERLKTYAHLFDDKVMKQLKRRRYTGWGRLSRKLINGIRDKQSGKTILDFLKSDGFANRNFMQLIHDDSLTFKEDIQKAQVSGQGDSLHEHIANLAGSPAIKKGILQTVKVVDELVKVMGRHKPENIVIEMARENQTTQKGQKNSRERMKRIEEGIKELGSQILKEHPVENTQLQNEKLYLYYLQNGRDMYVDQELDINRLSDYDVDHIVPQSFLKDDSIDNKVLTRSDKARGKSDNVPSEEVVKKMKNYWRQLLNAKLITQRKFDNLTKAERGGLSELDKAGFIKRQLVETRQITKHVAQILDSRMNTKYDENDKLIREVKVITLKSKLVSDFRKDFQFYKVREINNYHHAHDAYLNAVVGTALIKKYPKLESEFVYGDYKVYDVRKMIAKSEQEIGKATAKYFFYSNIMNFFKTEITLANGEIRKRPLIETNGETGEIVWDKGRDFATVRKVLSMPQVNIVKKTEVQTGGFSKESILPKRNSDKLIARKKDWDPKKYGGFDSPTVAYSVLVVAKVEKGKSKKLKSVKELLGITIMERSSFEKNPIDFLEAKGYKEVKKDLIIKLPKYSLFELENGRKRMLASAGELQKGNELALPSKYVNFLYLASHYEKLKGSPEDNEQKQLFVEQHKHYLDEIIEQISEFSKRVILADANLDKVLSAYNKHRDKPIREQAENIIHLFTLTNLGAPAAFKYFDTTIDRKRYTSTKEVLDATLIHQSITGLYETRIDLSQLGGDGGGGSEAAAKPAPGGVLNLEEEYRLHEKPVPSSIDPSWLQLFPTVWAERAGMGLANQVPPVVVELRSGASPVAVRQYPMSKEAREGIRPHIQRFLDLGVLVPCQSPWNTPLLPVKKPGTNDYRPVQDLREINKRVQDIHPTVPNPYNLLSSLPPSHTWYSVLDLKDAFFCLKLHPNSQPLFAFEWRDPEKGNTGQLTWTRLPQGFKNSPTLFNEALHRDLAPFRALNPQVVLLQYVDDLLVAAPTYRDCKEGTQKLLQELSKLGYRVSAKKAQLCQKEVTYLGYLLKEGKRWLTPARKATVMKIPPPTTPRQVREFLGKAGFCRLFIPGFASLAAPLYPLTKPSIPFIWTEEHQKAFDRIKEALLSAPALALPDLTKPFTLYVDERAGVARGVLTQTLGPWRRPVAYLSKKLDPVASGWPTCLKAVAAVALLLKDADKLTLGQNVTVIASHSLESIVRQPPDRWMTNARMTHYQSLLLNERVSFAPPAVLNPATLLPVESEATPVHRCSEILAEETGTRRDLKDQPLPGVPAWYTDGSSFIAEGKRRAGAAIVDGKRTVWASSLPEGTSAQKAELVALTQALRLAEGKDINIYTDSRYAFATAHIHGAIYKQRGWLTSAGKDIKNKEEILALLEAIHLPKRVAIIHCPGHQKGNDPVATGNRRADEAAKQAALSTRVLAETTKPAGKRTADGSEFEKRTADGSEFESPKKKAKVE

SEQ ID NO: 913 - protein, 2092 aa, synthetic construct
MPAAKRVKLDGGDKKYSIGLDIGTNSVGWAVITDEYKVPSKKFKVLGNTDRHSIKKNLIGALLFDSGETAEATRLKRTARRRYTRRKNRICYLQEIFSNEMAKVDDSFFHRLEESFLVEEDKKHERHPIFGNIVDEVAYHEKYPTIYHLRKKLVDSTDKADLRLIYLALAHMIKFRGHFLIEGDLNPDNSDVDKLFIQLVQTYNQLFEENPINASGVDAKAILSARLSKSRRLENLIAQLPGEKKNGLFGNLIALSLGLTPNFKSNFDLAEDAKLQLSKDTYDDDLDNLLAQIGDQYADLFLAAKNLSDAILLSDILRVNTEITKAPLSASMIKRYDEHHQDLTLLKALVRQQLPEKYKEIFFDQSKNGYAGYIDGGASQEEFYKFIKPILEKMDGTEELLVKLNREDLLRKQRTFDNGSIPHQIHLGELHAILRRQEDFYPFLKDNREKIEKILTFRIPYYVGPLARGNSRFAWMTRKSEETITPWNFEEVVDKGASAQSFIERMTNFDKNLPNEKVLPKHSLLYEYFTVYNELTKVKYVTEGMRKPAFLSGEQKKAIVDLLFKTNRKVTVKQLKEDYFKKIECFDSVEISGVEDRFNASLGTYHDLLKIIKDKDFLDNEENEDILEDIVLTLTLFEDREMIEERLKTYAHLFDDKVMKQLKRRRYTGWGRLSRKLINGIRDKQSGKTILDFLKSDGFANRNFMQLIHDDSLTFKEDIQKAQVSGQGDSLHEHIANLAGSPAIKKGILQTVKVVDELVKVMGRHKPENIVIEMARENQTTQKGQKNSRERMKRIEEGIKELGSQILKEHPVENTQLQNEKLYLYYLQNGRDMYVDQELDINRLSDYDVDHIVPQSFLKDDSIDNKVLTRSDKARGKSDNVPSEEVVKKMKNYWRQLLNAKLITQRKFDNLTKAERGGLSELDKAGFIKRQLVETRQITKHVAQILDSRMNTKYDENDKLIREVKVITLKSKLVSDFRKDFQFYKVREINNYHHAHDAYLNAVVGTALIKKYPKLESEFVYGDYKVYDVRKMIAKSEQEIGKATAKYFFYSNIMNFFKTEITLANGEIRKRPLIETNGETGEIVWDKGRDFATVRKVLSMPQVNIVKKTEVQTGGFSKESILPKRNSDKLIARKKDWDPKKYGGFDSPTVAYSVLVVAKVEKGKSKKLKSVKELLGITIMERSSFEKNPIDFLEAKGYKEVKKDLIIKLPKYSLFELENGRKRMLASAGELQKGNELALPSKYVNFLYLASHYEKLKGSPEDNEQKQLFVEQHKHYLDEIIEQISEFSKRVILADANLDKVLSAYNKHRDKPIREQAENIIHLFTLTNLGAPAAFKYFDTTIDRKRYTSTKEVLDATLIHQSITGLYETRIDLSQLGGDGGGGGPAPGSSGGVLNLEEEYRLHEKPVPSSIDPSWLQLFPTVWAERAGMGLANQVPPVVVELRSGASPVAVRQYPMSKEAREGIRPHIQRFLDLGVLVPCQSPWNTPLLPVKKPGTNDYRPVQDLREINKRVQDIHPTVPNPYNLLSSLPPSHTWYSVLDLKDAFFCLKLHPNSQPLFAFEWRDPEKGNTGQLTWTRLPQGFKNSPTLFNEALHRDLAPFRALNPQVVLLQYVDDLLVAAPTYRDCKEGTQKLLQELSKLGYRVSAKKAQLCQKEVTYLGYLLKEGKRWLTPARKATVMKIPPPTTPRQVREFLGKAGFCRLFIPGFASLAAPLYPLTKPSIPFIWTEEHQKAFDRIKEALLSAPALALPDLTKPFTLYVDERAGVARGVLTQTLGPWRRPVAYLSKKLDPVASGWPTCLKAVAAVALLLKDADKLTLGQNVTVIASHSLESIVRQPPDRWMTNARMTHYQSLLLNERVSFAPPAVLNPATLLPVESEATPVHRCSEILAEETGTRRDLKDQPLPGVPAWYTDGSSFIAEGKRRAGAAIVDGKRTVWASSLPEGTSAQKAELVALTQALRLAEGKDINIYTDSRYAFATAHIHGAIYKQRGWLTSAGKDIKNKEEILALLEAIHLPKRVAIIHCPGHQKGNDPVATGNRRADEAAKQAALSTRVLAETTKPAGKRTADGSEFEKRTADGSEFESPKKKAKVE

SEQ ID NO: 914 - protein, 2089 aa, synthetic construct
MPAAKRVKLDGGDKKYSIGLDIGTNSVGWAVITDEYKVPSKKFKVLGNTDRHSIKKNLIGALLFDSGETAEATRLKRTARRRYTRRKNRICYLQEIFSNEMAKVDDSFFHRLEESFLVEEDKKHERHPIFGNIVDEVAYHEKYPTIYHLRKKLVDSTDKADLRLIYLALAHMIKFRGHFLIEGDLNPDNSDVDKLFIQLVQTYNQLFEENPINASGVDAKAILSARLSKSRRLENLIAQLPGEKKNGLFGNLIALSLGLTPNFKSNFDLAEDAKLQLSKDTYDDDLDNLLAQIGDQYADLFLAAKNLSDAILLSDILRVNTEITKAPLSASMIKRYDEHHQDLTLLKALVRQQLPEKYKEIFFDQSKNGYAGYIDGGASQEEFYKFIKPILEKMDGTEELLVKLNREDLLRKQRTFDNGSIPHQIHLGELHAILRRQEDFYPFLKDNREKIEKILTFRIPYYVGPLARGNSRFAWMTRKSEETITPWNFEEVVDKGASAQSFIERMTNFDKNLPNEKVLPKHSLLYEYFTVYNELTKVKYVTEGMRKPAFLSGEQKKAIVDLLFKTNRKVTVKQLKEDYFKKIECFDSVEISGVEDRFNASLGTYHDLLKIIKDKDFLDNEENEDILEDIVLTLTLFEDREMIEERLKTYAHLFDDKVMKQLKRRRYTGWGRLSRKLINGIRDKQSGKTILDFLKSDGFANRNFMQLIHDDSLTFKEDIQKAQVSGQGDSLHEHIANLAGSPAIKKGILQTVKVVDELVKVMGRHKPENIVIEMARENQTTQKGQKNSRERMKRIEEGIKELGSQILKEHPVENTQLQNEKLYLYYLQNGRDMYVDQELDINRLSDYDVDHIVPQSFLKDDSIDNKVLTRSDKARGKSDNVPSEEVVKKMKNYWRQLLNAKLITQRKFDNLTKAERGGLSELDKAGFIKRQLVETRQITKHVAQILDSRMNTKYDENDKLIREVKVITLKSKLVSDFRKDFQFYKVREINNYHHAHDAYLNAVVGTALIKKYPKLESEFVYGDYKVYDVRKMIAKSEQEIGKATAKYFFYSNIMNFFKTEITLANGEIRKRPLIETNGETGEIVWDKGRDFATVRKVLSMPQVNIVKKTEVQTGGFSKESILPKRNSDKLIARKKDWDPKKYGGFDSPTVAYSVLVVAKVEKGKSKKLKSVKELLGITIMERSSFEKNPIDFLEAKGYKEVKKDLIIKLPKYSLFELENGRKRMLASAGELQKGNELALPSKYVNFLYLASHYEKLKGSPEDNEQKQLFVEQHKHYLDEIIEQISEFSKRVILADANLDKVLSAYNKHRDKPIREQAENIIHLFTLTNLGAPAAFKYFDTTIDRKRYTSTKEVLDATLIHQSITGLYETRIDLSQLGGDGGPAPGGGGGVLNLEEEYRLHEKPVPSSIDPSWLQLFPTVWAERAGMGLANQVPPVVVELRSGASPVAVRQYPMSKEAREGIRPHIQRFLDLGVLVPCQSPWNTPLLPVKKPGTNDYRPVQDLREINKRVQDIHPTVPNPYNLLSSLPPSHTWYSVLDLKDAFFCLKLHPNSQPLFAFEWRDPEKGNTGQLTWTRLPQGFKNSPTLFNEALHRDLAPFRALNPQVVLLQYVDDLLVAAPTYRDCKEGTQKLLQELSKLGYRVSAKKAQLCQKEVTYLGYLLKEGKRWLTPARKATVMKIPPPTTPRQVREFLGKAGFCRLFIPGFASLAAPLYPLTKPSIPFIWTEEHQKAFDRIKEALLSAPALALPDLTKPFTLYVDERAGVARGVLTQTLGPWRRPVAYLSKKLDPVASGWPTCLKAVAAVALLLKDADKLTLGQNVTVIASHSLESIVRQPPDRWMTNARMTHYQSLLLNERVSFAPPAVLNPATLLPVESEATPVHRCSEILAEETGTRRDLKDQPLPGVPAWYTDGSSFIAEGKRRAGAAIVDGKRTVWASSLPEGTSAQKAELVALTQALRLAEGKDINIYTDSRYAFATAHIHGAIYKQRGWLTSAGKDIKNKEEILALLEAIHLPKRVAIIHCPGHQKGNDPVATGNRRADEAAKQAALSTRVLAETTKPAGKRTADGSEFEKRTADGSEFESPKKKAKVE

SEQ ID NO: 915 - protein, 2094 aa, synthetic construct
MPAAKRVKLDGGDKKYSIGLDIGTNSVGWAVITDEYKVPSKKFKVLGNTDRHSIKKNLIGALLFDSGETAEATRLKRTARRRYTRRKNRICYLQEIFSNEMAKVDDSFFHRLEESFLVEEDKKHERHPIFGNIVDEVAYHEKYPTIYHLRKKLVDSTDKADLRLIYLALAHMIKFRGHFLIEGDLNPDNSDVDKLFIQLVQTYNQLFEENPINASGVDAKAILSARLSKSRRLENLIAQLPGEKKNGLFGNLIALSLGLTPNFKSNFDLAEDAKLQLSKDTYDDDLDNLLAQIGDQYADLFLAAKNLSDAILLSDILRVNTEITKAPLSASMIKRYDEHHQDLTLLKALVRQQLPEKYKEIFFDQSKNGYAGYIDGGASQEEFYKFIKPILEKMDGTEELLVKLNREDLLRKQRTFDNGSIPHQIHLGELHAILRRQEDFYPFLKDNREKIEKILTFRIPYYVGPLARGNSRFAWMTRKSEETITPWNFEEVVDKGASAQSFIERMTNFDKNLPNEKVLPKHSLLYEYFTVYNELTKVKYVTEGMRKPAFLSGEQKKAIVDLLFKTNRKVTVKQLKEDYFKKIECFDSVEISGVEDRFNASLGTYHDLLKIIKDKDFLDNEENEDILEDIVLTLTLFEDREMIEERLKTYAHLFDDKVMKQLKRRRYTGWGRLSRKLINGIRDKQSGKTILDFLKSDGFANRNFMQLIHDDSLTFKEDIQKAQVSGQGDSLHEHIANLAGSPAIKKGILQTVKVVDELVKVMGRHKPENIVIEMARENQTTQKGQKNSRERMKRIEEGIKELGSQILKEHPVENTQLQNEKLYLYYLQNGRDMYVDQELDINRLSDYDVDHIVPQSFLKDDSIDNKVLTRSDKARGKSDNVPSEEVVKKMKNYWRQLLNAKLITQRKFDNLTKAERGGLSELDKAGFIKRQLVETRQITKHVAQILDSRMNTKYDENDKLIREVKVITLKSKLVSDFRKDFQFYKVREINNYHHAHDAYLNAVVGTALIKKYPKLESEFVYGDYKVYDVRKMIAKSEQEIGKATAKYFFYSNIMNFFKTEITLANGEIRKRPLIETNGETGEIVWDKGRDFATVRKVLSMPQVNIVKKTEVQTGGFSKESILPKRNSDKLIARKKDWDPKKYGGFDSPTVAYSVLVVAKVEKGKSKKLKSVKELLGITIMERSSFEKNPIDFLEAKGYKEVKKDLIIKLPKYSLFELENGRKRMLASAGELQKGNELALPSKYVNFLYLASHYEKLKGSPEDNEQKQLFVEQHKHYLDEIIEQISEFSKRVILADANLDKVLSAYNKHRDKPIREQAENIIHLFTLTNLGAPAAFKYFDTTIDRKRYTSTKEVLDATLIHQSITGLYETRIDLSQLGGDGGGSSGGSEAAAKGGVLNLEEEYRLHEKPVPSSIDPSWLQLFPTVWAERAGMGLANQVPPVVVELRSGASPVAVRQYPMSKEAREGIRPHIQRFLDLGVLVPCQSPWNTPLLPVKKPGTNDYRPVQDLREINKRVQDIHPTVPNPYNLLSSLPPSHTWYSVLDLKDAFFCLKLHPNSQPLFAFEWRDPEKGNTGQLTWTRLPQGFKNSPTLFNEALHRDLAPFRALNPQVVLLQYVDDLLVAAPTYRDCKEGTQKLLQELSKLGYRVSAKKAQLCQKEVTYLGYLLKEGKRWLTPARKATVMKIPPPTTPRQVREFLGKAGFCRLFIPGFASLAAPLYPLTKPSIPFIWTEEHQKAFDRIKEALLSAPALALPDLTKPFTLYVDERAGVARGVLTQTLGPWRRPVAYLSKKLDPVASGWPTCLKAVAAVALLLKDADKLTLGQNVTVIASHSLESIVRQPPDRWMTNARMTHYQSLLLNERVSFAPPAVLNPATLLPVESEATPVHRCSEILAEETGTRRDLKDQPLPGVPAWYTDGSSFIAEGKRRAGAAIVDGKRTVWASSLPEGTSAQKAELVALTQALRLAEGKDINIYTDSRYAFATAHIHGAIYKQRGWLTSAGKDIKNKEEILALLEAIHLPKRVAIIHCPGHQKGNDPVATGNRRADEAAKQAALSTRVLAETTKPAGKRTADGSEFEKRTADGSEFESPKKKAKVE

SEQ ID NO: 916 - protein, 2092 aa, synthetic construct
MPAAKRVKLDGGDKKYSIGLDIGTNSVGWAVITDEYKVPSKKFKVLGNTDRHSIKKNLIGALLFDSGETAEATRLKRTARRRYTRRKNRICYLQEIFSNEMAKVDDSFFHRLEESFLVEEDKKHERHPIFGNIVDEVAYHEKYPTIYHLRKKLVDSTDKADLRLIYLALAHMIKFRGHFLIEGDLNPDNSDVDKLFIQLVQTYNQLFEENPINASGVDAKAILSARLSKSRRLENLIAQLPGEKKNGLFGNLIALSLGLTPNFKSNFDLAEDAKLQLSKDTYDDDLDNLLAQIGDQYADLFLAAKNLSDAILLSDILRVNTEITKAPLSASMIKRYDEHHQDLTLLKALVRQQLPEKYKEIFFDQSKNGYAGYIDGGASQEEFYKFIKPILEKMDGTEELLVKLNREDLLRKQRTFDNGSIPHQIHLGELHAILRRQEDFYPFLKDNREKIEKILTFRIPYYVGPLARGNSRFAWMTRKSEETITPWNFEEVVDKGASAQSFIERMTNFDKNLPNEKVLPKHSLLYEYFTVYNELTKVKYVTEGMRKPAFLSGEQKKAIVDLLFKTNRKVTVKQLKEDYFKKIECFDSVEISGVEDRFNASLGTYHDLLKIIKDKDFLDNEENEDILEDIVLTLTLFEDREMIEERLKTYAHLFDDKVMKQLKRRRYTGWGRLSRKLINGIRDKQSGKTILDFLKSDGFANRNFMQLIHDDSLTFKEDIQKAQVSGQGDSLHEHIANLAGSPAIKKGILQTVKVVDELVKVMGRHKPENIVIEMARENQTTQKGQKNSRERMKRIEEGIKELGSQILKEHPVENTQLQNEKLYLYYLQNGRDMYVDQELDINRLSDYDVDHIVPQSFLKDDSIDNKVLTRSDKARGKSDNVPSEEVVKKMKNYWRQLLNAKLITQRKFDNLTKAERGGLSELDKAGFIKRQLVETRQITKHVAQILDSRMNTKYDENDKLIREVKVITLKSKLVSDFRKDFQFYKVREINNYHHAHDAYLNAVVGTALIKKYPKLESEFVYGDYKVYDVRKMIAKSEQEIGKATAKYFFYSNIMNFFKTEITLANGEIRKRPLIETNGETGEIVWDKGRDFATVRKVLSMPQVNIVKKTEVQTGGFSKESILPKRNSDKLIARKKDWDPKKYGGFDSPTVAYSVLVVAKVEKGKSKKLKSVKELLGITIMERSSFEKNPIDFLEAKGYKEVKKDLIIKLPKYSLFELENGRKRMLASAGELQKGNELALPSKYVNFLYLASHYEKLKGSPEDNEQKQLFVEQHKHYLDEIIEQISEFSKRVILADANLDKVLSAYNKHRDKPIREQAENIIHLFTLTNLGAPAAFKYFDTTIDRKRYTSTKEVLDATLIHQSITGLYETRIDLSQLGGDGGPAPAPAPAPGGVLNLEEEYRLHEKPVPSSIDPSWLQLFPTVWAERAGMGLANQVPPVVVELRSGASPVAVRQYPMSKEAREGIRPHIQRFLDLGVLVPCQSPWNTPLLPVKKPGTNDYRPVQDLREINKRVQDIHPTVPNPYNLLSSLPPSHTWYSVLDLKDAFFCLKLHPNSQPLFAFEWRDPEKGNTGQLTWTRLPQGFKNSPTLFNEALHRDLAPFRALNPQVVLLQYVDDLLVAAPTYRDCKEGTQKLLQELSKLGYRVSAKKAQLCQKEVTYLGYLLKEGKRWLTPARKATVMKIPPPTTPRQVREFLGKAGFCRLFIPGFASLAAPLYPLTKPSIPFIWTEEHQKAFDRIKEALLSAPALALPDLTKPFTLYVDERAGVARGVLTQTLGPWRRPVAYLSKKLDPVASGWPTCLKAVAAVALLLKDADKLTLGQNVTVIASHSLESIVRQPPDRWMTNARMTHYQSLLLNERVSFAPPAVLNPATLLPVESEATPVHRCSEILAEETGTRRDLKDQPLPGVPAWYTDGSSFIAEGKRRAGAAIVDGKRTVWASSLPEGTSAQKAELVALTQALRLAEGKDINIYTDSRYAFATAHIHGAIYKQRGWLTSAGKDIKNKEEILALLEAIHLPKRVAIIHCPGHQKGNDPVATGNRRADEAAKQAALSTRVLAETTKPAGKRTADGSEFEKRTADGSEFESPKKKAKVE

SEQ ID NO: 917 - protein, 2093 aa, synthetic construct
MPAAKRVKLDGGDKKYSIGLDIGTNSVGWAVITDEYKVPSKKFKVLGNTDRHSIKKNLIGALLFDSGETAEATRLKRTARRRYTRRKNRICYLQEIFSNEMAKVDDSFFHRLEESFLVEEDKKHERHPIFGNIVDEVAYHEKYPTIYHLRKKLVDSTDKADLRLIYLALAHMIKFRGHFLIEGDLNPDNSDVDKLFIQLVQTYNQLFEENPINASGVDAKAILSARLSKSRRLENLIAQLPGEKKNGLFGNLIALSLGLTPNFKSNFDLAEDAKLQLSKDTYDDDLDNLLAQIGDQYADLFLAAKNLSDAILLSDILRVNTEITKAPLSASMIKRYDEHHQDLTLLKALVRQQLPEKYKEIFFDQSKNGYAGYIDGGASQEEFYKFIKPILEKMDGTEELLVKLNREDLLRKQRTFDNGSIPHQIHLGELHAILRRQEDFYPFLKDNREKIEKILTFRIPYYVGPLARGNSRFAWMTRKSEETITPWNFEEVVDKGASAQSFIERMTNFDKNLPNEKVLPKHSLLYEYFTVYNELTKVKYVTEGMRKPAFLSGEQKKAIVDLLFKTNRKVTVKQLKEDYFKKIECFDSVEISGVEDRFNASLGTYHDLLKIIKDKDFLDNEENEDILEDIVLTLTLFEDREMIEERLKTYAHLFDDKVMKQLKRRRYTGWGRLSRKLINGIRDKQSGKTILDFLKSDGFANRNFMQLIHDDSLTFKEDIQKAQVSGQGDSLHEHIANLAGSPAIKKGILQTVKVVDELVKVMGRHKPENIVIEMARENQTTQKGQKNSRERMKRIEEGIKELGSQILKEHPVENTQLQNEKLYLYYLQNGRDMYVDQELDINRLSDYDVDHIVPQSFLKDDSIDNKVLTRSDKARGKSDNVPSEEVVKKMKNYWRQLLNAKLITQRKFDNLTKAERGGLSELDKAGFIKRQLVETRQITKHVAQILDSRMNTKYDENDKLIREVKVITLKSKLVSDFRKDFQFYKVREINNYHHAHDAYLNAVVGTALIKKYPKLESEFVYGDYKVYDVRKMIAKSEQEIGKATAKYFFYSNIMNFFKTEITLANGEIRKRPLIETNGETGEIVWDKGRDFATVRKVLSMPQVNIVKKTEVQTGGFSKESILPKRNSDKLIARKKDWDPKKYGGFDSPTVAYSVLVVAKVEKGKSKKLKSVKELLGITIMERSSFEKNPIDFLEAKGYKEVKKDLIIKLPKYSLFELENGRKRMLASAGELQKGNELALPSKYVNFLYLASHYEKLKGSPEDNEQKQLFVEQHKHYLDEIIEQISEFSKRVILADANLDKVLSAYNKHRDKPIREQAENIIHLFTLTNLGAPAAFKYFDTTIDRKRYTSTKEVLDATLIHQSITGLYETRIDLSQLGGDGGEAAAKEAAAKGGVLNLEEEYRLHEKPVPSSIDPSWLQLFPTVWAERAGMGLANQVPPVVVELRSGASPVAVRQYPMSKEAREGIRPHIQRFLDLGVLVPCQSPWNTPLLPVKKPGTNDYRPVQDLREINKRVQDIHPTVPNPYNLLSSLPPSHTWYSVLDLKDAFFCLKLHPNSQPLFAFEWRDPEKGNTGQLTWTRLPQGFKNSPTLFNEALHRDLAPFRALNPQVVLLQYVDDLLVAAPTYRDCKEGTQKLLQELSKLGYRVSAKKAQLCQKEVTYLGYLLKEGKRWLTPARKATVMKIPPPTTPRQVREFLGKAGFCRLFIPGFASLAAPLYPLTKPSIPFIWTEEHQKAFDRIKEALLSAPALALPDLTKPFTLYVDERAGVARGVLTQTLGPWRRPVAYLSKKLDPVASGWPTCLKAVAAVALLLKDADKLTLGQNVTVIASHSLESIVRQPPDRWMTNARMTHYQSLLLNERVSFAPPAVLNPATLLPVESEATPVHRCSEILAEETGTRRDLKDQPLPGVPAWYTDGSSFIAEGKRRAGAAIVDGKRTVWASSLPEGTSAQKAELVALTQALRLAEGKDINIYTDSRYAFATAHIHGAIYKQRGWLTSAGKDIKNKEEILALLEAIHLPKRVAIIHCPGHQKGNDPVATGNRRADEAAKQAALSTRVLAETTKPAGKRTADGSEFEKRTADGSEFESPKKKAKVE

SEQ ID NO: 918 - protein, 2092 aa, synthetic construct
MPAAKRVKLDGGDKKYSIGLDIGTNSVGWAVITDEYKVPSKKFKVLGNTDRHSIKKNLIGALLFDSGETAEATRLKRTARRRYTRRKNRICYLQEIFSNEMAKVDDSFFHRLEESFLVEEDKKHERHPIFGNIVDEVAYHEKYPTIYHLRKKLVDSTDKADLRLIYLALAHMIKFRGHFLIEGDLNPDNSDVDKLFIQLVQTYNQLFEENPINASGVDAKAILSARLSKSRRLENLIAQLPGEKKNGLFGNLIALSLGLTPNFKSNFDLAEDAKLQLSKDTYDDDLDNLLAQIGDQYADLFLAAKNLSDAILLSDILRVNTEITKAPLSASMIKRYDEHHQDLTLLKALVRQQLPEKYKEIFFDQSKNGYAGYIDGGASQEEFYKFIKPILEKMDGTEELLVKLNREDLLRKQRTFDNGSIPHQIHLGELHAILRRQEDFYPFLKDNREKIEKILTFRIPYYVGPLARGNSRFAWMTRKSEETITPWNFEEVVDKGASAQSFIERMTNFDKNLPNEKVLPKHSLLYEYFTVYNELTKVKYVTEGMRKPAFLSGEQKKAIVDLLFKTNRKVTVKQLKEDYFKKIECFDSVEISGVEDRFNASLGTYHDLLKIIKDKDFLDNEENEDILEDIVLTLTLFEDREMIEERLKTYAHLFDDKVMKQLKRRRYTGWGRLSRKLINGIRDKQSGKTILDFLKSDGFANRNFMQLIHDDSLTFKEDIQKAQVSGQGDSLHEHIANLAGSPAIKKGILQTVKVVDELVKVMGRHKPENIVIEMARENQTTQKGQKNSRERMKRIEEGIKELGSQILKEHPVENTQLQNEKLYLYYLQNGRDMYVDQELDINRLSDYDVDHIVPQSFLKDDSIDNKVLTRSDKARGKSDNVPSEEVVKKMKNYWRQLLNAKLITQRKFDNLTKAERGGLSELDKAGFIKRQLVETRQITKHVAQILDSRMNTKYDENDKLIREVKVITLKSKLVSDFRKDFQFYKVREINNYHHAHDAYLNAVVGTALIKKYPKLESEFVYGDYKVYDVRKMIAKSEQEIGKATAKYFFYSNIMNFFKTEITLANGEIRKRPLIETNGETGEIVWDKGRDFATVRKVLSMPQVNIVKKTEVQTGGFSKESILPKRNSDKLIARKKDWDPKKYGGFDSPTVAYSVLVVAKVEKGKSKKLKSVKELLGITIMERSSFEKNPIDFLEAKGYKEVKKDLIIKLPKYSLFELENGRKRMLASAGELQKGNELALPSKYVNFLYLASHYEKLKGSPEDNEQKQLFVEQHKHYLDEIIEQISEFSKRVILADANLDKVLSAYNKHRDKPIREQAENIIHLFTLTNLGAPAAFKYFDTTIDRKRYTSTKEVLDATLIHQSITGLYETRIDLSQLGGDGGGSSGGGGGSGGVLNLEEEYRLHEKPVPSSIDPSWLQLFPTVWAERAGMGLANQVPPVVVELRSGASPVAVRQYPMSKEAREGIRPHIQRFLDLGVLVPCQSPWNTPLLPVKKPGTNDYRPVQDLREINKRVQDIHPTVPNPYNLLSSLPPSHTWYSVLDLKDAFFCLKLHPNSQPLFAFEWRDPEKGNTGQLTWTRLPQGFKNSPTLFNEALHRDLAPFRALNPQVVLLQYVDDLLVAAPTYRDCKEGTQKLLQELSKLGYRVSAKKAQLCQKEVTYLGYLLKEGKRWLTPARKATVMKIPPPTTPRQVREFLGKAGFCRLFIPGFASLAAPLYPLTKPSIPFIWTEEHQKAFDRIKEALLSAPALALPDLTKPFTLYVDERAGVARGVLTQTLGPWRRPVAYLSKKLDPVASGWPTCLKAVAAVALLLKDADKLTLGQNVTVIASHSLESIVRQPPDRWMTNARMTHYQSLLLNERVSFAPPAVLNPATLLPVESEATPVHRCSEILAEETGTRRDLKDQPLPGVPAWYTDGSSFIAEGKRRAGAAIVDGKRTVWASSLPEGTSAQKAELVALTQALRLAEGKDINIYTDSRYAFATAHIHGAIYKQRGWLTSAGKDIKNKEEILALLEAIHLPKRVAIIHCPGHQKGNDPVATGNRRADEAAKQAALSTRVLAETTKPAGKRTADGSEFEKRTADGSEFESPKKKAKVE

SEQ ID NO: 919 - protein, 2094 aa, synthetic construct
MPAAKRVKLDGGDKKYSIGLDIGTNSVGWAVITDEYKVPSKKFKVLGNTDRHSIKKNLIGALLFDSGETAEATRLKRTARRRYTRRKNRICYLQEIFSNEMAKVDDSFFHRLEESFLVEEDKKHERHPIFGNIVDEVAYHEKYPTIYHLRKKLVDSTDKADLRLIYLALAHMIKFRGHFLIEGDLNPDNSDVDKLFIQLVQTYNQLFEENPINASGVDAKAILSARLSKSRRLENLIAQLPGEKKNGLFGNLIALSLGLTPNFKSNFDLAEDAKLQLSKDTYDDDLDNLLAQIGDQYADLFLAAKNLSDAILLSDILRVNTEITKAPLSASMIKRYDEHHQDLTLLKALVRQQLPEKYKEIFFDQSKNGYAGYIDGGASQEEFYKFIKPILEKMDGTEELLVKLNREDLLRKQRTFDNGSIPHQIHLGELHAILRRQEDFYPFLKDNREKIEKILTFRIPYYVGPLARGNSRFAWMTRKSEETITPWNFEEVVDKGASAQSFIERMTNFDKNLPNEKVLPKHSLLYEYFTVYNELTKVKYVTEGMRKPAFLSGEQKKAIVDLLFKTNRKVTVKQLKEDYFKKIECFDSVEISGVEDRFNASLGTYHDLLKIIKDKDFLDNEENEDILEDIVLTLTLFEDREMIEERLKTYAHLFDDKVMKQLKRRRYTGWGRLSRKLINGIRDKQSGKTILDFLKSDGFANRNFMQLIHDDSLTFKEDIQKAQVSGQGDSLHEHIANLAGSPAIKKGILQTVKVVDELVKVMGRHKPENIVIEMARENQTTQKGQKNSRERMKRIEEGIKELGSQILKEHPVENTQLQNEKLYLYYLQNGRDMYVDQELDINRLSDYDVDHIVPQSFLKDDSIDNKVLTRSDKARGKSDNVPSEEVVKKMKNYWRQLLNAKLITQRKFDNLTKAERGGLSELDKAGFIKRQLVETRQITKHVAQILDSRMNTKYDENDKLIREVKVITLKSKLVSDFRKDFQFYKVREINNYHHAHDAYLNAVVGTALIKKYPKLESEFVYGDYKVYDVRKMIAKSEQEIGKATAKYFFYSNIMNFFKTEITLANGEIRKRPLIETNGETGEIVWDKGRDFATVRKVLSMPQVNIVKKTEVQTGGFSKESILPKRNSDKLIARKKDWDPKKYGGFDSPTVAYSVLVVAKVEKGKSKKLKSVKELLGITIMERSSFEKNPIDFLEAKGYKEVKKDLIIKLPKYSLFELENGRKRMLASAGELQKGNELALPSKYVNFLYLASHYEKLKGSPEDNEQKQLFVEQHKHYLDEIIEQISEFSKRVILADANLDKVLSAYNKHRDKPIREQAENIIHLFTLTNLGAPAAFKYFDTTIDRKRYTSTKEVLDATLIHQSITGLYETRIDLSQLGGDGGEAAAKGSSPAPGGVLNLEEEYRLHEKPVPSSIDPSWLQLFPTVWAERAGMGLANQVPPVVVELRSGASPVAVRQYPMSKEAREGIRPHIQRFLDLGVLVPCQSPWNTPLLPVKKPGTNDYRPVQDLREINKRVQDIHPTVPNPYNLLSSLPPSHTWYSVLDLKDAFFCLKLHPNSQPLFAFEWRDPEKGNTGQLTWTRLPQGFKNSPTLFNEALHRDLAPFRALNPQVVLLQYVDDLLVAAPTYRDCKEGTQKLLQELSKLGYRVSAKKAQLCQKEVTYLGYLLKEGKRWLTPARKATVMKIPPPTTPRQVREFLGKAGFCRLFIPGFASLAAPLYPLTKPSIPFIWTEEHQKAFDRIKEALLSAPALALPDLTKPFTLYVDERAGVARGVLTQTLGPWRRPVAYLSKKLDPVASGWPTCLKAVAAVALLLKDADKLTLGQNVTVIASHSLESIVRQPPDRWMTNARMTHYQSLLLNERVSFAPPAVLNPATLLPVESEATPVHRCSEILAEETGTRRDLKDQPLPGVPAWYTDGSSFIAEGKRRAGAAIVDGKRTVWASSLPEGTSAQKAELVALTQALRLAEGKDINIYTDSRYAFATAHIHGAIYKQRGWLTSAGKDIKNKEEILALLEAIHLPKRVAIIHCPGHQKGNDPVATGNRRADEAAKQAALSTRVLAETTKPAGKRTADGSEFEKRTADGSEFESPKKKAKVE

SEQ ID NO: 920 - protein, 2094 aa, synthetic construct
MPAAKRVKLDGGDKKYSIGLDIGTNSVGWAVITDEYKVPSKKFKVLGNTDRHSIKKNLIGALLFDSGETAEATRLKRTARRRYTRRKNRICYLQEIFSNEMAKVDDSFFHRLEESFLVEEDKKHERHPIFGNIVDEVAYHEKYPTIYHLRKKLVDSTDKADLRLIYLALAHMIKFRGHFLIEGDLNPDNSDVDKLFIQLVQTYNQLFEENPINASGVDAKAILSARLSKSRRLENLIAQLPGEKKNGLFGNLIALSLGLTPNFKSNFDLAEDAKLQLSKDTYDDDLDNLLAQIGDQYADLFLAAKNLSDAILLSDILRVNTEITKAPLSASMIKRYDEHHQDLTLLKALVRQQLPEKYKEIFFDQSKNGYAGYIDGGASQEEFYKFIKPILEKMDGTEELLVKLNREDLLRKQRTFDNGSIPHQIHLGELHAILRRQEDFYPFLKDNREKIEKILTFRIPYYVGPLARGNSRFAWMTRKSEETITPWNFEEVVDKGASAQSFIERMTNFDKNLPNEKVLPKHSLLYEYFTVYNELTKVKYVTEGMRKPAFLSGEQKKAIVDLLFKTNRKVTVKQLKEDYFKKIECFDSVEISGVEDRFNASLGTYHDLLKIIKDKDFLDNEENEDILEDIVLTLTLFEDREMIEERLKTYAHLFDDKVMKQLKRRRYTGWGRLSRKLINGIRDKQSGKTILDFLKSDGFANRNFMQLIHDDSLTFKEDIQKAQVSGQGDSLHEHIANLAGSPAIKKGILQTVKVVDELVKVMGRHKPENIVIEMARENQTTQKGQKNSRERMKRIEEGIKELGSQILKEHPVENTQLQNEKLYLYYLQNGRDMYVDQELDINRLSDYDVDHIVPQSFLKDDSIDNKVLTRSDKARGKSDNVPSEEVVKKMKNYWRQLLNAKLITQRKFDNLTKAERGGLSELDKAGFIKRQLVETRQITKHVAQILDSRMNTKYDENDKLIREVKVITLKSKLVSDFRKDFQFYKVREINNYHHAHDAYLNAVVGTALIKKYPKLESEFVYGDYKVYDVRKMIAKSEQEIGKATAKYFFYSNIMNFFKTEITLANGEIRKRPLIETNGETGEIVWDKGRDFATVRKVLSMPQVNIVKKTEVQTGGFSKESILPKRNSDKLIARKKDWDPKKYGGFDSPTVAYSVLVVAKVEKGKSKKLKSVKELLGITIMERSSFEKNPIDFLEAKGYKEVKKDLIIKLPKYSLFELENGRKRMLASAGELQKGNELALPSKYVNFLYLASHYEKLKGSPEDNEQKQLFVEQHKHYLDEIIEQISEFSKRVILADANLDKVLSAYNKHRDKPIREQAENIIHLFTLTNLGAPAAFKYFDTTIDRKRYTSTKEVLDATLIHQSITGLYETRIDLSQLGGDGGGSSGGGEAAAKGGVLNLEEEYRLHEKPVPSSIDPSWLQLFPTVWAERAGMGLANQVPPVVVELRSGASPVAVRQYPMSKEAREGIRPHIQRFLDLGVLVPCQSPWNTPLLPVKKPGTNDYRPVQDLREINKRVQDIHPTVPNPYNLLSSLPPSHTWYSVLDLKDAFFCLKLHPNSQPLFAFEWRDPEKGNTGQLTWTRLPQGFKNSPTLFNEALHRDLAPFRALNPQVVLLQYVDDLLVAAPTYRDCKEGTQKLLQELSKLGYRVSAKKAQLCQKEVTYLGYLLKEGKRWLTPARKATVMKIPPPTTPRQVREFLGKAGFCRLFIPGFASLAAPLYPLTKPSIPFIWTEEHQKAFDRIKEALLSAPALALPDLTKPFTLYVDERAGVARGVLTQTLGPWRRPVAYLSKKLDPVASGWPTCLKAVAAVALLLKDADKLTLGQNVTVIASHSLESIVRQPPDRWMTNARMTHYQSLLLNERVSFAPPAVLNPATLLPVESEATPVHRCSEILAEETGTRRDLKDQPLPGVPAWYTDGSSFIAEGKRRAGAAIVDGKRTVWASSLPEGTSAQKAELVALTQALRLAEGKDINIYTDSRYAFATAHIHGAIYKQRGWLTSAGKDIKNKEEILALLEAIHLPKRVAIIHCPGHQKGNDPVATGNRRADEAAKQAALSTRVLAETTKPAGKRTADGSEFEKRTADGSEFESPKKKAKVE

SEQ ID NO: 921 - protein, 2094 aa, synthetic construct
MPAAKRVKLDGGDKKYSIGLDIGTNSVGWAVITDEYKVPSKKFKVLGNTDRHSIKKNLIGALLFDSGETAEATRLKRTARRRYTRRKNRICYLQEIFSNEMAKVDDSFFHRLEESFLVEEDKKHERHPIFGNIVDEVAYHEKYPTIYHLRKKLVDSTDKADLRLIYLALAHMIKFRGHFLIEGDLNPDNSDVDKLFIQLVQTYNQLFEENPINASGVDAKAILSARLSKSRRLENLIAQLPGEKKNGLFGNLIALSLGLTPNFKSNFDLAEDAKLQLSKDTYDDDLDNLLAQIGDQYADLFLAAKNLSDAILLSDILRVNTEITKAPLSASMIKRYDEHHQDLTLLKALVRQQLPEKYKEIFFDQSKNGYAGYIDGGASQEEFYKFIKPILEKMDGTEELLVKLNREDLLRKQRTFDNGSIPHQIHLGELHAILRRQEDFYPFLKDNREKIEKILTFRIPYYVGPLARGNSRFAWMTRKSEETITPWNFEEVVDKGASAQSFIERMTNFDKNLPNEKVLPKHSLLYEYFTVYNELTKVKYVTEGMRKPAFLSGEQKKAIVDLLFKTNRKVTVKQLKEDYFKKIECFDSVEISGVEDRFNASLGTYHDLLKIIKDKDFLDNEENEDILEDIVLTLTLFEDREMIEERLKTYAHLFDDKVMKQLKRRRYTGWGRLSRKLINGIRDKQSGKTILDFLKSDGFANRNFMQLIHDDSLTFKEDIQKAQVSGQGDSLHEHIANLAGSPAIKKGILQTVKVVDELVKVMGRHKPENIVIEMARENQTTQKGQKNSRERMKRIEEGIKELGSQILKEHPVENTQLQNEKLYLYYLQNGRDMYVDQELDINRLSDYDVDHIVPQSFLKDDSIDNKVLTRSDKARGKSDNVPSEEVVKKMKNYWRQLLNAKLITQRKFDNLTKAERGGLSELDKAGFIKRQLVETRQITKHVAQILDSRMNTKYDENDKLIREVKVITLKSKLVSDFRKDFQFYKVREINNYHHAHDAYLNAVVGTALIKKYPKLESEFVYGDYKVYDVRKMIAKSEQEIGKATAKYFFYSNIMNFFKTEITLANGEIRKRPLIETNGETGEIVWDKGRDFATVRKVLSMPQVNIVKKTEVQTGGFSKESILPKRNSDKLIARKKDWDPKKYGGFDSPTVAYSVLVVAKVEKGKSKKLKSVKELLGITIMERSSFEKNPIDFLEAKGYKEVKKDLIIKLPKYSLFELENGRKRMLASAGELQKGNELALPSKYVNFLYLASHYEKLKGSPEDNEQKQLFVEQHKHYLDEIIEQISEFSKRVILADANLDKVLSAYNKHRDKPIREQAENIIHLFTLTNLGAPAAFKYFDTTIDRKRYTSTKEVLDATLIHQSITGLYETRIDLSQLGGDGGEAAAKPAPGGSGGVLNLEEEYRLHEKPVPSSIDPSWLQLFPTVWAERAGMGLANQVPPVVVELRSGASPVAVRQYPMSKEAREGIRPHIQRFLDLGVLVPCQSPWNTPLLPVKKPGTNDYRPVQDLREINKRVQDIHPTVPNPYNLLSSLPPSHTWYSVLDLKDAFFCLKLHPNSQPLFAFEWRDPEKGNTGQLTWTRLPQGFKNSPTLFNEALHRDLAPFRALNPQVVLLQYVDDLLVAAPTYRDCKEGTQKLLQELSKLGYRVSAKKAQLCQKEVTYLGYLLKEGKRWLTPARKATVMKIPPPTTPRQVREFLGKAGFCRLFIPGFASLAAPLYPLTKPSIPFIWTEEHQKAFDRIKEALLSAPALALPDLTKPFTLYVDERAGVARGVLTQTLGPWRRPVAYLSKKLDPVASGWPTCLKAVAAVALLLKDADKLTLGQNVTVIASHSLESIVRQPPDRWMTNARMTHYQSLLLNERVSFAPPAVLNPATLLPVESEATPVHRCSEILAEETGTRRDLKDQPLPGVPAWYTDGSSFIAEGKRRAGAAIVDGKRTVWASSLPEGTSAQKAELVALTQALRLAEGKDINIYTDSRYAFATAHIHGAIYKQRGWLTSAGKDIKNKEEILALLEAIHLPKRVAIIHCPGHQKGNDPVATGNRRADEAAKQAALSTRVLAETTKPAGKRTADGSEFEKRTADGSEFESPKKKAKVE

SEQ ID NO: 922 - protein, 2092 aa, synthetic construct
MPAAKRVKLDGGDKKYSIGLDIGTNSVGWAVITDEYKVPSKKFKVLGNTDRHSIKKNLIGALLFDSGETAEATRLKRTARRRYTRRKNRICYLQEIFSNEMAKVDDSFFHRLEESFLVEEDKKHERHPIFGNIVDEVAYHEKYPTIYHLRKKLVDSTDKADLRLIYLALAHMIKFRGHFLIEGDLNPDNSDVDKLFIQLVQTYNQLFEENPINASGVDAKAILSARLSKSRRLENLIAQLPGEKKNGLFGNLIALSLGLTPNFKSNFDLAEDAKLQLSKDTYDDDLDNLLAQIGDQYADLFLAAKNLSDAILLSDILRVNTEITKAPLSASMIKRYDEHHQDLTLLKALVRQQLPEKYKEIFFDQSKNGYAGYIDGGASQEEFYKFIKPILEKMDGTEELLVKLNREDLLRKQRTFDNGSIPHQIHLGELHAILRRQEDFYPFLKDNREKIEKILTFRIPYYVGPLARGNSRFAWMTRKSEETITPWNFEEVVDKGASAQSFIERMTNFDKNLPNEKVLPKHSLLYEYFTVYNELTKVKYVTEGMRKPAFLSGEQKKAIVDLLFKTNRKVTVKQLKEDYFKKIECFDSVEISGVEDRFNASLGTYHDLLKIIKDKDFLDNEENEDILEDIVLTLTLFEDREMIEERLKTYAHLFDDKVMKQLKRRRYTGWGRLSRKLINGIRDKQSGKTILDFLKSDGFANRNFMQLIHDDSLTFKEDIQKAQVSGQGDSLHEHIANLAGSPAIKKGILQTVKVVDELVKVMGRHKPENIVIEMARENQTTQKGQKNSRERMKRIEEGIKELGSQILKEHPVENTQLQNEKLYLYYLQNGRDMYVDQELDINRLSDYDVDHIVPQSFLKDDSIDNKVLTRSDKARGKSDNVPSEEVVKKMKNYWRQLLNAKLITQRKFDNLTKAERGGLSELDKAGFIKRQLVETRQITKHVAQILDSRMNTKYDENDKLIREVKVITLKSKLVSDFRKDFQFYKVREINNYHHAHDAYLNAVVGTALIKKYPKLESEFVYGDYKVYDVRKMIAKSEQEIGKATAKYFFYSNIMNFFKTEITLANGEIRKRPLIETNGETGEIVWDKGRDFATVRKVLSMPQVNIVKKTEVQTGGFSKESILPKRNSDKLIARKKDWDPKKYGGFDSPTVAYSVLVVAKVEKGKSKKLKSVKELLGITIMERSSFEKNPIDFLEAKGYKEVKKDLIIKLPKYSLFELENGRKRMLASAGELQKGNELALPSKYVNFLYLASHYEKLKGSPEDNEQKQLFVEQHKHYLDEIIEQISEFSKRVILADANLDKVLSAYNKHRDKPIREQAENIIHLFTLTNLGAPAAFKYFDTTIDRKRYTSTKEVLDATLIHQSITGLYETRIDLSQLGGDGGGSSPAPGGGGGVLNLEEEYRLHEKPVPSSIDPSWLQLFPTVWAERAGMGLANQVPPVVVELRSGASPVAVRQYPMSKEAREGIRPHIQRFLDLGVLVPCQSPWNTPLLPVKKPGTNDYRPVQDLREINKRVQDIHPTVPNPYNLLSSLPPSHTWYSVLDLKDAFFCLKLHPNSQPLFAFEWRDPEKGNTGQLTWTRLPQGFKNSPTLFNEALHRDLAPFRALNPQVVLLQYVDDLLVAAPTYRDCKEGTQKLLQELSKLGYRVSAKKAQLCQKEVTYLGYLLKEGKRWLTPARKATVMKIPPPTTPRQVREFLGKAGFCRLFIPGFASLAAPLYPLTKPSIPFIWTEEHQKAFDRIKEALLSAPALALPDLTKPFTLYVDERAGVARGVLTQTLGPWRRPVAYLSKKLDPVASGWPTCLKAVAAVALLLKDADKLTLGQNVTVIASHSLESIVRQPPDRWMTNARMTHYQSLLLNERVSFAPPAVLNPATLLPVESEATPVHRCSEILAEETGTRRDLKDQPLPGVPAWYTDGSSFIAEGKRRAGAAIVDGKRTVWASSLPEGTSAQKAELVALTQALRLAEGKDINIYTDSRYAFATAHIHGAIYKQRGWLTSAGKDIKNKEEILALLEAIHLPKRVAIIHCPGHQKGNDPVATGNRRADEAAKQAALSTRVLAETTKPAGKRTADGSEFEKRTADGSEFESPKKKAKVE

SEQ ID NO: 923 - protein, 2101 aa, synthetic construct
MPAAKRVKLDGGDKKYSIGLDIGTNSVGWAVITDEYKVPSKKFKVLGNTDRHSIKKNLIGALLFDSGETAEATRLKRTARRRYTRRKNRICYLQEIFSNEMAKVDDSFFHRLEESFLVEEDKKHERHPIFGNIVDEVAYHEKYPTIYHLRKKLVDSTDKADLRLIYLALAHMIKFRGHFLIEGDLNPDNSDVDKLFIQLVQTYNQLFEENPINASGVDAKAILSARLSKSRRLENLIAQLPGEKKNGLFGNLIALSLGLTPNFKSNFDLAEDAKLQLSKDTYDDDLDNLLAQIGDQYADLFLAAKNLSDAILLSDILRVNTEITKAPLSASMIKRYDEHHQDLTLLKALVRQQLPEKYKEIFFDQSKNGYAGYIDGGASQEEFYKFIKPILEKMDGTEELLVKLNREDLLRKQRTFDNGSIPHQIHLGELHAILRRQEDFYPFLKDNREKIEKILTFRIPYYVGPLARGNSRFAWMTRKSEETITPWNFEEVVDKGASAQSFIERMTNFDKNLPNEKVLPKHSLLYEYFTVYNELTKVKYVTEGMRKPAFLSGEQKKAIVDLLFKTNRKVTVKQLKEDYFKKIECFDSVEISGVEDRFNASLGTYHDLLKIIKDKDFLDNEENEDILEDIVLTLTLFEDREMIEERLKTYAHLFDDKVMKQLKRRRYTGWGRLSRKLINGIRDKQSGKTILDFLKSDGFANRNFMQLIHDDSLTFKEDIQKAQVSGQGDSLHEHIANLAGSPAIKKGILQTVKVVDELVKVMGRHKPENIVIEMARENQTTQKGQKNSRERMKRIEEGIKELGSQILKEHPVENTQLQNEKLYLYYLQNGRDMYVDQELDINRLSDYDVDHIVPQSFLKDDSIDNKVLTRSDKARGKSDNVPSEEVVKKMKNYWRQLLNAKLITQRKFDNLTKAERGGLSELDKAGFIKRQLVETRQITKHVAQILDSRMNTKYDENDKLIREVKVITLKSKLVSDFRKDFQFYKVREINNYHHAHDAYLNAVVGTALIKKYPKLESEFVYGDYKVYDVRKMIAKSEQEIGKATAKYFFYSNIMNFFKTEITLANGEIRKRPLIETNGETGEIVWDKGRDFATVRKVLSMPQVNIVKKTEVQTGGFSKESILPKRNSDKLIARKKDWDPKKYGGFDSPTVAYSVLVVAKVEKGKSKKLKSVKELLGITIMERSSFEKNPIDFLEAKGYKEVKKDLIIKLPKYSLFELENGRKRMLASAGELQKGNELALPSKYVNFLYLASHYEKLKGSPEDNEQKQLFVEQHKHYLDEIIEQISEFSKRVILADANLDKVLSAYNKHRDKPIREQAENIIHLFTLTNLGAPAAFKYFDTTIDRKRYTSTKEVLDATLIHQSITGLYETRIDLSQLGGDGGGSSGSSGSSGSSGSSGSSGGVLNLEEEYRLHEKPVPSSIDPSWLQLFPTVWAERAGMGLANQVPPVVVELRSGASPVAVRQYPMSKEAREGIRPHIQRFLDLGVLVPCQSPWNTPLLPVKKPGTNDYRPVQDLREINKRVQDIHPTVPNPYNLLSSLPPSHTWYSVLDLKDAFFCLKLHPNSQPLFAFEWRDPEKGNTGQLTWTRLPQGFKNSPTLFNEALHRDLAPFRALNPQVVLLQYVDDLLVAAPTYRDCKEGTQKLLQELSKLGYRVSAKKAQLCQKEVTYLGYLLKEGKRWLTPARKATVMKIPPPTTPRQVREFLGKAGFCRLFIPGFASLAAPLYPLTKPSIPFIWTEEHQKAFDRIKEALLSAPALALPDLTKPFTLYVDERAGVARGVLTQTLGPWRRPVAYLSKKLDPVASGWPTCLKAVAAVALLLKDADKLTLGQNVTVIASHSLESIVRQPPDRWMTNARMTHYQSLLLNERVSFAPPAVLNPATLLPVESEATPVHRCSEILAEETGTRRDLKDQPLPGVPAWYTDGSSFIAEGKRRAGAAIVDGKRTVWASSLPEGTSAQKAELVALTQALRLAEGKDINIYTDSRYAFATAHIHGAIYKQRGWLTSAGKDIKNKEEILALLEAIHLPKRVAIIHCPGHQKGNDPVATGNRRADEAAKQAALSTRVLAETTKPAGKRTADGSEFEKRTADGSEFESPKKKAKVE

SEQ ID NO: 924 - protein, 2092 aa, synthetic construct
MPAAKRVKLDGGDKKYSIGLDIGTNSVGWAVITDEYKVPSKKFKVLGNTDRHSIKKNLIGALLFDSGETAEATRLKRTARRRYTRRKNRICYLQEIFSNEMAKVDDSFFHRLEESFLVEEDKKHERHPIFGNIVDEVAYHEKYPTIYHLRKKLVDSTDKADLRLIYLALAHMIKFRGHFLIEGDLNPDNSDVDKLFIQLVQTYNQLFEENPINASGVDAKAILSARLSKSRRLENLIAQLPGEKKNGLFGNLIALSLGLTPNFKSNFDLAEDAKLQLSKDTYDDDLDNLLAQIGDQYADLFLAAKNLSDAILLSDILRVNTEITKAPLSASMIKRYDEHHQDLTLLKALVRQQLPEKYKEIFFDQSKNGYAGYIDGGASQEEFYKFIKPILEKMDGTEELLVKLNREDLLRKQRTFDNGSIPHQIHLGELHAILRRQEDFYPFLKDNREKIEKILTFRIPYYVGPLARGNSRFAWMTRKSEETITPWNFEEVVDKGASAQSFIERMTNFDKNLPNEKVLPKHSLLYEYFTVYNELTKVKYVTEGMRKPAFLSGEQKKAIVDLLFKTNRKVTVKQLKEDYFKKIECFDSVEISGVEDRFNASLGTYHDLLKIIKDKDFLDNEENEDILEDIVLTLTLFEDREMIEERLKTYAHLFDDKVMKQLKRRRYTGWGRLSRKLINGIRDKQSGKTILDFLKSDGFANRNFMQLIHDDSLTFKEDIQKAQVSGQGDSLHEHIANLAGSPAIKKGILQTVKVVDELVKVMGRHKPENIVIEMARENQTTQKGQKNSRERMKRIEEGIKELGSQILKEHPVENTQLQNEKLYLYYLQNGRDMYVDQELDINRLSDYDVDHIVPQSFLKDDSIDNKVLTRSDKARGKSDNVPSEEVVKKMKNYWRQLLNAKLITQRKFDNLTKAERGGLSELDKAGFIKRQLVETRQITKHVAQILDSRMNTKYDENDKLIREVKVITLKSKLVSDFRKDFQFYKVREINNYHHAHDAYLNAVVGTALIKKYPKLESEFVYGDYKVYDVRKMIAKSEQEIGKATAKYFFYSNIMNFFKTEITLANGEIRKRPLIETNGETGEIVWDKGRDFATVRKVLSMPQVNIVKKTEVQTGGFSKESILPKRNSDKLIARKKDWDPKKYGGFDSPTVAYSVLVVAKVEKGKSKKLKSVKELLGITIMERSSFEKNPIDFLEAKGYKEVKKDLIIKLPKYSLFELENGRKRMLASAGELQKGNELALPSKYVNFLYLASHYEKLKGSPEDNEQKQLFVEQHKHYLDEIIEQISEFSKRVILADANLDKVLSAYNKHRDKPIREQAENIIHLFTLTNLGAPAAFKYFDTTIDRKRYTSTKEVLDATLIHQSITGLYETRIDLSQLGGDGGGGSGSSPAPGGVLNLEEEYRLHEKPVPSSIDPSWLQLFPTVWAERAGMGLANQVPPVVVELRSGASPVAVRQYPMSKEAREGIRPHIQRFLDLGVLVPCQSPWNTPLLPVKKPGTNDYRPVQDLREINKRVQDIHPTVPNPYNLLSSLPPSHTWYSVLDLKDAFFCLKLHPNSQPLFAFEWRDPEKGNTGQLTWTRLPQGFKNSPTLFNEALHRDLAPFRALNPQVVLLQYVDDLLVAAPTYRDCKEGTQKLLQELSKLGYRVSAKKAQLCQKEVTYLGYLLKEGKRWLTPARKATVMKIPPPTTPRQVREFLGKAGFCRLFIPGFASLAAPLYPLTKPSIPFIWTEEHQKAFDRIKEALLSAPALALPDLTKPFTLYVDERAGVARGVLTQTLGPWRRPVAYLSKKLDPVASGWPTCLKAVAAVALLLKDADKLTLGQNVTVIASHSLESIVRQPPDRWMTNARMTHYQSLLLNERVSFAPPAVLNPATLLPVESEATPVHRCSEILAEETGTRRDLKDQPLPGVPAWYTDGSSFIAEGKRRAGAAIVDGKRTVWASSLPEGTSAQKAELVALTQALRLAEGKDINIYTDSRYAFATAHIHGAIYKQRGWLTSAGKDIKNKEEILALLEAIHLPKRVAIIHCPGHQKGNDPVATGNRRADEAAKQAALSTRVLAETTKPAGKRTADGSEFEKRTADGSEFESPKKKAKVE

SEQ ID NO: 925 - protein, 2094 aa, synthetic construct
MPAAKRVKLDGGDKKYSIGLDIGTNSVGWAVITDEYKVPSKKFKVLGNTDRHSIKKNLIGALLFDSGETAEATRLKRTARRRYTRRKNRICYLQEIFSNEMAKVDDSFFHRLEESFLVEEDKKHERHPIFGNIVDEVAYHEKYPTIYHLRKKLVDSTDKADLRLIYLALAHMIKFRGHFLIEGDLNPDNSDVDKLFIQLVQTYNQLFEENPINASGVDAKAILSARLSKSRRLENLIAQLPGEKKNGLFGNLIALSLGLTPNFKSNFDLAEDAKLQLSKDTYDDDLDNLLAQIGDQYADLFLAAKNLSDAILLSDILRVNTEITKAPLSASMIKRYDEHHQDLTLLKALVRQQLPEKYKEIFFDQSKNGYAGYIDGGASQEEFYKFIKPILEKMDGTEELLVKLNREDLLRKQRTFDNGSIPHQIHLGELHAILRRQEDFYPFLKDNREKIEKILTFRIPYYVGPLARGNSRFAWMTRKSEETITPWNFEEVVDKGASAQSFIERMTNFDKNLPNEKVLPKHSLLYEYFTVYNELTKVKYVTEGMRKPAFLSGEQKKAIVDLLFKTNRKVTVKQLKEDYFKKIECFDSVEISGVEDRFNASLGTYHDLLKIIKDKDFLDNEENEDILEDIVLTLTLFEDREMIEERLKTYAHLFDDKVMKQLKRRRYTGWGRLSRKLINGIRDKQSGKTILDFLKSDGFANRNFMQLIHDDSLTFKEDIQKAQVSGQGDSLHEHIANLAGSPAIKKGILQTVKVVDELVKVMGRHKPENIVIEMARENQTTQKGQKNSRERMKRIEEGIKELGSQILKEHPVENTQLQNEKLYLYYLQNGRDMYVDQELDINRLSDYDVDHIVPQSFLKDDSIDNKVLTRSDKARGKSDNVPSEEVVKKMKNYWRQLLNAKLITQRKFDNLTKAERGGLSELDKAGFIKRQLVETRQITKHVAQILDSRMNTKYDENDKLIREVKVITLKSKLVSDFRKDFQFYKVREINNYHHAHDAYLNAVVGTALIKKYPKLESEFVYGDYKVYDVRKMIAKSEQEIGKATAKYFFYSNIMNFFKTEITLANGEIRKRPLIETNGETGEIVWDKGRDFATVRKVLSMPQVNIVKKTEVQTGGFSKESILPKRNSDKLIARKKDWDPKKYGGFDSPTVAYSVLVVAKVEKGKSKKLKSVKELLGITIMERSSFEKNPIDFLEAKGYKEVKKDLIIKLPKYSLFELENGRKRMLASAGELQKGNELALPSKYVNFLYLASHYEKLKGSPEDNEQKQLFVEQHKHYLDEIIEQISEFSKRVILADANLDKVLSAYNKHRDKPIREQAENIIHLFTLTNLGAPAAFKYFDTTIDRKRYTSTKEVLDATLIHQSITGLYETRIDLSQLGGDGGGGGEAAAKGSSGGVLNLEEEYRLHEKPVPSSIDPSWLQLFPTVWAERAGMGLANQVPPVVVELRSGASPVAVRQYPMSKEAREGIRPHIQRFLDLGVLVPCQSPWNTPLLPVKKPGTNDYRPVQDLREINKRVQDIHPTVPNPYNLLSSLPPSHTWYSVLDLKDAFFCLKLHPNSQPLFAFEWRDPEKGNTGQLTWTRLPQGFKNSPTLFNEALHRDLAPFRALNPQVVLLQYVDDLLVAAPTYRDCKEGTQKLLQELSKLGYRVSAKKAQLCQKEVTYLGYLLKEGKRWLTPARKATVMKIPPPTTPRQVREFLGKAGFCRLFIPGFASLAAPLYPLTKPSIPFIWTEEHQKAFDRIKEALLSAPALALPDLTKPFTLYVDERAGVARGVLTQTLGPWRRPVAYLSKKLDPVASGWPTCLKAVAAVALLLKDADKLTLGQNVTVIASHSLESIVRQPPDRWMTNARMTHYQSLLLNERVSFAPPAVLNPATLLPVESEATPVHRCSEILAEETGTRRDLKDQPLPGVPAWYTDGSSFIAEGKRRAGAAIVDGKRTVWASSLPEGTSAQKAELVALTQALRLAEGKDINIYTDSRYAFATAHIHGAIYKQRGWLTSAGKDIKNKEEILALLEAIHLPKRVAIIHCPGHQKGNDPVATGNRRADEAAKQAALSTRVLAETTKPAGKRTADGSEFEKRTADGSEFESPKKKAKVE

SEQ ID NO: 926 - protein, 2087 aa, synthetic construct
MPAAKRVKLDGGDKKYSIGLDIGTNSVGWAVITDEYKVPSKKFKVLGNTDRHSIKKNLIGALLFDSGETAEATRLKRTARRRYTRRKNRICYLQEIFSNEMAKVDDSFFHRLEESFLVEEDKKHERHPIFGNIVDEVAYHEKYPTIYHLRKKLVDSTDKADLRLIYLALAHMIKFRGHFLIEGDLNPDNSDVDKLFIQLVQTYNQLFEENPINASGVDAKAILSARLSKSRRLENLIAQLPGEKKNGLFGNLIALSLGLTPNFKSNFDLAEDAKLQLSKDTYDDDLDNLLAQIGDQYADLFLAAKNLSDAILLSDILRVNTEITKAPLSASMIKRYDEHHQDLTLLKALVRQQLPEKYKEIFFDQSKNGYAGYIDGGASQEEFYKFIKPILEKMDGTEELLVKLNREDLLRKQRTFDNGSIPHQIHLGELHAILRRQEDFYPFLKDNREKIEKILTFRIPYYVGPLARGNSRFAWMTRKSEETITPWNFEEVVDKGASAQSFIERMTNFDKNLPNEKVLPKHSLLYEYFTVYNELTKVKYVTEGMRKPAFLSGEQKKAIVDLLFKTNRKVTVKQLKEDYFKKIECFDSVEISGVEDRFNASLGTYHDLLKIIKDKDFLDNEENEDILEDIVLTLTLFEDREMIEERLKTYAHLFDDKVMKQLKRRRYTGWGRLSRKLINGIRDKQSGKTILDFLKSDGFANRNFMQLIHDDSLTFKEDIQKAQVSGQGDSLHEHIANLAGSPAIKKGILQTVKVVDELVKVMGRHKPENIVIEMARENQTTQKGQKNSRERMKRIEEGIKELGSQILKEHPVENTQLQNEKLYLYYLQNGRDMYVDQELDINRLSDYDVDHIVPQSFLKDDSIDNKVLTRSDKARGKSDNVPSEEVVKKMKNYWRQLLNAKLITQRKFDNLTKAERGGLSELDKAGFIKRQLVETRQITKHVAQILDSRMNTKYDENDKLIREVKVITLKSKLVSDFRKDFQFYKVREINNYHHAHDAYLNAVVGTALIKKYPKLESEFVYGDYKVYDVRKMIAKSEQEIGKATAKYFFYSNIMNFFKTEITLANGEIRKRPLIETNGETGEIVWDKGRDFATVRKVLSMPQVNIVKKTEVQTGGFSKESILPKRNSDKLIARKKDWDPKKYGGFDSPTVAYSVLVVAKVEKGKSKKLKSVKELLGITIMERSSFEKNPIDFLEAKGYKEVKKDLIIKLPKYSLFELENGRKRMLASAGELQKGNELALPSKYVNFLYLASHYEKLKGSPEDNEQKQLFVEQHKHYLDEIIEQISEFSKRVILADANLDKVLSAYNKHRDKPIREQAENIIHLFTLTNLGAPAAFKYFDTTIDRKRYTSTKEVLDATLIHQSITGLYETRIDLSQLGGDGGGGGGGGVLNLEEEYRLHEKPVPSSIDPSWLQLFPTVWAERAGMGLANQVPPVVVELRSGASPVAVRQYPMSKEAREGIRPHIQRFLDLGVLVPCQSPWNTPLLPVKKPGTNDYRPVQDLREINKRVQDIHPTVPNPYNLLSSLPPSHTWYSVLDLKDAFFCLKLHPNSQPLFAFEWRDPEKGNTGQLTWTRLPQGFKNSPTLFNEALHRDLAPFRALNPQVVLLQYVDDLLVAAPTYRDCKEGTQKLLQELSKLGYRVSAKKAQLCQKEVTYLGYLLKEGKRWLTPARKATVMKIPPPTTPRQVREFLGKAGFCRLFIPGFASLAAPLYPLTKPSIPFIWTEEHQKAFDRIKEALLSAPALALPDLTKPFTLYVDERAGVARGVLTQTLGPWRRPVAYLSKKLDPVASGWPTCLKAVAAVALLLKDADKLTLGQNVTVIASHSLESIVRQPPDRWMTNARMTHYQSLLLNERVSFAPPAVLNPATLLPVESEATPVHRCSEILAEETGTRRDLKDQPLPGVPAWYTDGSSFIAEGKRRAGAAIVDGKRTVWASSLPEGTSAQKAELVALTQALRLAEGKDINIYTDSRYAFATAHIHGAIYKQRGWLTSAGKDIKNKEEILALLEAIHLPKRVAIIHCPGHQKGNDPVATGNRRADEAAKQAALSTRVLAETTKPAGKRTADGSEFEKRTADGSEFESPKKKAKVE

SEQ ID NO: 927 - protein, 2092 aa, synthetic construct
MPAAKRVKLDGGDKKYSIGLDIGTNSVGWAVITDEYKVPSKKFKVLGNTDRHSIKKNLIGALLFDSGETAEATRLKRTARRRYTRRKNRICYLQEIFSNEMAKVDDSFFHRLEESFLVEEDKKHERHPIFGNIVDEVAYHEKYPTIYHLRKKLVDSTDKADLRLIYLALAHMIKFRGHFLIEGDLNPDNSDVDKLFIQLVQTYNQLFEENPINASGVDAKAILSARLSKSRRLENLIAQLPGEKKNGLFGNLIALSLGLTPNFKSNFDLAEDAKLQLSKDTYDDDLDNLLAQIGDQYADLFLAAKNLSDAILLSDILRVNTEITKAPLSASMIKRYDEHHQDLTLLKALVRQQLPEKYKEIFFDQSKNGYAGYIDGGASQEEFYKFIKPILEKMDGTEELLVKLNREDLLRKQRTFDNGSIPHQIHLGELHAILRRQEDFYPFLKDNREKIEKILTFRIPYYVGPLARGNSRFAWMTRKSEETITPWNFEEVVDKGASAQSFIERMTNFDKNLPNEKVLPKHSLLYEYFTVYNELTKVKYVTEGMRKPAFLSGEQKKAIVDLLFKTNRKVTVKQLKEDYFKKIECFDSVEISGVEDRFNASLGTYHDLLKIIKDKDFLDNEENEDILEDIVLTLTLFEDREMIEERLKTYAHLFDDKVMKQLKRRRYTGWGRLSRKLINGIRDKQSGKTILDFLKSDGFANRNFMQLIHDDSLTFKEDIQKAQVSGQGDSLHEHIANLAGSPAIKKGILQTVKVVDELVKVMGRHKPENIVIEMARENQTTQKGQKNSRERMKRIEEGIKELGSQILKEHPVENTQLQNEKLYLYYLQNGRDMYVDQELDINRLSDYDVDHIVPQSFLKDDSIDNKVLTRSDKARGKSDNVPSEEVVKKMKNYWRQLLNAKLITQRKFDNLTKAERGGLSELDKAGFIKRQLVETRQITKHVAQILDSRMNTKYDENDKLIREVKVITLKSKLVSDFRKDFQFYKVREINNYHHAHDAYLNAVVGTALIKKYPKLESEFVYGDYKVYDVRKMIAKSEQEIGKATAKYFFYSNIMNFFKTEITLANGEIRKRPLIETNGETGEIVWDKGRDFATVRKVLSMPQVNIVKKTEVQTGGFSKESILPKRNSDKLIARKKDWDPKKYGGFDSPTVAYSVLVVAKVEKGKSKKLKSVKELLGITIMERSSFEKNPIDFLEAKGYKEVKKDLIIKLPKYSLFELENGRKRMLASAGELQKGNELALPSKYVNFLYLASHYEKLKGSPEDNEQKQLFVEQHKHYLDEIIEQISEFSKRVILADANLDKVLSAYNKHRDKPIREQAENIIHLFTLTNLGAPAAFKYFDTTIDRKRYTSTKEVLDATLIHQSITGLYETRIDLSQLGGDGGPAPGSSGGGGGVLNLEEEYRLHEKPVPSSIDPSWLQLFPTVWAERAGMGLANQVPPVVVELRSGASPVAVRQYPMSKEAREGIRPHIQRFLDLGVLVPCQSPWNTPLLPVKKPGTNDYRPVQDLREINKRVQDIHPTVPNPYNLLSSLPPSHTWYSVLDLKDAFFCLKLHPNSQPLFAFEWRDPEKGNTGQLTWTRLPQGFKNSPTLFNEALHRDLAPFRALNPQVVLLQYVDDLLVAAPTYRDCKEGTQKLLQELSKLGYRVSAKKAQLCQKEVTYLGYLLKEGKRWLTPARKATVMKIPPPTTPRQVREFLGKAGFCRLFIPGFASLAAPLYPLTKPSIPFIWTEEHQKAFDRIKEALLSAPALALPDLTKPFTLYVDERAGVARGVLTQTLGPWRRPVAYLSKKLDPVASGWPTCLKAVAAVALLLKDADKLTLGQNVTVIASHSLESIVRQPPDRWMTNARMTHYQSLLLNERVSFAPPAVLNPATLLPVESEATPVHRCSEILAEETGTRRDLKDQPLPGVPAWYTDGSSFIAEGKRRAGAAIVDGKRTVWASSLPEGTSAQKAELVALTQALRLAEGKDINIYTDSRYAFATAHIHGAIYKQRGWLTSAGKDIKNKEEILALLEAIHLPKRVAIIHCPGHQKGNDPVATGNRRADEAAKQAALSTRVLAETTKPAGKRTADGSEFEKRTADGSEFESPKKKAKVE

SEQ ID NO: 928 - protein, 2094 aa, synthetic construct
MPAAKRVKLDGGDKKYSIGLDIGTNSVGWAVITDEYKVPSKKFKVLGNTDRHSIKKNLIGALLFDSGETAEATRLKRTARRRYTRRKNRICYLQEIFSNEMAKVDDSFFHRLEESFLVEEDKKHERHPIFGNIVDEVAYHEKYPTIYHLRKKLVDSTDKADLRLIYLALAHMIKFRGHFLIEGDLNPDNSDVDKLFIQLVQTYNQLFEENPINASGVDAKAILSARLSKSRRLENLIAQLPGEKKNGLFGNLIALSLGLTPNFKSNFDLAEDAKLQLSKDTYDDDLDNLLAQIGDQYADLFLAAKNLSDAILLSDILRVNTEITKAPLSASMIKRYDEHHQDLTLLKALVRQQLPEKYKEIFFDQSKNGYAGYIDGGASQEEFYKFIKPILEKMDGTEELLVKLNREDLLRKQRTFDNGSIPHQIHLGELHAILRRQEDFYPFLKDNREKIEKILTFRIPYYVGPLARGNSRFAWMTRKSEETITPWNFEEVVDKGASAQSFIERMTNFDKNLPNEKVLPKHSLLYEYFTVYNELTKVKYVTEGMRKPAFLSGEQKKAIVDLLFKTNRKVTVKQLKEDYFKKIECFDSVEISGVEDRFNASLGTYHDLLKIIKDKDFLDNEENEDILEDIVLTLTLFEDREMIEERLKTYAHLFDDKVMKQLKRRRYTGWGRLSRKLINGIRDKQSGKTILDFLKSDGFANRNFMQLIHDDSLTFKEDIQKAQVSGQGDSLHEHIANLAGSPAIKKGILQTVKVVDELVKVMGRHKPENIVIEMARENQTTQKGQKNSRERMKRIEEGIKELGSQILKEHPVENTQLQNEKLYLYYLQNGRDMYVDQELDINRLSDYDVDHIVPQSFLKDDSIDNKVLTRSDKARGKSDNVPSEEVVKKMKNYWRQLLNAKLITQRKFDNLTKAERGGLSELDKAGFIKRQLVETRQITKHVAQILDSRMNTKYDENDKLIREVKVITLKSKLVSDFRKDFQFYKVREINNYHHAHDAYLNAVVGTALIKKYPKLESEFVYGDYKVYDVRKMIAKSEQEIGKATAKYFFYSNIMNFFKTEITLANGEIRKRPLIETNGETGEIVWDKGRDFATVRKVLSMPQVNIVKKTEVQTGGFSKESILPKRNSDKLIARKKDWDPKKYGGFDSPTVAYSVLVVAKVEKGKSKKLKSVKELLGITIMERSSFEKNPIDFLEAKGYKEVKKDLIIKLPKYSLFELENGRKRMLASAGELQKGNELALPSKYVNFLYLASHYEKLKGSPEDNEQKQLFVEQHKHYLDEIIEQISEFSKRVILADANLDKVLSAYNKHRDKPIREQAENIIHLFTLTNLGAPAAFKYFDTTIDRKRYTSTKEVLDATLIHQSITGLYETRIDLSQLGGDGGGGGEAAAKPAPGGVLNLEEEYRLHEKPVPSSIDPSWLQLFPTVWAERAGMGLANQVPPVVVELRSGASPVAVRQYPMSKEAREGIRPHIQRFLDLGVLVPCQSPWNTPLLPVKKPGTNDYRPVQDLREINKRVQDIHPTVPNPYNLLSSLPPSHTWYSVLDLKDAFFCLKLHPNSQPLFAFEWRDPEKGNTGQLTWTRLPQGFKNSPTLFNEALHRDLAPFRALNPQVVLLQYVDDLLVAAPTYRDCKEGTQKLLQELSKLGYRVSAKKAQLCQKEVTYLGYLLKEGKRWLTPARKATVMKIPPPTTPRQVREFLGKAGFCRLFIPGFASLAAPLYPLTKPSIPFIWTEEHQKAFDRIKEALLSAPALALPDLTKPFTLYVDERAGVARGVLTQTLGPWRRPVAYLSKKLDPVASGWPTCLKAVAAVALLLKDADKLTLGQNVTVIASHSLESIVRQPPDRWMTNARMTHYQSLLLNERVSFAPPAVLNPATLLPVESEATPVHRCSEILAEETGTRRDLKDQPLPGVPAWYTDGSSFIAEGKRRAGAAIVDGKRTVWASSLPEGTSAQKAELVALTQALRLAEGKDINIYTDSRYAFATAHIHGAIYKQRGWLTSAGKDIKNKEEILALLEAIHLPKRVAIIHCPGHQKGNDPVATGNRRADEAAKQAALSTRVLAETTKPAGKRTADGSEFEKRTADGSEFESPKKKAKVE

SEQ ID NO: 929 - protein, 2092 aa, synthetic construct
MPAAKRVKLDGGDKKYSIGLDIGTNSVGWAVITDEYKVPSKKFKVLGNTDRHSIKKNLIGALLFDSGETAEATRLKRTARRRYTRRKNRICYLQEIFSNEMAKVDDSFFHRLEESFLVEEDKKHERHPIFGNIVDEVAYHEKYPTIYHLRKKLVDSTDKADLRLIYLALAHMIKFRGHFLIEGDLNPDNSDVDKLFIQLVQTYNQLFEENPINASGVDAKAILSARLSKSRRLENLIAQLPGEKKNGLFGNLIALSLGLTPNFKSNFDLAEDAKLQLSKDTYDDDLDNLLAQIGDQYADLFLAAKNLSDAILLSDILRVNTEITKAPLSASMIKRYDEHHQDLTLLKALVRQQLPEKYKEIFFDQSKNGYAGYIDGGASQEEFYKFIKPILEKMDGTEELLVKLNREDLLRKQRTFDNGSIPHQIHLGELHAILRRQEDFYPFLKDNREKIEKILTFRIPYYVGPLARGNSRFAWMTRKSEETITPWNFEEVVDKGASAQSFIERMTNFDKNLPNEKVLPKHSLLYEYFTVYNELTKVKYVTEGMRKPAFLSGEQKKAIVDLLFKTNRKVTVKQLKEDYFKKIECFDSVEISGVEDRFNASLGTYHDLLKIIKDKDFLDNEENEDILEDIVLTLTLFEDREMIEERLKTYAHLFDDKVMKQLKRRRYTGWGRLSRKLINGIRDKQSGKTILDFLKSDGFANRNFMQLIHDDSLTFKEDIQKAQVSGQGDSLHEHIANLAGSPAIKKGILQTVKVVDELVKVMGRHKPENIVIEMARENQTTQKGQKNSRERMKRIEEGIKELGSQILKEHPVENTQLQNEKLYLYYLQNGRDMYVDQELDINRLSDYDVDHIVPQSFLKDDSIDNKVLTRSDKARGKSDNVPSEEVVKKMKNYWRQLLNAKLITQRKFDNLTKAERGGLSELDKAGFIKRQLVETRQITKHVAQILDSRMNTKYDENDKLIREVKVITLKSKLVSDFRKDFQFYKVREINNYHHAHDAYLNAVVGTALIKKYPKLESEFVYGDYKVYDVRKMIAKSEQEIGKATAKYFFYSNIMNFFKTEITLANGEIRKRPLIETNGETGEIVWDKGRDFATVRKVLSMPQVNIVKKTEVQTGGFSKESILPKRNSDKLIARKKDWDPKKYGGFDSPTVAYSVLVVAKVEKGKSKKLKSVKELLGITIMERSSFEKNPIDFLEAKGYKEVKKDLIIKLPKYSLFELENGRKRMLASAGELQKGNELALPSKYVNFLYLASHYEKLKGSPEDNEQKQLFVEQHKHYLDEIIEQISEFSKRVILADANLDKVLSAYNKHRDKPIREQAENIIHLFTLTNLGAPAAFKYFDTTIDRKRYTSTKEVLDATLIHQSITGLYETRIDLSQLGGDGGGSSGSSGSSGGVLNLEEEYRLHEKPVPSSIDPSWLQLFPTVWAERAGMGLANQVPPVVVELRSGASPVAVRQYPMSKEAREGIRPHIQRFLDLGVLVPCQSPWNTPLLPVKKPGTNDYRPVQDLREINKRVQDIHPTVPNPYNLLSSLPPSHTWYSVLDLKDAFFCLKLHPNSQPLFAFEWRDPEKGNTGQLTWTRLPQGFKNSPTLFNEALHRDLAPFRALNPQVVLLQYVDDLLVAAPTYRDCKEGTQKLLQELSKLGYRVSAKKAQLCQKEVTYLGYLLKEGKRWLTPARKATVMKIPPPTTPRQVREFLGKAGFCRLFIPGFASLAAPLYPLTKPSIPFIWTEEHQKAFDRIKEALLSAPALALPDLTKPFTLYVDERAGVARGVLTQTLGPWRRPVAYLSKKLDPVASGWPTCLKAVAAVALLLKDADKLTLGQNVTVIASHSLESIVRQPPDRWMTNARMTHYQSLLLNERVSFAPPAVLNPATLLPVESEATPVHRCSEILAEETGTRRDLKDQPLPGVPAWYTDGSSFIAEGKRRAGAAIVDGKRTVWASSLPEGTSAQKAELVALTQALRLAEGKDINIYTDSRYAFATAHIHGAIYKQRGWLTSAGKDIKNKEEILALLEAIHLPKRVAIIHCPGHQKGNDPVATGNRRADEAAKQAALSTRVLAETTKPAGKRTADGSEFEKRTADGSEFESPKKKAKVE

SEQ ID NO: 930 - protein, 2092 aa, synthetic construct
MPAAKRVKLDGGDKKYSIGLDIGTNSVGWAVITDEYKVPSKKFKVLGNTDRHSIKKNLIGALLFDSGETAEATRLKRTARRRYTRRKNRICYLQEIFSNEMAKVDDSFFHRLEESFLVEEDKKHERHPIFGNIVDEVAYHEKYPTIYHLRKKLVDSTDKADLRLIYLALAHMIKFRGHFLIEGDLNPDNSDVDKLFIQLVQTYNQLFEENPINASGVDAKAILSARLSKSRRLENLIAQLPGEKKNGLFGNLIALSLGLTPNFKSNFDLAEDAKLQLSKDTYDDDLDNLLAQIGDQYADLFLAAKNLSDAILLSDILRVNTEITKAPLSASMIKRYDEHHQDLTLLKALVRQQLPEKYKEIFFDQSKNGYAGYIDGGASQEEFYKFIKPILEKMDGTEELLVKLNREDLLRKQRTFDNGSIPHQIHLGELHAILRRQEDFYPFLKDNREKIEKILTFRIPYYVGPLARGNSRFAWMTRKSEETITPWNFEEVVDKGASAQSFIERMTNFDKNLPNEKVLPKHSLLYEYFTVYNELTKVKYVTEGMRKPAFLSGEQKKAIVDLLFKTNRKVTVKQLKEDYFKKIECFDSVEISGVEDRFNASLGTYHDLLKIIKDKDFLDNEENEDILEDIVLTLTLFEDREMIEERLKTYAHLFDDKVMKQLKRRRYTGWGRLSRKLINGIRDKQSGKTILDFLKSDGFANRNFMQLIHDDSLTFKEDIQKAQVSGQGDSLHEHIANLAGSPAIKKGILQTVKVVDELVKVMGRHKPENIVIEMARENQTTQKGQKNSRERMKRIEEGIKELGSQILKEHPVENTQLQNEKLYLYYLQNGRDMYVDQELDINRLSDYDVDHIVPQSFLKDDSIDNKVLTRSDKARGKSDNVPSEEVVKKMKNYWRQLLNAKLITQRKFDNLTKAERGGLSELDKAGFIKRQLVETRQITKHVAQILDSRMNTKYDENDKLIREVKVITLKSKLVSDFRKDFQFYKVREINNYHHAHDAYLNAVVGTALIKKYPKLESEFVYGDYKVYDVRKMIAKSEQEIGKATAKYFFYSNIMNFFKTEITLANGEIRKRPLIETNGETGEIVWDKGRDFATVRKVLSMPQVNIVKKTEVQTGGFSKESILPKRNSDKLIARKKDWDPKKYGGFDSPTVAYSVLVVAKVEKGKSKKLKSVKELLGITIMERSSFEKNPIDFLEAKGYKEVKKDLIIKLPKYSLFELENGRKRMLASAGELQKGNELALPSKYVNFLYLASHYEKLKGSPEDNEQKQLFVEQHKHYLDEIIEQISEFSKRVILADANLDKVLSAYNKHRDKPIREQAENIIHLFTLTNLGAPAAFKYFDTTIDRKRYTSTKEVLDATLIHQSITGLYETRIDLSQLGGDGGGGSPAPGGGGGVLNLEEEYRLHEKPVPSSIDPSWLQLFPTVWAERAGMGLANQVPPVVVELRSGASPVAVRQYPMSKEAREGIRPHIQRFLDLGVLVPCQSPWNTPLLPVKKPGTNDYRPVQDLREINKRVQDIHPTVPNPYNLLSSLPPSHTWYSVLDLKDAFFCLKLHPNSQPLFAFEWRDPEKGNTGQLTWTRLPQGFKNSPTLFNEALHRDLAPFRALNPQVVLLQYVDDLLVAAPTYRDCKEGTQKLLQELSKLGYRVSAKKAQLCQKEVTYLGYLLKEGKRWLTPARKATVMKIPPPTTPRQVREFLGKAGFCRLFIPGFASLAAPLYPLTKPSIPFIWTEEHQKAFDRIKEALLSAPALALPDLTKPFTLYVDERAGVARGVLTQTLGPWRRPVAYLSKKLDPVASGWPTCLKAVAAVALLLKDADKLTLGQNVTVIASHSLESIVRQPPDRWMTNARMTHYQSLLLNERVSFAPPAVLNPATLLPVESEATPVHRCSEILAEETGTRRDLKDQPLPGVPAWYTDGSSFIAEGKRRAGAAIVDGKRTVWASSLPEGTSAQKAELVALTQALRLAEGKDINIYTDSRYAFATAHIHGAIYKQRGWLTSAGKDIKNKEEILALLEAIHLPKRVAIIHCPGHQKGNDPVATGNRRADEAAKQAALSTRVLAETTKPAGKRTADGSEFEKRTADGSEFESPKKKAKVE

SEQ ID NO: 931 - protein, 2091 aa, synthetic construct
MPAAKRVKLDGGDKKYSIGLDIGTNSVGWAVITDEYKVPSKKFKVLGNTDRHSIKKNLIGALLFDSGETAEATRLKRTARRRYTRRKNRICYLQEIFSNEMAKVDDSFFHRLEESFLVEEDKKHERHPIFGNIVDEVAYHEKYPTIYHLRKKLVDSTDKADLRLIYLALAHMIKFRGHFLIEGDLNPDNSDVDKLFIQLVQTYNQLFEENPINASGVDAKAILSARLSKSRRLENLIAQLPGEKKNGLFGNLIALSLGLTPNFKSNFDLAEDAKLQLSKDTYDDDLDNLLAQIGDQYADLFLAAKNLSDAILLSDILRVNTEITKAPLSASMIKRYDEHHQDLTLLKALVRQQLPEKYKEIFFDQSKNGYAGYIDGGASQEEFYKFIKPILEKMDGTEELLVKLNREDLLRKQRTFDNGSIPHQIHLGELHAILRRQEDFYPFLKDNREKIEKILTFRIPYYVGPLARGNSRFAWMTRKSEETITPWNFEEVVDKGASAQSFIERMTNFDKNLPNEKVLPKHSLLYEYFTVYNELTKVKYVTEGMRKPAFLSGEQKKAIVDLLFKTNRKVTVKQLKEDYFKKIECFDSVEISGVEDRFNASLGTYHDLLKIIKDKDFLDNEENEDILEDIVLTLTLFEDREMIEERLKTYAHLFDDKVMKQLKRRRYTGWGRLSRKLINGIRDKQSGKTILDFLKSDGFANRNFMQLIHDDSLTFKEDIQKAQVSGQGDSLHEHIANLAGSPAIKKGILQTVKVVDELVKVMGRHKPENIVIEMARENQTTQKGQKNSRERMKRIEEGIKELGSQILKEHPVENTQLQNEKLYLYYLQNGRDMYVDQELDINRLSDYDVDHIVPQSFLKDDSIDNKVLTRSDKARGKSDNVPSEEVVKKMKNYWRQLLNAKLITQRKFDNLTKAERGGLSELDKAGFIKRQLVETRQITKHVAQILDSRMNTKYDENDKLIREVKVITLKSKLVSDFRKDFQFYKVREINNYHHAHDAYLNAVVGTALIKKYPKLESEFVYGDYKVYDVRKMIAKSEQEIGKATAKYFFYSNIMNFFKTEITLANGEIRKRPLIETNGETGEIVWDKGRDFATVRKVLSMPQVNIVKKTEVQTGGFSKESILPKRNSDKLIARKKDWDPKKYGGFDSPTVAYSVLVVAKVEKGKSKKLKSVKELLGITIMERSSFEKNPIDFLEAKGYKEVKKDLIIKLPKYSLFELENGRKRMLASAGELQKGNELALPSKYVNFLYLASHYEKLKGSPEDNEQKQLFVEQHKHYLDEIIEQISEFSKRVILADANLDKVLSAYNKHRDKPIREQAENIIHLFTLTNLGAPAAFKYFDTTIDRKRYTSTKEVLDATLIHQSITGLYETRIDLSQLGGDGGEAAAKGGGGGVLNLEEEYRLHEKPVPSSIDPSWLQLFPTVWAERAGMGLANQVPPVVVELRSGASPVAVRQYPMSKEAREGIRPHIQRFLDLGVLVPCQSPWNTPLLPVKKPGTNDYRPVQDLREINKRVQDIHPTVPNPYNLLSSLPPSHTWYSVLDLKDAFFCLKLHPNSQPLFAFEWRDPEKGNTGQLTWTRLPQGFKNSPTLFNEALHRDLAPFRALNPQVVLLQYVDDLLVAAPTYRDCKEGTQKLLQELSKLGYRVSAKKAQLCQKEVTYLGYLLKEGKRWLTPARKATVMKIPPPTTPRQVREFLGKAGFCRLFIPGFASLAAPLYPLTKPSIPFIWTEEHQKAFDRIKEALLSAPALALPDLTKPFTLYVDERAGVARGVLTQTLGPWRRPVAYLSKKLDPVASGWPTCLKAVAAVALLLKDADKLTLGQNVTVIASHSLESIVRQPPDRWMTNARMTHYQSLLLNERVSFAPPAVLNPATLLPVESEATPVHRCSEILAEETGTRRDLKDQPLPGVPAWYTDGSSFIAEGKRRAGAAIVDGKRTVWASSLPEGTSAQKAELVALTQALRLAEGKDINIYTDSRYAFATAHIHGAIYKQRGWLTSAGKDIKNKEEILALLEAIHLPKRVAIIHCPGHQKGNDPVATGNRRADEAAKQAALSTRVLAETTKPAGKRTADGSEFEKRTADGSEFESPKKKAKVE

SEQ ID NO: 932 - protein, 2089 aa, synthetic construct
MPAAKRVKLDGGDKKYSIGLDIGTNSVGWAVITDEYKVPSKKFKVLGNTDRHSIKKNLIGALLFDSGETAEATRLKRTARRRYTRRKNRICYLQEIFSNEMAKVDDSFFHRLEESFLVEEDKKHERHPIFGNIVDEVAYHEKYPTIYHLRKKLVDSTDKADLRLIYLALAHMIKFRGHFLIEGDLNPDNSDVDKLFIQLVQTYNQLFEENPINASGVDAKAILSARLSKSRRLENLIAQLPGEKKNGLFGNLIALSLGLTPNFKSNFDLAEDAKLQLSKDTYDDDLDNLLAQIGDQYADLFLAAKNLSDAILLSDILRVNTEITKAPLSASMIKRYDEHHQDLTLLKALVRQQLPEKYKEIFFDQSKNGYAGYIDGGASQEEFYKFIKPILEKMDGTEELLVKLNREDLLRKQRTFDNGSIPHQIHLGELHAILRRQEDFYPFLKDNREKIEKILTFRIPYYVGPLARGNSRFAWMTRKSEETITPWNFEEVVDKGASAQSFIERMTNFDKNLPNEKVLPKHSLLYEYFTVYNELTKVKYVTEGMRKPAFLSGEQKKAIVDLLFKTNRKVTVKQLKEDYFKKIECFDSVEISGVEDRFNASLGTYHDLLKIIKDKDFLDNEENEDILEDIVLTLTLFEDREMIEERLKTYAHLFDDKVMKQLKRRRYTGWGRLSRKLINGIRDKQSGKTILDFLKSDGFANRNFMQLIHDDSLTFKEDIQKAQVSGQGDSLHEHIANLAGSPAIKKGILQTVKVVDELVKVMGRHKPENIVIEMARENQTTQKGQKNSRERMKRIEEGIKELGSQILKEHPVENTQLQNEKLYLYYLQNGRDMYVDQELDINRLSDYDVDHIVPQSFLKDDSIDNKVLTRSDKARGKSDNVPSEEVVKKMKNYWRQLLNAKLITQRKFDNLTKAERGGLSELDKAGFIKRQLVETRQITKHVAQILDSRMNTKYDENDKLIREVKVITLKSKLVSDFRKDFQFYKVREINNYHHAHDAYLNAVVGTALIKKYPKLESEFVYGDYKVYDVRKMIAKSEQEIGKATAKYFFYSNIMNFFKTEITLANGEIRKRPLIETNGETGEIVWDKGRDFATVRKVLSMPQVNIVKKTEVQTGGFSKESILPKRNSDKLIARKKDWDPKKYGGFDSPTVAYSVLVVAKVEKGKSKKLKSVKELLGITIMERSSFEKNPIDFLEAKGYKEVKKDLIIKLPKYSLFELENGRKRMLASAGELQKGNELALPSKYVNFLYLASHYEKLKGSPEDNEQKQLFVEQHKHYLDEIIEQISEFSKRVILADANLDKVLSAYNKHRDKPIREQAENIIHLFTLTNLGAPAAFKYFDTTIDRKRYTSTKEVLDATLIHQSITGLYETRIDLSQLGGDGGGSSGSSGGVLNLEEEYRLHEKPVPSSIDPSWLQLFPTVWAERAGMGLANQVPPVVVELRSGASPVAVRQYPMSKEAREGIRPHIQRFLDLGVLVPCQSPWNTPLLPVKKPGTNDYRPVQDLREINKRVQDIHPTVPNPYNLLSSLPPSHTWYSVLDLKDAFFCLKLHPNSQPLFAFEWRDPEKGNTGQLTWTRLPQGFKNSPTLFNEALHRDLAPFRALNPQVVLLQYVDDLLVAAPTYRDCKEGTQKLLQELSKLGYRVSAKKAQLCQKEVTYLGYLLKEGKRWLTPARKATVMKIPPPTTPRQVREFLGKAGFCRLFIPGFASLAAPLYPLTKPSIPFIWTEEHQKAFDRIKEALLSAPALALPDLTKPFTLYVDERAGVARGVLTQTLGPWRRPVAYLSKKLDPVASGWPTCLKAVAAVALLLKDADKLTLGQNVTVIASHSLESIVRQPPDRWMTNARMTHYQSLLLNERVSFAPPAVLNPATLLPVESEATPVHRCSEILAEETGTRRDLKDQPLPGVPAWYTDGSSFIAEGKRRAGAAIVDGKRTVWASSLPEGTSAQKAELVALTQALRLAEGKDINIYTDSRYAFATAHIHGAIYKQRGWLTSAGKDIKNKEEILALLEAIHLPKRVAIIHCPGHQKGNDPVATGNRRADEAAKQAALSTRVLAETTKPAGKRTADGSEFEKRTADGSEFESPKKKAKVE

SEQ ID NO: 933 - protein, 2098 aa, synthetic construct
MPAAKRVKLDGGDKKYSIGLDIGTNSVGWAVITDEYKVPSKKFKVLGNTDRHSIKKNLIGALLFDSGETAEATRLKRTARRRYTRRKNRICYLQEIFSNEMAKVDDSFFHRLEESFLVEEDKKHERHPIFGNIVDEVAYHEKYPTIYHLRKKLVDSTDKADLRLIYLALAHMIKFRGHFLIEGDLNPDNSDVDKLFIQLVQTYNQLFEENPINASGVDAKAILSARLSKSRRLENLIAQLPGEKKNGLFGNLIALSLGLTPNFKSNFDLAEDAKLQLSKDTYDDDLDNLLAQIGDQYADLFLAAKNLSDAILLSDILRVNTEITKAPLSASMIKRYDEHHQDLTLLKALVRQQLPEKYKEIFFDQSKNGYAGYIDGGASQEEFYKFIKPILEKMDGTEELLVKLNREDLLRKQRTFDNGSIPHQIHLGELHAILRRQEDFYPFLKDNREKIEKILTFRIPYYVGPLARGNSRFAWMTRKSEETITPWNFEEVVDKGASAQSFIERMTNFDKNLPNEKVLPKHSLLYEYFTVYNELTKVKYVTEGMRKPAFLSGEQKKAIVDLLFKTNRKVTVKQLKEDYFKKIECFDSVEISGVEDRFNASLGTYHDLLKIIKDKDFLDNEENEDILEDIVLTLTLFEDREMIEERLKTYAHLFDDKVMKQLKRRRYTGWGRLSRKLINGIRDKQSGKTILDFLKSDGFANRNFMQLIHDDSLTFKEDIQKAQVSGQGDSLHEHIANLAGSPAIKKGILQTVKVVDELVKVMGRHKPENIVIEMARENQTTQKGQKNSRERMKRIEEGIKELGSQILKEHPVENTQLQNEKLYLYYLQNGRDMYVDQELDINRLSDYDVDHIVPQSFLKDDSIDNKVLTRSDKARGKSDNVPSEEVVKKMKNYWRQLLNAKLITQRKFDNLTKAERGGLSELDKAGFIKRQLVETRQITKHVAQILDSRMNTKYDENDKLIREVKVITLKSKLVSDFRKDFQFYKVREINNYHHAHDAYLNAVVGTALIKKYPKLESEFVYGDYKVYDVRKMIAKSEQEIGKATAKYFFYSNIMNFFKTEITLANGEIRKRPLIETNGETGEIVWDKGRDFATVRKVLSMPQVNIVKKTEVQTGGFSKESILPKRNSDKLIARKKDWDPKKYGGFDSPTVAYSVLVVAKVEKGKSKKLKSVKELLGITIMERSSFEKNPIDFLEAKGYKEVKKDLIIKLPKYSLFELENGRKRMLASAGELQKGNELALPSKYVNFLYLASHYEKLKGSPEDNEQKQLFVEQHKHYLDEIIEQISEFSKRVILADANLDKVLSAYNKHRDKPIREQAENIIHLFTLTNLGAPAAFKYFDTTIDRKRYTSTKEVLDATLIHQSITGLYETRIDLSQLGGDGGEAAAKEAAAKEAAAKGGVLNLEEEYRLHEKPVPSSIDPSWLQLFPTVWAERAGMGLANQVPPVVVELRSGASPVAVRQYPMSKEAREGIRPHIQRFLDLGVLVPCQSPWNTPLLPVKKPGTNDYRPVQDLREINKRVQDIHPTVPNPYNLLSSLPPSHTWYSVLDLKDAFFCLKLHPNSQPLFAFEWRDPEKGNTGQLTWTRLPQGFKNSPTLFNEALHRDLAPFRALNPQVVLLQYVDDLLVAAPTYRDCKEGTQKLLQELSKLGYRVSAKKAQLCQKEVTYLGYLLKEGKRWLTPARKATVMKIPPPTTPRQVREFLGKAGFCRLFIPGFASLAAPLYPLTKPSIPFIWTEEHQKAFDRIKEALLSAPALALPDLTKPFTLYVDERAGVARGVLTQTLGPWRRPVAYLSKKLDPVASGWPTCLKAVAAVALLLKDADKLTLGQNVTVIASHSLESIVRQPPDRWMTNARMTHYQSLLLNERVSFAPPAVLNPATLLPVESEATPVHRCSEILAEETGTRRDLKDQPLPGVPAWYTDGSSFIAEGKRRAGAAIVDGKRTVWASSLPEGTSAQKAELVALTQALRLAEGKDINIYTDSRYAFATAHIHGAIYKQRGWLTSAGKDIKNKEEILALLEAIHLPKRVAIIHCPGHQKGNDPVATGNRRADEAAKQAALSTRVLAETTKPAGKRTADGSEFEKRTADGSEFESPKKKAKVE

SEQ ID NO: 934 - protein, 2091 aa, synthetic construct
MPAAKRVKLDGGDKKYSIGLDIGTNSVGWAVITDEYKVPSKKFKVLGNTDRHSIKKNLIGALLFDSGETAEATRLKRTARRRYTRRKNRICYLQEIFSNEMAKVDDSFFHRLEESFLVEEDKKHERHPIFGNIVDEVAYHEKYPTIYHLRKKLVDSTDKADLRLIYLALAHMIKFRGHFLIEGDLNPDNSDVDKLFIQLVQTYNQLFEENPINASGVDAKAILSARLSKSRRLENLIAQLPGEKKNGLFGNLIALSLGLTPNFKSNFDLAEDAKLQLSKDTYDDDLDNLLAQIGDQYADLFLAAKNLSDAILLSDILRVNTEITKAPLSASMIKRYDEHHQDLTLLKALVRQQLPEKYKEIFFDQSKNGYAGYIDGGASQEEFYKFIKPILEKMDGTEELLVKLNREDLLRKQRTFDNGSIPHQIHLGELHAILRRQEDFYPFLKDNREKIEKILTFRIPYYVGPLARGNSRFAWMTRKSEETITPWNFEEVVDKGASAQSFIERMTNFDKNLPNEKVLPKHSLLYEYFTVYNELTKVKYVTEGMRKPAFLSGEQKKAIVDLLFKTNRKVTVKQLKEDYFKKIECFDSVEISGVEDRFNASLGTYHDLLKIIKDKDFLDNEENEDILEDIVLTLTLFEDREMIEERLKTYAHLFDDKVMKQLKRRRYTGWGRLSRKLINGIRDKQSGKTILDFLKSDGFANRNFMQLIHDDSLTFKEDIQKAQVSGQGDSLHEHIANLAGSPAIKKGILQTVKVVDELVKVMGRHKPENIVIEMARENQTTQKGQKNSRERMKRIEEGIKELGSQILKEHPVENTQLQNEKLYLYYLQNGRDMYVDQELDINRLSDYDVDHIVPQSFLKDDSIDNKVLTRSDKARGKSDNVPSEEVVKKMKNYWRQLLNAKLITQRKFDNLTKAERGGLSELDKAGFIKRQLVETRQITKHVAQILDSRMNTKYDENDKLIREVKVITLKSKLVSDFRKDFQFYKVREINNYHHAHDAYLNAVVGTALIKKYPKLESEFVYGDYKVYDVRKMIAKSEQEIGKATAKYFFYSNIMNFFKTEITLANGEIRKRPLIETNGETGEIVWDKGRDFATVRKVLSMPQVNIVKKTEVQTGGFSKESILPKRNSDKLIARKKDWDPKKYGGFDSPTVAYSVLVVAKVEKGKSKKLKSVKELLGITIMERSSFEKNPIDFLEAKGYKEVKKDLIIKLPKYSLFELENGRKRMLASAGELQKGNELALPSKYVNFLYLASHYEKLKGSPEDNEQKQLFVEQHKHYLDEIIEQISEFSKRVILADANLDKVLSAYNKHRDKPIREQAENIIHLFTLTNLGAPAAFKYFDTTIDRKRYTSTKEVLDATLIHQSITGLYETRIDLSQLGGDGGGGGEAAAKGGVLNLEEEYRLHEKPVPSSIDPSWLQLFPTVWAERAGMGLANQVPPVVVELRSGASPVAVRQYPMSKEAREGIRPHIQRFLDLGVLVPCQSPWNTPLLPVKKPGTNDYRPVQDLREINKRVQDIHPTVPNPYNLLSSLPPSHTWYSVLDLKDAFFCLKLHPNSQPLFAFEWRDPEKGNTGQLTWTRLPQGFKNSPTLFNEALHRDLAPFRALNPQVVLLQYVDDLLVAAPTYRDCKEGTQKLLQELSKLGYRVSAKKAQLCQKEVTYLGYLLKEGKRWLTPARKATVMKIPPPTTPRQVREFLGKAGFCRLFIPGFASLAAPLYPLTKPSIPFIWTEEHQKAFDRIKEALLSAPALALPDLTKPFTLYVDERAGVARGVLTQTLGPWRRPVAYLSKKLDPVASGWPTCLKAVAAVALLLKDADKLTLGQNVTVIASHSLESIVRQPPDRWMTNARMTHYQSLLLNERVSFAPPAVLNPATLLPVESEATPVHRCSEILAEETGTRRDLKDQPLPGVPAWYTDGSSFIAEGKRRAGAAIVDGKRTVWASSLPEGTSAQKAELVALTQALRLAEGKDINIYTDSRYAFATAHIHGAIYKQRGWLTSAGKDIKNKEEILALLEAIHLPKRVAIIHCPGHQKGNDPVATGNRRADEAAKQAALSTRVLAETTKPAGKRTADGSEFEKRTADGSEFESPKKKAKVE

SEQ ID NO: 935 - protein, 2103 aa, synthetic construct
MPAAKRVKLDGGDKKYSIGLDIGTNSVGWAVITDEYKVPSKKFKVLGNTDRHSIKKNLIGALLFDSGETAEATRLKRTARRRYTRRKNRICYLQEIFSNEMAKVDDSFFHRLEESFLVEEDKKHERHPIFGNIVDEVAYHEKYPTIYHLRKKLVDSTDKADLRLIYLALAHMIKFRGHFLIEGDLNPDNSDVDKLFIQLVQTYNQLFEENPINASGVDAKAILSARLSKSRRLENLIAQLPGEKKNGLFGNLIALSLGLTPNFKSNFDLAEDAKLQLSKDTYDDDLDNLLAQIGDQYADLFLAAKNLSDAILLSDILRVNTEITKAPLSASMIKRYDEHHQDLTLLKALVRQQLPEKYKEIFFDQSKNGYAGYIDGGASQEEFYKFIKPILEKMDGTEELLVKLNREDLLRKQRTFDNGSIPHQIHLGELHAILRRQEDFYPFLKDNREKIEKILTFRIPYYVGPLARGNSRFAWMTRKSEETITPWNFEEVVDKGASAQSFIERMTNFDKNLPNEKVLPKHSLLYEYFTVYNELTKVKYVTEGMRKPAFLSGEQKKAIVDLLFKTNRKVTVKQLKEDYFKKIECFDSVEISGVEDRFNASLGTYHDLLKIIKDKDFLDNEENEDILEDIVLTLTLFEDREMIEERLKTYAHLFDDKVMKQLKRRRYTGWGRLSRKLINGIRDKQSGKTILDFLKSDGFANRNFMQLIHDDSLTFKEDIQKAQVSGQGDSLHEHIANLAGSPAIKKGILQTVKVVDELVKVMGRHKPENIVIEMARENQTTQKGQKNSRERMKRIEEGIKELGSQILKEHPVENTQLQNEKLYLYYLQNGRDMYVDQELDINRLSDYDVDHIVPQSFLKDDSIDNKVLTRSDKARGKSDNVPSEEVVKKMKNYWRQLLNAKLITQRKFDNLTKAERGGLSELDKAGFIKRQLVETRQITKHVAQILDSRMNTKYDENDKLIREVKVITLKSKLVSDFRKDFQFYKVREINNYHHAHDAYLNAVVGTALIKKYPKLESEFVYGDYKVYDVRKMIAKSEQEIGKATAKYFFYSNIMNFFKTEITLANGEIRKRPLIETNGETGEIVWDKGRDFATVRKVLSMPQVNIVKKTEVQTGGFSKESILPKRNSDKLIARKKDWDPKKYGGFDSPTVAYSVLVVAKVEKGKSKKLKSVKELLGITIMERSSFEKNPIDFLEAKGYKEVKKDLIIKLPKYSLFELENGRKRMLASAGELQKGNELALPSKYVNFLYLASHYEKLKGSPEDNEQKQLFVEQHKHYLDEIIEQISEFSKRVILADANLDKVLSAYNKHRDKPIREQAENIIHLFTLTNLGAPAAFKYFDTTIDRKRYTSTKEVLDATLIHQSITGLYETRIDLSQLGGDGGEAAAKEAAAKEAAAKEAAAKGGVLNLEEEYRLHEKPVPSSIDPSWLQLFPTVWAERAGMGLANQVPPVVVELRSGASPVAVRQYPMSKEAREGIRPHIQRFLDLGVLVPCQSPWNTPLLPVKKPGTNDYRPVQDLREINKRVQDIHPTVPNPYNLLSSLPPSHTWYSVLDLKDAFFCLKLHPNSQPLFAFEWRDPEKGNTGQLTWTRLPQGFKNSPTLFNEALHRDLAPFRALNPQVVLLQYVDDLLVAAPTYRDCKEGTQKLLQELSKLGYRVSAKKAQLCQKEVTYLGYLLKEGKRWLTPARKATVMKIPPPTTPRQVREFLGKAGFCRLFIPGFASLAAPLYPLTKPSIPFIWTEEHQKAFDRIKEALLSAPALALPDLTKPFTLYVDERAGVARGVLTQTLGPWRRPVAYLSKKLDPVASGWPTCLKAVAAVALLLKDADKLTLGQNVTVIASHSLESIVRQPPDRWMTNARMTHYQSLLLNERVSFAPPAVLNPATLLPVESEATPVHRCSEILAEETGTRRDLKDQPLPGVPAWYTDGSSFIAEGKRRAGAAIVDGKRTVWASSLPEGTSAQKAELVALTQALRLAEGKDINIYTDSRYAFATAHIHGAIYKQRGWLTSAGKDIKNKEEILALLEAIHLPKRVAIIHCPGHQKGNDPVATGNRRADEAAKQAALSTRVLAETTKPAGKRTADGSEFEKRTADGSEFESPKKKAKVE

SEQ ID NO: 936 - protein, 2094 aa, synthetic construct
MPAAKRVKLDGGDKKYSIGLDIGTNSVGWAVITDEYKVPSKKFKVLGNTDRHSIKKNLIGALLFDSGETAEATRLKRTARRRYTRRKNRICYLQEIFSNEMAKVDDSFFHRLEESFLVEEDKKHERHPIFGNIVDEVAYHEKYPTIYHLRKKLVDSTDKADLRLIYLALAHMIKFRGHFLIEGDLNPDNSDVDKLFIQLVQTYNQLFEENPINASGVDAKAILSARLSKSRRLENLIAQLPGEKKNGLFGNLIALSLGLTPNFKSNFDLAEDAKLQLSKDTYDDDLDNLLAQIGDQYADLFLAAKNLSDAILLSDILRVNTEITKAPLSASMIKRYDEHHQDLTLLKALVRQQLPEKYKEIFFDQSKNGYAGYIDGGASQEEFYKFIKPILEKMDGTEELLVKLNREDLLRKQRTFDNGSIPHQIHLGELHAILRRQEDFYPFLKDNREKIEKILTFRIPYYVGPLARGNSRFAWMTRKSEETITPWNFEEVVDKGASAQSFIERMTNFDKNLPNEKVLPKHSLLYEYFTVYNELTKVKYVTEGMRKPAFLSGEQKKAIVDLLFKTNRKVTVKQLKEDYFKKIECFDSVEISGVEDRFNASLGTYHDLLKIIKDKDFLDNEENEDILEDIVLTLTLFEDREMIEERLKTYAHLFDDKVMKQLKRRRYTGWGRLSRKLINGIRDKQSGKTILDFLKSDGFANRNFMQLIHDDSLTFKEDIQKAQVSGQGDSLHEHIANLAGSPAIKKGILQTVKVVDELVKVMGRHKPENIVIEMARENQTTQKGQKNSRERMKRIEEGIKELGSQILKEHPVENTQLQNEKLYLYYLQNGRDMYVDQELDINRLSDYDVDHIVPQSFLKDDSIDNKVLTRSDKARGKSDNVPSEEVVKKMKNYWRQLLNAKLITQRKFDNLTKAERGGLSELDKAGFIKRQLVETRQITKHVAQILDSRMNTKYDENDKLIREVKVITLKSKLVSDFRKDFQFYKVREINNYHHAHDAYLNAVVGTALIKKYPKLESEFVYGDYKVYDVRKMIAKSEQEIGKATAKYFFYSNIMNFFKTEITLANGEIRKRPLIETNGETGEIVWDKGRDFATVRKVLSMPQVNIVKKTEVQTGGFSKESILPKRNSDKLIARKKDWDPKKYGGFDSPTVAYSVLVVAKVEKGKSKKLKSVKELLGITIMERSSFEKNPIDFLEAKGYKEVKKDLIIKLPKYSLFELENGRKRMLASAGELQKGNELALPSKYVNFLYLASHYEKLKGSPEDNEQKQLFVEQHKHYLDEIIEQISEFSKRVILADANLDKVLSAYNKHRDKPIREQAENIIHLFTLTNLGAPAAFKYFDTTIDRKRYTSTKEVLDATLIHQSITGLYETRIDLSQLGGDGGGGSGSSEAAAKGGVLNLEEEYRLHEKPVPSSIDPSWLQLFPTVWAERAGMGLANQVPPVVVELRSGASPVAVRQYPMSKEAREGIRPHIQRFLDLGVLVPCQSPWNTPLLPVKKPGTNDYRPVQDLREINKRVQDIHPTVPNPYNLLSSLPPSHTWYSVLDLKDAFFCLKLHPNSQPLFAFEWRDPEKGNTGQLTWTRLPQGFKNSPTLFNEALHRDLAPFRALNPQVVLLQYVDDLLVAAPTYRDCKEGTQKLLQELSKLGYRVSAKKAQLCQKEVTYLGYLLKEGKRWLTPARKATVMKIPPPTTPRQVREFLGKAGFCRLFIPGFASLAAPLYPLTKPSIPFIWTEEHQKAFDRIKEALLSAPALALPDLTKPFTLYVDERAGVARGVLTQTLGPWRRPVAYLSKKLDPVASGWPTCLKAVAAVALLLKDADKLTLGQNVTVIASHSLESIVRQPPDRWMTNARMTHYQSLLLNERVSFAPPAVLNPATLLPVESEATPVHRCSEILAEETGTRRDLKDQPLPGVPAWYTDGSSFIAEGKRRAGAAIVDGKRTVWASSLPEGTSAQKAELVALTQALRLAEGKDINIYTDSRYAFATAHIHGAIYKQRGWLTSAGKDIKNKEEILALLEAIHLPKRVAIIHCPGHQKGNDPVATGNRRADEAAKQAALSTRVLAETTKPAGKRTADGSEFEKRTADGSEFESPKKKAKVE

SEQ ID NO: 937 - protein, 2092 aa, synthetic construct
MPAAKRVKLDGGDKKYSIGLDIGTNSVGWAVITDEYKVPSKKFKVLGNTDRHSIKKNLIGALLFDSGETAEATRLKRTARRRYTRRKNRICYLQEIFSNEMAKVDDSFFHRLEESFLVEEDKKHERHPIFGNIVDEVAYHEKYPTIYHLRKKLVDSTDKADLRLIYLALAHMIKFRGHFLIEGDLNPDNSDVDKLFIQLVQTYNQLFEENPINASGVDAKAILSARLSKSRRLENLIAQLPGEKKNGLFGNLIALSLGLTPNFKSNFDLAEDAKLQLSKDTYDDDLDNLLAQIGDQYADLFLAAKNLSDAILLSDILRVNTEITKAPLSASMIKRYDEHHQDLTLLKALVRQQLPEKYKEIFFDQSKNGYAGYIDGGASQEEFYKFIKPILEKMDGTEELLVKLNREDLLRKQRTFDNGSIPHQIHLGELHAILRRQEDFYPFLKDNREKIEKILTFRIPYYVGPLARGNSRFAWMTRKSEETITPWNFEEVVDKGASAQSFIERMTNFDKNLPNEKVLPKHSLLYEYFTVYNELTKVKYVTEGMRKPAFLSGEQKKAIVDLLFKTNRKVTVKQLKEDYFKKIECFDSVEISGVEDRFNASLGTYHDLLKIIKDKDFLDNEENEDILEDIVLTLTLFEDREMIEERLKTYAHLFDDKVMKQLKRRRYTGWGRLSRKLINGIRDKQSGKTILDFLKSDGFANRNFMQLIHDDSLTFKEDIQKAQVSGQGDSLHEHIANLAGSPAIKKGILQTVKVVDELVKVMGRHKPENIVIEMARENQTTQKGQKNSRERMKRIEEGIKELGSQILKEHPVENTQLQNEKLYLYYLQNGRDMYVDQELDINRLSDYDVDHIVPQSFLKDDSIDNKVLTRSDKARGKSDNVPSEEVVKKMKNYWRQLLNAKLITQRKFDNLTKAERGGLSELDKAGFIKRQLVETRQITKHVAQILDSRMNTKYDENDKLIREVKVITLKSKLVSDFRKDFQFYKVREINNYHHAHDAYLNAVVGTALIKKYPKLESEFVYGDYKVYDVRKMIAKSEQEIGKATAKYFFYSNIMNFFKTEITLANGEIRKRPLIETNGETGEIVWDKGRDFATVRKVLSMPQVNIVKKTEVQTGGFSKESILPKRNSDKLIARKKDWDPKKYGGFDSPTVAYSVLVVAKVEKGKSKKLKSVKELLGITIMERSSFEKNPIDFLEAKGYKEVKKDLIIKLPKYSLFELENGRKRMLASAGELQKGNELALPSKYVNFLYLASHYEKLKGSPEDNEQKQLFVEQHKHYLDEIIEQISEFSKRVILADANLDKVLSAYNKHRDKPIREQAENIIHLFTLTNLGAPAAFKYFDTTIDRKRYTSTKEVLDATLIHQSITGLYETRIDLSQLGGDGGGGGGGSGSSGGVLNLEEEYRLHEKPVPSSIDPSWLQLFPTVWAERAGMGLANQVPPVVVELRSGASPVAVRQYPMSKEAREGIRPHIQRFLDLGVLVPCQSPWNTPLLPVKKPGTNDYRPVQDLREINKRVQDIHPTVPNPYNLLSSLPPSHTWYSVLDLKDAFFCLKLHPNSQPLFAFEWRDPEKGNTGQLTWTRLPQGFKNSPTLFNEALHRDLAPFRALNPQVVLLQYVDDLLVAAPTYRDCKEGTQKLLQELSKLGYRVSAKKAQLCQKEVTYLGYLLKEGKRWLTPARKATVMKIPPPTTPRQVREFLGKAGFCRLFIPGFASLAAPLYPLTKPSIPFIWTEEHQKAFDRIKEALLSAPALALPDLTKPFTLYVDERAGVARGVLTQTLGPWRRPVAYLSKKLDPVASGWPTCLKAVAAVALLLKDADKLTLGQNVTVIASHSLESIVRQPPDRWMTNARMTHYQSLLLNERVSFAPPAVLNPATLLPVESEATPVHRCSEILAEETGTRRDLKDQPLPGVPAWYTDGSSFIAEGKRRAGAAIVDGKRTVWASSLPEGTSAQKAELVALTQALRLAEGKDINIYTDSRYAFATAHIHGAIYKQRGWLTSAGKDIKNKEEILALLEAIHLPKRVAIIHCPGHQKGNDPVATGNRRADEAAKQAALSTRVLAETTKPAGKRTADGSEFEKRTADGSEFESPKKKAKVE

SEQ ID NO: 938 - protein, 2098 aa, synthetic construct
MPAAKRVKLDGGDKKYSIGLDIGTNSVGWAVITDEYKVPSKKFKVLGNTDRHSIKKNLIGALLFDSGETAEATRLKRTARRRYTRRKNRICYLQEIFSNEMAKVDDSFFHRLEESFLVEEDKKHERHPIFGNIVDEVAYHEKYPTIYHLRKKLVDSTDKADLRLIYLALAHMIKFRGHFLIEGDLNPDNSDVDKLFIQLVQTYNQLFEENPINASGVDAKAILSARLSKSRRLENLIAQLPGEKKNGLFGNLIALSLGLTPNFKSNFDLAEDAKLQLSKDTYDDDLDNLLAQIGDQYADLFLAAKNLSDAILLSDILRVNTEITKAPLSASMIKRYDEHHQDLTLLKALVRQQLPEKYKEIFFDQSKNGYAGYIDGGASQEEFYKFIKPILEKMDGTEELLVKLNREDLLRKQRTFDNGSIPHQIHLGELHAILRRQEDFYPFLKDNREKIEKILTFRIPYYVGPLARGNSRFAWMTRKSEETITPWNFEEVVDKGASAQSFIERMTNFDKNLPNEKVLPKHSLLYEYFTVYNELTKVKYVTEGMRKPAFLSGEQKKAIVDLLFKTNRKVTVKQLKEDYFKKIECFDSVEISGVEDRFNASLGTYHDLLKIIKDKDFLDNEENEDILEDIVLTLTLFEDREMIEERLKTYAHLFDDKVMKQLKRRRYTGWGRLSRKLINGIRDKQSGKTILDFLKSDGFANRNFMQLIHDDSLTFKEDIQKAQVSGQGDSLHEHIANLAGSPAIKKGILQTVKVVDELVKVMGRHKPENIVIEMARENQTTQKGQKNSRERMKRIEEGIKELGSQILKEHPVENTQLQNEKLYLYYLQNGRDMYVDQELDINRLSDYDVDHIVPQSFLKDDSIDNKVLTRSDKARGKSDNVPSEEVVKKMKNYWRQLLNAKLITQRKFDNLTKAERGGLSELDKAGFIKRQLVETRQITKHVAQILDSRMNTKYDENDKLIREVKVITLKSKLVSDFRKDFQFYKVREINNYHHAHDAYLNAVVGTALIKKYPKLESEFVYGDYKVYDVRKMIAKSEQEIGKATAKYFFYSNIMNFFKTEITLANGEIRKRPLIETNGETGEIVWDKGRDFATVRKVLSMPQVNIVKKTEVQTGGFSKESILPKRNSDKLIARKKDWDPKKYGGFDSPTVAYSVLVVAKVEKGKSKKLKSVKELLGITIMERSSFEKNPIDFLEAKGYKEVKKDLIIKLPKYSLFELENGRKRMLASAGELQKGNELALPSKYVNFLYLASHYEKLKGSPEDNEQKQLFVEQHKHYLDEIIEQISEFSKRVILADANLDKVLSAYNKHRDKPIREQAENIIHLFTLTNLGAPAAFKYFDTTIDRKRYTSTKEVLDATLIHQSITGLYETRIDLSQLGGDGGGSSGSSGSSGSSGSSGGVLNLEEEYRLHEKPVPSSIDPSWLQLFPTVWAERAGMGLANQVPPVVVELRSGASPVAVRQYPMSKEAREGIRPHIQRFLDLGVLVPCQSPWNTPLLPVKKPGTNDYRPVQDLREINKRVQDIHPTVPNPYNLLSSLPPSHTWYSVLDLKDAFFCLKLHPNSQPLFAFEWRDPEKGNTGQLTWTRLPQGFKNSPTLFNEALHRDLAPFRALNPQVVLLQYVDDLLVAAPTYRDCKEGTQKLLQELSKLGYRVSAKKAQLCQKEVTYLGYLLKEGKRWLTPARKATVMKIPPPTTPRQVREFLGKAGFCRLFIPGFASLAAPLYPLTKPSIPFIWTEEHQKAFDRIKEALLSAPALALPDLTKPFTLYVDERAGVARGVLTQTLGPWRRPVAYLSKKLDPVASGWPTCLKAVAAVALLLKDADKLTLGQNVTVIASHSLESIVRQPPDRWMTNARMTHYQSLLLNERVSFAPPAVLNPATLLPVESEATPVHRCSEILAEETGTRRDLKDQPLPGVPAWYTDGSSFIAEGKRRAGAAIVDGKRTVWASSLPEGTSAQKAELVALTQALRLAEGKDINIYTDSRYAFATAHIHGAIYKQRGWLTSAGKDIKNKEEILALLEAIHLPKRVAIIHCPGHQKGNDPVATGNRRADEAAKQAALSTRVLAETTKPAGKRTADGSEFEKRTADGSEFESPKKKAKVE

SEQ ID NO: 939 - protein, 2094 aa, synthetic construct
MPAAKRVKLDGGDKKYSIGLDIGTNSVGWAVITDEYKVPSKKFKVLGNTDRHSIKKNLIGALLFDSGETAEATRLKRTARRRYTRRKNRICYLQEIFSNEMAKVDDSFFHRLEESFLVEEDKKHERHPIFGNIVDEVAYHEKYPTIYHLRKKLVDSTDKADLRLIYLALAHMIKFRGHFLIEGDLNPDNSDVDKLFIQLVQTYNQLFEENPINASGVDAKAILSARLSKSRRLENLIAQLPGEKKNGLFGNLIALSLGLTPNFKSNFDLAEDAKLQLSKDTYDDDLDNLLAQIGDQYADLFLAAKNLSDAILLSDILRVNTEITKAPLSASMIKRYDEHHQDLTLLKALVRQQLPEKYKEIFFDQSKNGYAGYIDGGASQEEFYKFIKPILEKMDGTEELLVKLNREDLLRKQRTFDNGSIPHQIHLGELHAILRRQEDFYPFLKDNREKIEKILTFRIPYYVGPLARGNSRFAWMTRKSEETITPWNFEEVVDKGASAQSFIERMTNFDKNLPNEKVLPKHSLLYEYFTVYNELTKVKYVTEGMRKPAFLSGEQKKAIVDLLFKTNRKVTVKQLKEDYFKKIECFDSVEISGVEDRFNASLGTYHDLLKIIKDKDFLDNEENEDILEDIVLTLTLFEDREMIEERLKTYAHLFDDKVMKQLKRRRYTGWGRLSRKLINGIRDKQSGKTILDFLKSDGFANRNFMQLIHDDSLTFKEDIQKAQVSGQGDSLHEHIANLAGSPAIKKGILQTVKVVDELVKVMGRHKPENIVIEMARENQTTQKGQKNSRERMKRIEEGIKELGSQILKEHPVENTQLQNEKLYLYYLQNGRDMYVDQELDINRLSDYDVDHIVPQSFLKDDSIDNKVLTRSDKARGKSDNVPSEEVVKKMKNYWRQLLNAKLITQRKFDNLTKAERGGLSELDKAGFIKRQLVETRQITKHVAQILDSRMNTKYDENDKLIREVKVITLKSKLVSDFRKDFQFYKVREINNYHHAHDAYLNAVVGTALIKKYPKLESEFVYGDYKVYDVRKMIAKSEQEIGKATAKYFFYSNIMNFFKTEITLANGEIRKRPLIETNGETGEIVWDKGRDFATVRKVLSMPQVNIVKKTEVQTGGFSKESILPKRNSDKLIARKKDWDPKKYGGFDSPTVAYSVLVVAKVEKGKSKKLKSVKELLGITIMERSSFEKNPIDFLEAKGYKEVKKDLIIKLPKYSLFELENGRKRMLASAGELQKGNELALPSKYVNFLYLASHYEKLKGSPEDNEQKQLFVEQHKHYLDEIIEQISEFSKRVILADANLDKVLSAYNKHRDKPIREQAENIIHLFTLTNLGAPAAFKYFDTTIDRKRYTSTKEVLDATLIHQSITGLYETRIDLSQLGGDGGPAPEAAAKGGSGGVLNLEEEYRLHEKPVPSSIDPSWLQLFPTVWAERAGMGLANQVPPVVVELRSGASPVAVRQYPMSKEAREGIRPHIQRFLDLGVLVPCQSPWNTPLLPVKKPGTNDYRPVQDLREINKRVQDIHPTVPNPYNLLSSLPPSHTWYSVLDLKDAFFCLKLHPNSQPLFAFEWRDPEKGNTGQLTWTRLPQGFKNSPTLFNEALHRDLAPFRALNPQVVLLQYVDDLLVAAPTYRDCKEGTQKLLQELSKLGYRVSAKKAQLCQKEVTYLGYLLKEGKRWLTPARKATVMKIPPPTTPRQVREFLGKAGFCRLFIPGFASLAAPLYPLTKPSIPFIWTEEHQKAFDRIKEALLSAPALALPDLTKPFTLYVDERAGVARGVLTQTLGPWRRPVAYLSKKLDPVASGWPTCLKAVAAVALLLKDADKLTLGQNVTVIASHSLESIVRQPPDRWMTNARMTHYQSLLLNERVSFAPPAVLNPATLLPVESEATPVHRCSEILAEETGTRRDLKDQPLPGVPAWYTDGSSFIAEGKRRAGAAIVDGKRTVWASSLPEGTSAQKAELVALTQALRLAEGKDINIYTDSRYAFATAHIHGAIYKQRGWLTSAGKDIKNKEEILALLEAIHLPKRVAIIHCPGHQKGNDPVATGNRRADEAAKQAALSTRVLAETTKPAGKRTADGSEFEKRTADGSEFESPKKKAKVE

SEQ ID NO: 940 - protein, 2089 aa, synthetic construct
MPAAKRVKLDGGDKKYSIGLDIGTNSVGWAVITDEYKVPSKKFKVLGNTDRHSIKKNLIGALLFDSGETAEATRLKRTARRRYTRRKNRICYLQEIFSNEMAKVDDSFFHRLEESFLVEEDKKHERHPIFGNIVDEVAYHEKYPTIYHLRKKLVDSTDKADLRLIYLALAHMIKFRGHFLIEGDLNPDNSDVDKLFIQLVQTYNQLFEENPINASGVDAKAILSARLSKSRRLENLIAQLPGEKKNGLFGNLIALSLGLTPNFKSNFDLAEDAKLQLSKDTYDDDLDNLLAQIGDQYADLFLAAKNLSDAILLSDILRVNTEITKAPLSASMIKRYDEHHQDLTLLKALVRQQLPEKYKEIFFDQSKNGYAGYIDGGASQEEFYKFIKPILEKMDGTEELLVKLNREDLLRKQRTFDNGSIPHQIHLGELHAILRRQEDFYPFLKDNREKIEKILTFRIPYYVGPLARGNSRFAWMTRKSEETITPWNFEEVVDKGASAQSFIERMTNFDKNLPNEKVLPKHSLLYEYFTVYNELTKVKYVTEGMRKPAFLSGEQKKAIVDLLFKTNRKVTVKQLKEDYFKKIECFDSVEISGVEDRFNASLGTYHDLLKIIKDKDFLDNEENEDILEDIVLTLTLFEDREMIEERLKTYAHLFDDKVMKQLKRRRYTGWGRLSRKLINGIRDKQSGKTILDFLKSDGFANRNFMQLIHDDSLTFKEDIQKAQVSGQGDSLHEHIANLAGSPAIKKGILQTVKVVDELVKVMGRHKPENIVIEMARENQTTQKGQKNSRERMKRIEEGIKELGSQILKEHPVENTQLQNEKLYLYYLQNGRDMYVDQELDINRLSDYDVDHIVPQSFLKDDSIDNKVLTRSDKARGKSDNVPSEEVVKKMKNYWRQLLNAKLITQRKFDNLTKAERGGLSELDKAGFIKRQLVETRQITKHVAQILDSRMNTKYDENDKLIREVKVITLKSKLVSDFRKDFQFYKVREINNYHHAHDAYLNAVVGTALIKKYPKLESEFVYGDYKVYDVRKMIAKSEQEIGKATAKYFFYSNIMNFFKTEITLANGEIRKRPLIETNGETGEIVWDKGRDFATVRKVLSMPQVNIVKKTEVQTGGFSKESILPKRNSDKLIARKKDWDPKKYGGFDSPTVAYSVLVVAKVEKGKSKKLKSVKELLGITIMERSSFEKNPIDFLEAKGYKEVKKDLIIKLPKYSLFELENGRKRMLASAGELQKGNELALPSKYVNFLYLASHYEKLKGSPEDNEQKQLFVEQHKHYLDEIIEQISEFSKRVILADANLDKVLSAYNKHRDKPIREQAENIIHLFTLTNLGAPAAFKYFDTTIDRKRYTSTKEVLDATLIHQSITGLYETRIDLSQLGGDGGGGGPAPGGVLNLEEEYRLHEKPVPSSIDPSWLQLFPTVWAERAGMGLANQVPPVVVELRSGASPVAVRQYPMSKEAREGIRPHIQRFLDLGVLVPCQSPWNTPLLPVKKPGTNDYRPVQDLREINKRVQDIHPTVPNPYNLLSSLPPSHTWYSVLDLKDAFFCLKLHPNSQPLFAFEWRDPEKGNTGQLTWTRLPQGFKNSPTLFNEALHRDLAPFRALNPQVVLLQYVDDLLVAAPTYRDCKEGTQKLLQELSKLGYRVSAKKAQLCQKEVTYLGYLLKEGKRWLTPARKATVMKIPPPTTPRQVREFLGKAGFCRLFIPGFASLAAPLYPLTKPSIPFIWTEEHQKAFDRIKEALLSAPALALPDLTKPFTLYVDERAGVARGVLTQTLGPWRRPVAYLSKKLDPVASGWPTCLKAVAAVALLLKDADKLTLGQNVTVIASHSLESIVRQPPDRWMTNARMTHYQSLLLNERVSFAPPAVLNPATLLPVESEATPVHRCSEILAEETGTRRDLKDQPLPGVPAWYTDGSSFIAEGKRRAGAAIVDGKRTVWASSLPEGTSAQKAELVALTQALRLAEGKDINIYTDSRYAFATAHIHGAIYKQRGWLTSAGKDIKNKEEILALLEAIHLPKRVAIIHCPGHQKGNDPVATGNRRADEAAKQAALSTRVLAETTKPAGKRTADGSEFEKRTADGSEFESPKKKAKVE

SEQ ID NO: 941 - protein, 2089 aa, synthetic construct
MPAAKRVKLDGGDKKYSIGLDIGTNSVGWAVITDEYKVPSKKFKVLGNTDRHSIKKNLIGALLFDSGETAEATRLKRTARRRYTRRKNRICYLQEIFSNEMAKVDDSFFHRLEESFLVEEDKKHERHPIFGNIVDEVAYHEKYPTIYHLRKKLVDSTDKADLRLIYLALAHMIKFRGHFLIEGDLNPDNSDVDKLFIQLVQTYNQLFEENPINASGVDAKAILSARLSKSRRLENLIAQLPGEKKNGLFGNLIALSLGLTPNFKSNFDLAEDAKLQLSKDTYDDDLDNLLAQIGDQYADLFLAAKNLSDAILLSDILRVNTEITKAPLSASMIKRYDEHHQDLTLLKALVRQQLPEKYKEIFFDQSKNGYAGYIDGGASQEEFYKFIKPILEKMDGTEELLVKLNREDLLRKQRTFDNGSIPHQIHLGELHAILRRQEDFYPFLKDNREKIEKILTFRIPYYVGPLARGNSRFAWMTRKSEETITPWNFEEVVDKGASAQSFIERMTNFDKNLPNEKVLPKHSLLYEYFTVYNELTKVKYVTEGMRKPAFLSGEQKKAIVDLLFKTNRKVTVKQLKEDYFKKIECFDSVEISGVEDRFNASLGTYHDLLKIIKDKDFLDNEENEDILEDIVLTLTLFEDREMIEERLKTYAHLFDDKVMKQLKRRRYTGWGRLSRKLINGIRDKQSGKTILDFLKSDGFANRNFMQLIHDDSLTFKEDIQKAQVSGQGDSLHEHIANLAGSPAIKKGILQTVKVVDELVKVMGRHKPENIVIEMARENQTTQKGQKNSRERMKRIEEGIKELGSQILKEHPVENTQLQNEKLYLYYLQNGRDMYVDQELDINRLSDYDVDHIVPQSFLKDDSIDNKVLTRSDKARGKSDNVPSEEVVKKMKNYWRQLLNAKLITQRKFDNLTKAERGGLSELDKAGFIKRQLVETRQITKHVAQILDSRMNTKYDENDKLIREVKVITLKSKLVSDFRKDFQFYKVREINNYHHAHDAYLNAVVGTALIKKYPKLESEFVYGDYKVYDVRKMIAKSEQEIGKATAKYFFYSNIMNFFKTEITLANGEIRKRPLIETNGETGEIVWDKGRDFATVRKVLSMPQVNIVKKTEVQTGGFSKESILPKRNSDKLIARKKDWDPKKYGGFDSPTVAYSVLVVAKVEKGKSKKLKSVKELLGITIMERSSFEKNPIDFLEAKGYKEVKKDLIIKLPKYSLFELENGRKRMLASAGELQKGNELALPSKYVNFLYLASHYEKLKGSPEDNEQKQLFVEQHKHYLDEIIEQISEFSKRVILADANLDKVLSAYNKHRDKPIREQAENIIHLFTLTNLGAPAAFKYFDTTIDRKRYTSTKEVLDATLIHQSITGLYETRIDLSQLGGDGGPAPGSSGGVLNLEEEYRLHEKPVPSSIDPSWLQLFPTVWAERAGMGLANQVPPVVVELRSGASPVAVRQYPMSKEAREGIRPHIQRFLDLGVLVPCQSPWNTPLLPVKKPGTNDYRPVQDLREINKRVQDIHPTVPNPYNLLSSLPPSHTWYSVLDLKDAFFCLKLHPNSQPLFAFEWRDPEKGNTGQLTWTRLPQGFKNSPTLFNEALHRDLAPFRALNPQVVLLQYVDDLLVAAPTYRDCKEGTQKLLQELSKLGYRVSAKKAQLCQKEVTYLGYLLKEGKRWLTPARKATVMKIPPPTTPRQVREFLGKAGFCRLFIPGFASLAAPLYPLTKPSIPFIWTEEHQKAFDRIKEALLSAPALALPDLTKPFTLYVDERAGVARGVLTQTLGPWRRPVAYLSKKLDPVASGWPTCLKAVAAVALLLKDADKLTLGQNVTVIASHSLESIVRQPPDRWMTNARMTHYQSLLLNERVSFAPPAVLNPATLLPVESEATPVHRCSEILAEETGTRRDLKDQPLPGVPAWYTDGSSFIAEGKRRAGAAIVDGKRTVWASSLPEGTSAQKAELVALTQALRLAEGKDINIYTDSRYAFATAHIHGAIYKQRGWLTSAGKDIKNKEEILALLEAIHLPKRVAIIHCPGHQKGNDPVATGNRRADEAAKQAALSTRVLAETTKPAGKRTADGSEFEKRTADGSEFESPKKKAKVE

SEQ ID NO: 942 - protein, 2091 aa, synthetic construct
MPAAKRVKLDGGDKKYSIGLDIGTNSVGWAVITDEYKVPSKKFKVLGNTDRHSIKKNLIGALLFDSGETAEATRLKRTARRRYTRRKNRICYLQEIFSNEMAKVDDSFFHRLEESFLVEEDKKHERHPIFGNIVDEVAYHEKYPTIYHLRKKLVDSTDKADLRLIYLALAHMIKFRGHFLIEGDLNPDNSDVDKLFIQLVQTYNQLFEENPINASGVDAKAILSARLSKSRRLENLIAQLPGEKKNGLFGNLIALSLGLTPNFKSNFDLAEDAKLQLSKDTYDDDLDNLLAQIGDQYADLFLAAKNLSDAILLSDILRVNTEITKAPLSASMIKRYDEHHQDLTLLKALVRQQLPEKYKEIFFDQSKNGYAGYIDGGASQEEFYKFIKPILEKMDGTEELLVKLNREDLLRKQRTFDNGSIPHQIHLGELHAILRRQEDFYPFLKDNREKIEKILTFRIPYYVGPLARGNSRFAWMTRKSEETITPWNFEEVVDKGASAQSFIERMTNFDKNLPNEKVLPKHSLLYEYFTVYNELTKVKYVTEGMRKPAFLSGEQKKAIVDLLFKTNRKVTVKQLKEDYFKKIECFDSVEISGVEDRFNASLGTYHDLLKIIKDKDFLDNEENEDILEDIVLTLTLFEDREMIEERLKTYAHLFDDKVMKQLKRRRYTGWGRLSRKLINGIRDKQSGKTILDFLKSDGFANRNFMQLIHDDSLTFKEDIQKAQVSGQGDSLHEHIANLAGSPAIKKGILQTVKVVDELVKVMGRHKPENIVIEMARENQTTQKGQKNSRERMKRIEEGIKELGSQILKEHPVENTQLQNEKLYLYYLQNGRDMYVDQELDINRLSDYDVDHIVPQSFLKDDSIDNKVLTRSDKARGKSDNVPSEEVVKKMKNYWRQLLNAKLITQRKFDNLTKAERGGLSELDKAGFIKRQLVETRQITKHVAQILDSRMNTKYDENDKLIREVKVITLKSKLVSDFRKDFQFYKVREINNYHHAHDAYLNAVVGTALIKKYPKLESEFVYGDYKVYDVRKMIAKSEQEIGKATAKYFFYSNIMNFFKTEITLANGEIRKRPLIETNGETGEIVWDKGRDFATVRKVLSMPQVNIVKKTEVQTGGFSKESILPKRNSDKLIARKKDWDPKKYGGFDSPTVAYSVLVVAKVEKGKSKKLKSVKELLGITIMERSSFEKNPIDFLEAKGYKEVKKDLIIKLPKYSLFELENGRKRMLASAGELQKGNELALPSKYVNFLYLASHYEKLKGSPEDNEQKQLFVEQHKHYLDEIIEQISEFSKRVILADANLDKVLSAYNKHRDKPIREQAENIIHLFTLTNLGAPAAFKYFDTTIDRKRYTSTKEVLDATLIHQSITGLYETRIDLSQLGGDGGEAAAKGSSGGVLNLEEEYRLHEKPVPSSIDPSWLQLFPTVWAERAGMGLANQVPPVVVELRSGASPVAVRQYPMSKEAREGIRPHIQRFLDLGVLVPCQSPWNTPLLPVKKPGTNDYRPVQDLREINKRVQDIHPTVPNPYNLLSSLPPSHTWYSVLDLKDAFFCLKLHPNSQPLFAFEWRDPEKGNTGQLTWTRLPQGFKNSPTLFNEALHRDLAPFRALNPQVVLLQYVDDLLVAAPTYRDCKEGTQKLLQELSKLGYRVSAKKAQLCQKEVTYLGYLLKEGKRWLTPARKATVMKIPPPTTPRQVREFLGKAGFCRLFIPGFASLAAPLYPLTKPSIPFIWTEEHQKAFDRIKEALLSAPALALPDLTKPFTLYVDERAGVARGVLTQTLGPWRRPVAYLSKKLDPVASGWPTCLKAVAAVALLLKDADKLTLGQNVTVIASHSLESIVRQPPDRWMTNARMTHYQSLLLNERVSFAPPAVLNPATLLPVESEATPVHRCSEILAEETGTRRDLKDQPLPGVPAWYTDGSSFIAEGKRRAGAAIVDGKRTVWASSLPEGTSAQKAELVALTQALRLAEGKDINIYTDSRYAFATAHIHGAIYKQRGWLTSAGKDIKNKEEILALLEAIHLPKRVAIIHCPGHQKGNDPVATGNRRADEAAKQAALSTRVLAETTKPAGKRTADGSEFEKRTADGSEFESPKKKAKVE

SEQ ID NO: 943 - protein, 2089 aa, synthetic construct
MPAAKRVKLDGGDKKYSIGLDIGTNSVGWAVITDEYKVPSKKFKVLGNTDRHSIKKNLIGALLFDSGETAEATRLKRTARRRYTRRKNRICYLQEIFSNEMAKVDDSFFHRLEESFLVEEDKKHERHPIFGNIVDEVAYHEKYPTIYHLRKKLVDSTDKADLRLIYLALAHMIKFRGHFLIEGDLNPDNSDVDKLFIQLVQTYNQLFEENPINASGVDAKAILSARLSKSRRLENLIAQLPGEKKNGLFGNLIALSLGLTPNFKSNFDLAEDAKLQLSKDTYDDDLDNLLAQIGDQYADLFLAAKNLSDAILLSDILRVNTEITKAPLSASMIKRYDEHHQDLTLLKALVRQQLPEKYKEIFFDQSKNGYAGYIDGGASQEEFYKFIKPILEKMDGTEELLVKLNREDLLRKQRTFDNGSIPHQIHLGELHAILRRQEDFYPFLKDNREKIEKILTFRIPYYVGPLARGNSRFAWMTRKSEETITPWNFEEVVDKGASAQSFIERMTNFDKNLPNEKVLPKHSLLYEYFTVYNELTKVKYVTEGMRKPAFLSGEQKKAIVDLLFKTNRKVTVKQLKEDYFKKIECFDSVEISGVEDRFNASLGTYHDLLKIIKDKDFLDNEENEDILEDIVLTLTLFEDREMIEERLKTYAHLFDDKVMKQLKRRRYTGWGRLSRKLINGIRDKQSGKTILDFLKSDGFANRNFMQLIHDDSLTFKEDIQKAQVSGQGDSLHEHIANLAGSPAIKKGILQTVKVVDELVKVMGRHKPENIVIEMARENQTTQKGQKNSRERMKRIEEGIKELGSQILKEHPVENTQLQNEKLYLYYLQNGRDMYVDQELDINRLSDYDVDHIVPQSFLKDDSIDNKVLTRSDKARGKSDNVPSEEVVKKMKNYWRQLLNAKLITQRKFDNLTKAERGGLSELDKAGFIKRQLVETRQITKHVAQILDSRMNTKYDENDKLIREVKVITLKSKLVSDFRKDFQFYKVREINNYHHAHDAYLNAVVGTALIKKYPKLESEFVYGDYKVYDVRKMIAKSEQEIGKATAKYFFYSNIMNFFKTEITLANGEIRKRPLIETNGETGEIVWDKGRDFATVRKVLSMPQVNIVKKTEVQTGGFSKESILPKRNSDKLIARKKDWDPKKYGGFDSPTVAYSVLVVAKVEKGKSKKLKSVKELLGITIMERSSFEKNPIDFLEAKGYKEVKKDLIIKLPKYSLFELENGRKRMLASAGELQKGNELALPSKYVNFLYLASHYEKLKGSPEDNEQKQLFVEQHKHYLDEIIEQISEFSKRVILADANLDKVLSAYNKHRDKPIREQAENIIHLFTLTNLGAPAAFKYFDTTIDRKRYTSTKEVLDATLIHQSITGLYETRIDLSQLGGDGGPAPGGSGGVLNLEEEYRLHEKPVPSSIDPSWLQLFPTVWAERAGMGLANQVPPVVVELRSGASPVAVRQYPMSKEAREGIRPHIQRFLDLGVLVPCQSPWNTPLLPVKKPGTNDYRPVQDLREINKRVQDIHPTVPNPYNLLSSLPPSHTWYSVLDLKDAFFCLKLHPNSQPLFAFEWRDPEKGNTGQLTWTRLPQGFKNSPTLFNEALHRDLAPFRALNPQVVLLQYVDDLLVAAPTYRDCKEGTQKLLQELSKLGYRVSAKKAQLCQKEVTYLGYLLKEGKRWLTPARKATVMKIPPPTTPRQVREFLGKAGFCRLFIPGFASLAAPLYPLTKPSIPFIWTEEHQKAFDRIKEALLSAPALALPDLTKPFTLYVDERAGVARGVLTQTLGPWRRPVAYLSKKLDPVASGWPTCLKAVAAVALLLKDADKLTLGQNVTVIASHSLESIVRQPPDRWMTNARMTHYQSLLLNERVSFAPPAVLNPATLLPVESEATPVHRCSEILAEETGTRRDLKDQPLPGVPAWYTDGSSFIAEGKRRAGAAIVDGKRTVWASSLPEGTSAQKAELVALTQALRLAEGKDINIYTDSRYAFATAHIHGAIYKQRGWLTSAGKDIKNKEEILALLEAIHLPKRVAIIHCPGHQKGNDPVATGNRRADEAAKQAALSTRVLAETTKPAGKRTADGSEFEKRTADGSEFESPKKKAKVE

SEQ ID NO: 944 - protein, 2094 aa, synthetic construct
MPAAKRVKLDGGDKKYSIGLDIGTNSVGWAVITDEYKVPSKKFKVLGNTDRHSIKKNLIGALLFDSGETAEATRLKRTARRRYTRRKNRICYLQEIFSNEMAKVDDSFFHRLEESFLVEEDKKHERHPIFGNIVDEVAYHEKYPTIYHLRKKLVDSTDKADLRLIYLALAHMIKFRGHFLIEGDLNPDNSDVDKLFIQLVQTYNQLFEENPINASGVDAKAILSARLSKSRRLENLIAQLPGEKKNGLFGNLIALSLGLTPNFKSNFDLAEDAKLQLSKDTYDDDLDNLLAQIGDQYADLFLAAKNLSDAILLSDILRVNTEITKAPLSASMIKRYDEHHQDLTLLKALVRQQLPEKYKEIFFDQSKNGYAGYIDGGASQEEFYKFIKPILEKMDGTEELLVKLNREDLLRKQRTFDNGSIPHQIHLGELHAILRRQEDFYPFLKDNREKIEKILTFRIPYYVGPLARGNSRFAWMTRKSEETITPWNFEEVVDKGASAQSFIERMTNFDKNLPNEKVLPKHSLLYEYFTVYNELTKVKYVTEGMRKPAFLSGEQKKAIVDLLFKTNRKVTVKQLKEDYFKKIECFDSVEISGVEDRFNASLGTYHDLLKIIKDKDFLDNEENEDILEDIVLTLTLFEDREMIEERLKTYAHLFDDKVMKQLKRRRYTGWGRLSRKLINGIRDKQSGKTILDFLKSDGFANRNFMQLIHDDSLTFKEDIQKAQVSGQGDSLHEHIANLAGSPAIKKGILQTVKVVDELVKVMGRHKPENIVIEMARENQTTQKGQKNSRERMKRIEEGIKELGSQILKEHPVENTQLQNEKLYLYYLQNGRDMYVDQELDINRLSDYDVDHIVPQSFLKDDSIDNKVLTRSDKARGKSDNVPSEEVVKKMKNYWRQLLNAKLITQRKFDNLTKAERGGLSELDKAGFIKRQLVETRQITKHVAQILDSRMNTKYDENDKLIREVKVITLKSKLVSDFRKDFQFYKVREINNYHHAHDAYLNAVVGTALIKKYPKLESEFVYGDYKVYDVRKMIAKSEQEIGKATAKYFFYSNIMNFFKTEITLANGEIRKRPLIETNGETGEIVWDKGRDFATVRKVLSMPQVNIVKKTEVQTGGFSKESILPKRNSDKLIARKKDWDPKKYGGFDSPTVAYSVLVVAKVEKGKSKKLKSVKELLGITIMERSSFEKNPIDFLEAKGYKEVKKDLIIKLPKYSLFELENGRKRMLASAGELQKGNELALPSKYVNFLYLASHYEKLKGSPEDNEQKQLFVEQHKHYLDEIIEQISEFSKRVILADANLDKVLSAYNKHRDKPIREQAENIIHLFTLTNLGAPAAFKYFDTTIDRKRYTSTKEVLDATLIHQSITGLYETRIDLSQLGGDGGGSSPAPEAAAKGGVLNLEEEYRLHEKPVPSSIDPSWLQLFPTVWAERAGMGLANQVPPVVVELRSGASPVAVRQYPMSKEAREGIRPHIQRFLDLGVLVPCQSPWNTPLLPVKKPGTNDYRPVQDLREINKRVQDIHPTVPNPYNLLSSLPPSHTWYSVLDLKDAFFCLKLHPNSQPLFAFEWRDPEKGNTGQLTWTRLPQGFKNSPTLFNEALHRDLAPFRALNPQVVLLQYVDDLLVAAPTYRDCKEGTQKLLQELSKLGYRVSAKKAQLCQKEVTYLGYLLKEGKRWLTPARKATVMKIPPPTTPRQVREFLGKAGFCRLFIPGFASLAAPLYPLTKPSIPFIWTEEHQKAFDRIKEALLSAPALALPDLTKPFTLYVDERAGVARGVLTQTLGPWRRPVAYLSKKLDPVASGWPTCLKAVAAVALLLKDADKLTLGQNVTVIASHSLESIVRQPPDRWMTNARMTHYQSLLLNERVSFAPPAVLNPATLLPVESEATPVHRCSEILAEETGTRRDLKDQPLPGVPAWYTDGSSFIAEGKRRAGAAIVDGKRTVWASSLPEGTSAQKAELVALTQALRLAEGKDINIYTDSRYAFATAHIHGAIYKQRGWLTSAGKDIKNKEEILALLEAIHLPKRVAIIHCPGHQKGNDPVATGNRRADEAAKQAALSTRVLAETTKPAGKRTADGSEFEKRTADGSEFESPKKKAKVE

SEQ ID NO: 945 - protein, 2093 aa, synthetic construct
MPAAKRVKLDGGDKKYSIGLDIGTNSVGWAVITDEYKVPSKKFKVLGNTDRHSIKKNLIGALLFDSGETAEATRLKRTARRRYTRRKNRICYLQEIFSNEMAKVDDSFFHRLEESFLVEEDKKHERHPIFGNIVDEVAYHEKYPTIYHLRKKLVDSTDKADLRLIYLALAHMIKFRGHFLIEGDLNPDNSDVDKLFIQLVQTYNQLFEENPINASGVDAKAILSARLSKSRRLENLIAQLPGEKKNGLFGNLIALSLGLTPNFKSNFDLAEDAKLQLSKDTYDDDLDNLLAQIGDQYADLFLAAKNLSDAILLSDILRVNTEITKAPLSASMIKRYDEHHQDLTLLKALVRQQLPEKYKEIFFDQSKNGYAGYIDGGASQEEFYKFIKPILEKMDGTEELLVKLNREDLLRKQRTFDNGSIPHQIHLGELHAILRRQEDFYPFLKDNREKIEKILTFRIPYYVGPLARGNSRFAWMTRKSEETITPWNFEEVVDKGASAQSFIERMTNFDKNLPNEKVLPKHSLLYEYFTVYNELTKVKYVTEGMRKPAFLSGEQKKAIVDLLFKTNRKVTVKQLKEDYFKKIECFDSVEISGVEDRFNASLGTYHDLLKIIKDKDFLDNEENEDILEDIVLTLTLFEDREMIEERLKTYAHLFDDKVMKQLKRRRYTGWGRLSRKLINGIRDKQSGKTILDFLKSDGFANRNFMQLIHDDSLTFKEDIQKAQVSGQGDSLHEHIANLAGSPAIKKGILQTVKVVDELVKVMGRHKPENIVIEMARENQTTQKGQKNSRERMKRIEEGIKELGSQILKEHPVENTQLQNEKLYLYYLQNGRDMYVDQELDINRLSDYDVDHIVPQSFLKDDSIDNKVLTRSDKARGKSDNVPSEEVVKKMKNYWRQLLNAKLITQRKFDNLTKAERGGLSELDKAGFIKRQLVETRQITKHVAQILDSRMNTKYDENDKLIREVKVITLKSKLVSDFRKDFQFYKVREINNYHHAHDAYLNAVVGTALIKKYPKLESEFVYGDYKVYDVRKMIAKSEQEIGKATAKYFFYSNIMNFFKTEITLANGEIRKRPLIETNGETGEIVWDKGRDFATVRKVLSMPQVNIVKKTEVQTGGFSKESILPKRNSDKLIARKKDWDPKKYGGFDSPTVAYSVLVVAKVEKGKSKKLKSVKELLGITIMERSSFEKNPIDFLEAKGYKEVKKDLIIKLPKYSLFELENGRKRMLASAGELQKGNELALPSKYVNFLYLASHYEKLKGSPEDNEQKQLFVEQHKHYLDEIIEQISEFSKRVILADANLDKVLSAYNKHRDKPIREQAENIIHLFTLTNLGAPAAFKYFDTTIDRKRYTSTKEVLDATLIHQSITGLYETRIDLSQLGGDGGGGGGSGGGGSGGVLNLEEEYRLHEKPVPSSIDPSWLQLFPTVWAERAGMGLANQVPPVVVELRSGASPVAVRQYPMSKEAREGIRPHIQRFLDLGVLVPCQSPWNTPLLPVKKPGTNDYRPVQDLREINKRVQDIHPTVPNPYNLLSSLPPSHTWYSVLDLKDAFFCLKLHPNSQPLFAFEWRDPEKGNTGQLTWTRLPQGFKNSPTLFNEALHRDLAPFRALNPQVVLLQYVDDLLVAAPTYRDCKEGTQKLLQELSKLGYRVSAKKAQLCQKEVTYLGYLLKEGKRWLTPARKATVMKIPPPTTPRQVREFLGKAGFCRLFIPGFASLAAPLYPLTKPSIPFIWTEEHQKAFDRIKEALLSAPALALPDLTKPFTLYVDERAGVARGVLTQTLGPWRRPVAYLSKKLDPVASGWPTCLKAVAAVALLLKDADKLTLGQNVTVIASHSLESIVRQPPDRWMTNARMTHYQSLLLNERVSFAPPAVLNPATLLPVESEATPVHRCSEILAEETGTRRDLKDQPLPGVPAWYTDGSSFIAEGKRRAGAAIVDGKRTVWASSLPEGTSAQKAELVALTQALRLAEGKDINIYTDSRYAFATAHIHGAIYKQRGWLTSAGKDIKNKEEILALLEAIHLPKRVAIIHCPGHQKGNDPVATGNRRADEAAKQAALSTRVLAETTKPAGKRTADGSEFEKRTADGSEFESPKKKAKVE

SEQ ID NO: 946 - protein, 2092 aa, synthetic construct
MPAAKRVKLDGGDKKYSIGLDIGTNSVGWAVITDEYKVPSKKFKVLGNTDRHSIKKNLIGALLFDSGETAEATRLKRTARRRYTRRKNRICYLQEIFSNEMAKVDDSFFHRLEESFLVEEDKKHERHPIFGNIVDEVAYHEKYPTIYHLRKKLVDSTDKADLRLIYLALAHMIKFRGHFLIEGDLNPDNSDVDKLFIQLVQTYNQLFEENPINASGVDAKAILSARLSKSRRLENLIAQLPGEKKNGLFGNLIALSLGLTPNFKSNFDLAEDAKLQLSKDTYDDDLDNLLAQIGDQYADLFLAAKNLSDAILLSDILRVNTEITKAPLSASMIKRYDEHHQDLTLLKALVRQQLPEKYKEIFFDQSKNGYAGYIDGGASQEEFYKFIKPILEKMDGTEELLVKLNREDLLRKQRTFDNGSIPHQIHLGELHAILRRQEDFYPFLKDNREKIEKILTFRIPYYVGPLARGNSRFAWMTRKSEETITPWNFEEVVDKGASAQSFIERMTNFDKNLPNEKVLPKHSLLYEYFTVYNELTKVKYVTEGMRKPAFLSGEQKKAIVDLLFKTNRKVTVKQLKEDYFKKIECFDSVEISGVEDRFNASLGTYHDLLKIIKDKDFLDNEENEDILEDIVLTLTLFEDREMIEERLKTYAHLFDDKVMKQLKRRRYTGWGRLSRKLINGIRDKQSGKTILDFLKSDGFANRNFMQLIHDDSLTFKEDIQKAQVSGQGDSLHEHIANLAGSPAIKKGILQTVKVVDELVKVMGRHKPENIVIEMARENQTTQKGQKNSRERMKRIEEGIKELGSQILKEHPVENTQLQNEKLYLYYLQNGRDMYVDQELDINRLSDYDVDHIVPQSFLKDDSIDNKVLTRSDKARGKSDNVPSEEVVKKMKNYWRQLLNAKLITQRKFDNLTKAERGGLSELDKAGFIKRQLVETRQITKHVAQILDSRMNTKYDENDKLIREVKVITLKSKLVSDFRKDFQFYKVREINNYHHAHDAYLNAVVGTALIKKYPKLESEFVYGDYKVYDVRKMIAKSEQEIGKATAKYFFYSNIMNFFKTEITLANGEIRKRPLIETNGETGEIVWDKGRDFATVRKVLSMPQVNIVKKTEVQTGGFSKESILPKRNSDKLIARKKDWDPKKYGGFDSPTVAYSVLVVAKVEKGKSKKLKSVKELLGITIMERSSFEKNPIDFLEAKGYKEVKKDLIIKLPKYSLFELENGRKRMLASAGELQKGNELALPSKYVNFLYLASHYEKLKGSPEDNEQKQLFVEQHKHYLDEIIEQISEFSKRVILADANLDKVLSAYNKHRDKPIREQAENIIHLFTLTNLGAPAAFKYFDTTIDRKRYTSTKEVLDATLIHQSITGLYETRIDLSQLGGDGGGGGGSSGGSGGVLNLEEEYRLHEKPVPSSIDPSWLQLFPTVWAERAGMGLANQVPPVVVELRSGASPVAVRQYPMSKEAREGIRPHIQRFLDLGVLVPCQSPWNTPLLPVKKPGTNDYRPVQDLREINKRVQDIHPTVPNPYNLLSSLPPSHTWYSVLDLKDAFFCLKLHPNSQPLFAFEWRDPEKGNTGQLTWTRLPQGFKNSPTLFNEALHRDLAPFRALNPQVVLLQYVDDLLVAAPTYRDCKEGTQKLLQELSKLGYRVSAKKAQLCQKEVTYLGYLLKEGKRWLTPARKATVMKIPPPTTPRQVREFLGKAGFCRLFIPGFASLAAPLYPLTKPSIPFIWTEEHQKAFDRIKEALLSAPALALPDLTKPFTLYVDERAGVARGVLTQTLGPWRRPVAYLSKKLDPVASGWPTCLKAVAAVALLLKDADKLTLGQNVTVIASHSLESIVRQPPDRWMTNARMTHYQSLLLNERVSFAPPAVLNPATLLPVESEATPVHRCSEILAEETGTRRDLKDQPLPGVPAWYTDGSSFIAEGKRRAGAAIVDGKRTVWASSLPEGTSAQKAELVALTQALRLAEGKDINIYTDSRYAFATAHIHGAIYKQRGWLTSAGKDIKNKEEILALLEAIHLPKRVAIIHCPGHQKGNDPVATGNRRADEAAKQAALSTRVLAETTKPAGKRTADGSEFEKRTADGSEFESPKKKAKVE

SEQ ID NO: 947 - protein, 2091 aa, synthetic construct
MPAAKRVKLDGGDKKYSIGLDIGTNSVGWAVITDEYKVPSKKFKVLGNTDRHSIKKNLIGALLFDSGETAEATRLKRTARRRYTRRKNRICYLQEIFSNEMAKVDDSFFHRLEESFLVEEDKKHERHPIFGNIVDEVAYHEKYPTIYHLRKKLVDSTDKADLRLIYLALAHMIKFRGHFLIEGDLNPDNSDVDKLFIQLVQTYNQLFEENPINASGVDAKAILSARLSKSRRLENLIAQLPGEKKNGLFGNLIALSLGLTPNFKSNFDLAEDAKLQLSKDTYDDDLDNLLAQIGDQYADLFLAAKNLSDAILLSDILRVNTEITKAPLSASMIKRYDEHHQDLTLLKALVRQQLPEKYKEIFFDQSKNGYAGYIDGGASQEEFYKFIKPILEKMDGTEELLVKLNREDLLRKQRTFDNGSIPHQIHLGELHAILRRQEDFYPFLKDNREKIEKILTFRIPYYVGPLARGNSRFAWMTRKSEETITPWNFEEVVDKGASAQSFIERMTNFDKNLPNEKVLPKHSLLYEYFTVYNELTKVKYVTEGMRKPAFLSGEQKKAIVDLLFKTNRKVTVKQLKEDYFKKIECFDSVEISGVEDRFNASLGTYHDLLKIIKDKDFLDNEENEDILEDIVLTLTLFEDREMIEERLKTYAHLFDDKVMKQLKRRRYTGWGRLSRKLINGIRDKQSGKTILDFLKSDGFANRNFMQLIHDDSLTFKEDIQKAQVSGQGDSLHEHIANLAGSPAIKKGILQTVKVVDELVKVMGRHKPENIVIEMARENQTTQKGQKNSRERMKRIEEGIKELGSQILKEHPVENTQLQNEKLYLYYLQNGRDMYVDQELDINRLSDYDVDHIVPQSFLKDDSIDNKVLTRSDKARGKSDNVPSEEVVKKMKNYWRQLLNAKLITQRKFDNLTKAERGGLSELDKAGFIKRQLVETRQITKHVAQILDSRMNTKYDENDKLIREVKVITLKSKLVSDFRKDFQFYKVREINNYHHAHDAYLNAVVGTALIKKYPKLESEFVYGDYKVYDVRKMIAKSEQEIGKATAKYFFYSNIMNFFKTEITLANGEIRKRPLIETNGETGEIVWDKGRDFATVRKVLSMPQVNIVKKTEVQTGGFSKESILPKRNSDKLIARKKDWDPKKYGGFDSPTVAYSVLVVAKVEKGKSKKLKSVKELLGITIMERSSFEKNPIDFLEAKGYKEVKKDLIIKLPKYSLFELENGRKRMLASAGELQKGNELALPSKYVNFLYLASHYEKLKGSPEDNEQKQLFVEQHKHYLDEIIEQISEFSKRVILADANLDKVLSAYNKHRDKPIREQAENIIHLFTLTNLGAPAAFKYFDTTIDRKRYTSTKEVLDATLIHQSITGLYETRIDLSQLGGDGGPAPEAAAKGGVLNLEEEYRLHEKPVPSSIDPSWLQLFPTVWAERAGMGLANQVPPVVVELRSGASPVAVRQYPMSKEAREGIRPHIQRFLDLGVLVPCQSPWNTPLLPVKKPGTNDYRPVQDLREINKRVQDIHPTVPNPYNLLSSLPPSHTWYSVLDLKDAFFCLKLHPNSQPLFAFEWRDPEKGNTGQLTWTRLPQGFKNSPTLFNEALHRDLAPFRALNPQVVLLQYVDDLLVAAPTYRDCKEGTQKLLQELSKLGYRVSAKKAQLCQKEVTYLGYLLKEGKRWLTPARKATVMKIPPPTTPRQVREFLGKAGFCRLFIPGFASLAAPLYPLTKPSIPFIWTEEHQKAFDRIKEALLSAPALALPDLTKPFTLYVDERAGVARGVLTQTLGPWRRPVAYLSKKLDPVASGWPTCLKAVAAVALLLKDADKLTLGQNVTVIASHSLESIVRQPPDRWMTNARMTHYQSLLLNERVSFAPPAVLNPATLLPVESEATPVHRCSEILAEETGTRRDLKDQPLPGVPAWYTDGSSFIAEGKRRAGAAIVDGKRTVWASSLPEGTSAQKAELVALTQALRLAEGKDINIYTDSRYAFATAHIHGAIYKQRGWLTSAGKDIKNKEEILALLEAIHLPKRVAIIHCPGHQKGNDPVATGNRRADEAAKQAALSTRVLAETTKPAGKRTADGSEFEKRTADGSEFESPKKKAKVE

SEQ ID NO: 948 - protein, 2094 aa, synthetic construct
MPAAKRVKLDGGDKKYSIGLDIGTNSVGWAVITDEYKVPSKKFKVLGNTDRHSIKKNLIGALLFDSGETAEATRLKRTARRRYTRRKNRICYLQEIFSNEMAKVDDSFFHRLEESFLVEEDKKHERHPIFGNIVDEVAYHEKYPTIYHLRKKLVDSTDKADLRLIYLALAHMIKFRGHFLIEGDLNPDNSDVDKLFIQLVQTYNQLFEENPINASGVDAKAILSARLSKSRRLENLIAQLPGEKKNGLFGNLIALSLGLTPNFKSNFDLAEDAKLQLSKDTYDDDLDNLLAQIGDQYADLFLAAKNLSDAILLSDILRVNTEITKAPLSASMIKRYDEHHQDLTLLKALVRQQLPEKYKEIFFDQSKNGYAGYIDGGASQEEFYKFIKPILEKMDGTEELLVKLNREDLLRKQRTFDNGSIPHQIHLGELHAILRRQEDFYPFLKDNREKIEKILTFRIPYYVGPLARGNSRFAWMTRKSEETITPWNFEEVVDKGASAQSFIERMTNFDKNLPNEKVLPKHSLLYEYFTVYNELTKVKYVTEGMRKPAFLSGEQKKAIVDLLFKTNRKVTVKQLKEDYFKKIECFDSVEISGVEDRFNASLGTYHDLLKIIKDKDFLDNEENEDILEDIVLTLTLFEDREMIEERLKTYAHLFDDKVMKQLKRRRYTGWGRLSRKLINGIRDKQSGKTILDFLKSDGFANRNFMQLIHDDSLTFKEDIQKAQVSGQGDSLHEHIANLAGSPAIKKGILQTVKVVDELVKVMGRHKPENIVIEMARENQTTQKGQKNSRERMKRIEEGIKELGSQILKEHPVENTQLQNEKLYLYYLQNGRDMYVDQELDINRLSDYDVDHIVPQSFLKDDSIDNKVLTRSDKARGKSDNVPSEEVVKKMKNYWRQLLNAKLITQRKFDNLTKAERGGLSELDKAGFIKRQLVETRQITKHVAQILDSRMNTKYDENDKLIREVKVITLKSKLVSDFRKDFQFYKVREINNYHHAHDAYLNAVVGTALIKKYPKLESEFVYGDYKVYDVRKMIAKSEQEIGKATAKYFFYSNIMNFFKTEITLANGEIRKRPLIETNGETGEIVWDKGRDFATVRKVLSMPQVNIVKKTEVQTGGFSKESILPKRNSDKLIARKKDWDPKKYGGFDSPTVAYSVLVVAKVEKGKSKKLKSVKELLGITIMERSSFEKNPIDFLEAKGYKEVKKDLIIKLPKYSLFELENGRKRMLASAGELQKGNELALPSKYVNFLYLASHYEKLKGSPEDNEQKQLFVEQHKHYLDEIIEQISEFSKRVILADANLDKVLSAYNKHRDKPIREQAENIIHLFTLTNLGAPAAFKYFDTTIDRKRYTSTKEVLDATLIHQSITGLYETRIDLSQLGGDGGEAAAKGSSGGSGGVLNLEEEYRLHEKPVPSSIDPSWLQLFPTVWAERAGMGLANQVPPVVVELRSGASPVAVRQYPMSKEAREGIRPHIQRFLDLGVLVPCQSPWNTPLLPVKKPGTNDYRPVQDLREINKRVQDIHPTVPNPYNLLSSLPPSHTWYSVLDLKDAFFCLKLHPNSQPLFAFEWRDPEKGNTGQLTWTRLPQGFKNSPTLFNEALHRDLAPFRALNPQVVLLQYVDDLLVAAPTYRDCKEGTQKLLQELSKLGYRVSAKKAQLCQKEVTYLGYLLKEGKRWLTPARKATVMKIPPPTTPRQVREFLGKAGFCRLFIPGFASLAAPLYPLTKPSIPFIWTEEHQKAFDRIKEALLSAPALALPDLTKPFTLYVDERAGVARGVLTQTLGPWRRPVAYLSKKLDPVASGWPTCLKAVAAVALLLKDADKLTLGQNVTVIASHSLESIVRQPPDRWMTNARMTHYQSLLLNERVSFAPPAVLNPATLLPVESEATPVHRCSEILAEETGTRRDLKDQPLPGVPAWYTDGSSFIAEGKRRAGAAIVDGKRTVWASSLPEGTSAQKAELVALTQALRLAEGKDINIYTDSRYAFATAHIHGAIYKQRGWLTSAGKDIKNKEEILALLEAIHLPKRVAIIHCPGHQKGNDPVATGNRRADEAAKQAALSTRVLAETTKPAGKRTADGSEFEKRTADGSEFESPKKKAKVE

SEQ ID NO: 949 - protein, 2090 aa, synthetic construct
MPAAKRVKLDGGDKKYSIGLDIGTNSVGWAVITDEYKVPSKKFKVLGNTDRHSIKKNLIGALLFDSGETAEATRLKRTARRRYTRRKNRICYLQEIFSNEMAKVDDSFFHRLEESFLVEEDKKHERHPIFGNIVDEVAYHEKYPTIYHLRKKLVDSTDKADLRLIYLALAHMIKFRGHFLIEGDLNPDNSDVDKLFIQLVQTYNQLFEENPINASGVDAKAILSARLSKSRRLENLIAQLPGEKKNGLFGNLIALSLGLTPNFKSNFDLAEDAKLQLSKDTYDDDLDNLLAQIGDQYADLFLAAKNLSDAILLSDILRVNTEITKAPLSASMIKRYDEHHQDLTLLKALVRQQLPEKYKEIFFDQSKNGYAGYIDGGASQEEFYKFIKPILEKMDGTEELLVKLNREDLLRKQRTFDNGSIPHQIHLGELHAILRRQEDFYPFLKDNREKIEKILTFRIPYYVGPLARGNSRFAWMTRKSEETITPWNFEEVVDKGASAQSFIERMTNFDKNLPNEKVLPKHSLLYEYFTVYNELTKVKYVTEGMRKPAFLSGEQKKAIVDLLFKTNRKVTVKQLKEDYFKKIECFDSVEISGVEDRFNASLGTYHDLLKIIKDKDFLDNEENEDILEDIVLTLTLFEDREMIEERLKTYAHLFDDKVMKQLKRRRYTGWGRLSRKLINGIRDKQSGKTILDFLKSDGFANRNFMQLIHDDSLTFKEDIQKAQVSGQGDSLHEHIANLAGSPAIKKGILQTVKVVDELVKVMGRHKPENIVIEMARENQTTQKGQKNSRERMKRIEEGIKELGSQILKEHPVENTQLQNEKLYLYYLQNGRDMYVDQELDINRLSDYDVDHIVPQSFLKDDSIDNKVLTRSDKARGKSDNVPSEEVVKKMKNYWRQLLNAKLITQRKFDNLTKAERGGLSELDKAGFIKRQLVETRQITKHVAQILDSRMNTKYDENDKLIREVKVITLKSKLVSDFRKDFQFYKVREINNYHHAHDAYLNAVVGTALIKKYPKLESEFVYGDYKVYDVRKMIAKSEQEIGKATAKYFFYSNIMNFFKTEITLANGEIRKRPLIETNGETGEIVWDKGRDFATVRKVLSMPQVNIVKKTEVQTGGFSKESILPKRNSDKLIARKKDWDPKKYGGFDSPTVAYSVLVVAKVEKGKSKKLKSVKELLGITIMERSSFEKNPIDFLEAKGYKEVKKDLIIKLPKYSLFELENGRKRMLASAGELQKGNELALPSKYVNFLYLASHYEKLKGSPEDNEQKQLFVEQHKHYLDEIIEQISEFSKRVILADANLDKVLSAYNKHRDKPIREQAENIIHLFTLTNLGAPAAFKYFDTTIDRKRYTSTKEVLDATLIHQSITGLYETRIDLSQLGGDGGPAPAPAPGGVLNLEEEYRLHEKPVPSSIDPSWLQLFPTVWAERAGMGLANQVPPVVVELRSGASPVAVRQYPMSKEAREGIRPHIQRFLDLGVLVPCQSPWNTPLLPVKKPGTNDYRPVQDLREINKRVQDIHPTVPNPYNLLSSLPPSHTWYSVLDLKDAFFCLKLHPNSQPLFAFEWRDPEKGNTGQLTWTRLPQGFKNSPTLFNEALHRDLAPFRALNPQVVLLQYVDDLLVAAPTYRDCKEGTQKLLQELSKLGYRVSAKKAQLCQKEVTYLGYLLKEGKRWLTPARKATVMKIPPPTTPRQVREFLGKAGFCRLFIPGFASLAAPLYPLTKPSIPFIWTEEHQKAFDRIKEALLSAPALALPDLTKPFTLYVDERAGVARGVLTQTLGPWRRPVAYLSKKLDPVASGWPTCLKAVAAVALLLKDADKLTLGQNVTVIASHSLESIVRQPPDRWMTNARMTHYQSLLLNERVSFAPPAVLNPATLLPVESEATPVHRCSEILAEETGTRRDLKDQPLPGVPAWYTDGSSFIAEGKRRAGAAIVDGKRTVWASSLPEGTSAQKAELVALTQALRLAEGKDINIYTDSRYAFATAHIHGAIYKQRGWLTSAGKDIKNKEEILALLEAIHLPKRVAIIHCPGHQKGNDPVATGNRRADEAAKQAALSTRVLAETTKPAGKRTADGSEFEKRTADGSEFESPKKKAKVE

SEQ ID NO: 950 - protein, 2089 aa, synthetic construct
MPAAKRVKLDGGDKKYSIGLDIGTNSVGWAVITDEYKVPSKKFKVLGNTDRHSIKKNLIGALLFDSGETAEATRLKRTARRRYTRRKNRICYLQEIFSNEMAKVDDSFFHRLEESFLVEEDKKHERHPIFGNIVDEVAYHEKYPTIYHLRKKLVDSTDKADLRLIYLALAHMIKFRGHFLIEGDLNPDNSDVDKLFIQLVQTYNQLFEENPINASGVDAKAILSARLSKSRRLENLIAQLPGEKKNGLFGNLIALSLGLTPNFKSNFDLAEDAKLQLSKDTYDDDLDNLLAQIGDQYADLFLAAKNLSDAILLSDILRVNTEITKAPLSASMIKRYDEHHQDLTLLKALVRQQLPEKYKEIFFDQSKNGYAGYIDGGASQEEFYKFIKPILEKMDGTEELLVKLNREDLLRKQRTFDNGSIPHQIHLGELHAILRRQEDFYPFLKDNREKIEKILTFRIPYYVGPLARGNSRFAWMTRKSEETITPWNFEEVVDKGASAQSFIERMTNFDKNLPNEKVLPKHSLLYEYFTVYNELTKVKYVTEGMRKPAFLSGEQKKAIVDLLFKTNRKVTVKQLKEDYFKKIECFDSVEISGVEDRFNASLGTYHDLLKIIKDKDFLDNEENEDILEDIVLTLTLFEDREMIEERLKTYAHLFDDKVMKQLKRRRYTGWGRLSRKLINGIRDKQSGKTILDFLKSDGFANRNFMQLIHDDSLTFKEDIQKAQVSGQGDSLHEHIANLAGSPAIKKGILQTVKVVDELVKVMGRHKPENIVIEMARENQTTQKGQKNSRERMKRIEEGIKELGSQILKEHPVENTQLQNEKLYLYYLQNGRDMYVDQELDINRLSDYDVDHIVPQSFLKDDSIDNKVLTRSDKARGKSDNVPSEEVVKKMKNYWRQLLNAKLITQRKFDNLTKAERGGLSELDKAGFIKRQLVETRQITKHVAQILDSRMNTKYDENDKLIREVKVITLKSKLVSDFRKDFQFYKVREINNYHHAHDAYLNAVVGTALIKKYPKLESEFVYGDYKVYDVRKMIAKSEQEIGKATAKYFFYSNIMNFFKTEITLANGEIRKRPLIETNGETGEIVWDKGRDFATVRKVLSMPQVNIVKKTEVQTGGFSKESILPKRNSDKLIARKKDWDPKKYGGFDSPTVAYSVLVVAKVEKGKSKKLKSVKELLGITIMERSSFEKNPIDFLEAKGYKEVKKDLIIKLPKYSLFELENGRKRMLASAGELQKGNELALPSKYVNFLYLASHYEKLKGSPEDNEQKQLFVEQHKHYLDEIIEQISEFSKRVILADANLDKVLSAYNKHRDKPIREQAENIIHLFTLTNLGAPAAFKYFDTTIDRKRYTSTKEVLDATLIHQSITGLYETRIDLSQLGGDGGGSSGGSGGVLNLEEEYRLHEKPVPSSIDPSWLQLFPTVWAERAGMGLANQVPPVVVELRSGASPVAVRQYPMSKEAREGIRPHIQRFLDLGVLVPCQSPWNTPLLPVKKPGTNDYRPVQDLREINKRVQDIHPTVPNPYNLLSSLPPSHTWYSVLDLKDAFFCLKLHPNSQPLFAFEWRDPEKGNTGQLTWTRLPQGFKNSPTLFNEALHRDLAPFRALNPQVVLLQYVDDLLVAAPTYRDCKEGTQKLLQELSKLGYRVSAKKAQLCQKEVTYLGYLLKEGKRWLTPARKATVMKIPPPTTPRQVREFLGKAGFCRLFIPGFASLAAPLYPLTKPSIPFIWTEEHQKAFDRIKEALLSAPALALPDLTKPFTLYVDERAGVARGVLTQTLGPWRRPVAYLSKKLDPVASGWPTCLKAVAAVALLLKDADKLTLGQNVTVIASHSLESIVRQPPDRWMTNARMTHYQSLLLNERVSFAPPAVLNPATLLPVESEATPVHRCSEILAEETGTRRDLKDQPLPGVPAWYTDGSSFIAEGKRRAGAAIVDGKRTVWASSLPEGTSAQKAELVALTQALRLAEGKDINIYTDSRYAFATAHIHGAIYKQRGWLTSAGKDIKNKEEILALLEAIHLPKRVAIIHCPGHQKGNDPVATGNRRADEAAKQAALSTRVLAETTKPAGKRTADGSEFEKRTADGSEFESPKKKAKVE

SEQ ID NO: 951 - protein, 2131 aa, synthetic construct
MPAAKRVKLDGGDKKYSIGLDIGTNSVGWAVITDEYKVPSKKFKVLGNTDRHSIKKNLIGALLFDSGETAEATRLKRTARRRYTRRKNRICYLQEIFSNEMAKVDDSFFHRLEESFLVEEDKKHERHPIFGNIVDEVAYHEKYPTIYHLRKKLVDSTDKADLRLIYLALAHMIKFRGHFLIEGDLNPDNSDVDKLFIQLVQTYNQLFEENPINASGVDAKAILSARLSKSRRLENLIAQLPGEKKNGLFGNLIALSLGLTPNFKSNFDLAEDAKLQLSKDTYDDDLDNLLAQIGDQYADLFLAAKNLSDAILLSDILRVNTEITKAPLSASMIKRYDEHHQDLTLLKALVRQQLPEKYKEIFFDQSKNGYAGYIDGGASQEEFYKFIKPILEKMDGTEELLVKLNREDLLRKQRTFDNGSIPHQIHLGELHAILRRQEDFYPFLKDNREKIEKILTFRIPYYVGPLARGNSRFAWMTRKSEETITPWNFEEVVDKGASAQSFIERMTNFDKNLPNEKVLPKHSLLYEYFTVYNELTKVKYVTEGMRKPAFLSGEQKKAIVDLLFKTNRKVTVKQLKEDYFKKIECFDSVEISGVEDRFNASLGTYHDLLKIIKDKDFLDNEENEDILEDIVLTLTLFEDREMIEERLKTYAHLFDDKVMKQLKRRRYTGWGRLSRKLINGIRDKQSGKTILDFLKSDGFANRNFMQLIHDDSLTFKEDIQKAQVSGQGDSLHEHIANLAGSPAIKKGILQTVKVVDELVKVMGRHKPENIVIEMARENQTTQKGQKNSRERMKRIEEGIKELGSQILKEHPVENTQLQNEKLYLYYLQNGRDMYVDQELDINRLSDYDVDHIVPQSFLKDDSIDNKVLTRSDKARGKSDNVPSEEVVKKMKNYWRQLLNAKLITQRKFDNLTKAERGGLSELDKAGFIKRQLVETRQITKHVAQILDSRMNTKYDENDKLIREVKVITLKSKLVSDFRKDFQFYKVREINNYHHAHDAYLNAVVGTALIKKYPKLESEFVYGDYKVYDVRKMIAKSEQEIGKATAKYFFYSNIMNFFKTEITLANGEIRKRPLIETNGETGEIVWDKGRDFATVRKVLSMPQVNIVKKTEVQTGGFSKESILPKRNSDKLIARKKDWDPKKYGGFDSPTVAYSVLVVAKVEKGKSKKLKSVKELLGITIMERSSFEKNPIDFLEAKGYKEVKKDLIIKLPKYSLFELENGRKRMLASAGELQKGNELALPSKYVNFLYLASHYEKLKGSPEDNEQKQLFVEQHKHYLDEIIEQISEFSKRVILADANLDKVLSAYNKHRDKPIREQAENIIHLFTLTNLGAPAAFKYFDTTIDRKRYTSTKEVLDATLIHQSITGLYETRIDLSQLGGDGGAEAAAKEAAAKEAAAKEAAAKALEAEAAAKEAAAKEAAAKEAAAKAGGTLNIEDEYRLHETSKEPDVPLGSTWLSDFPQAWAETGGMGLAVRQAPLIIPLKATSTPVSIKQYPMSQEARLGIKPHIQRLLDQGILVPCQSPWNTPLLPVKKPGTNDYRPVQDLREVNKRVEDIHPTVPNPYNLLSGLPPSHQWYTVLDLKDAFFCLRLHPTSQPLFAFEWRDPEMGISGQLTWTRLPQGFKNSPTLFDEALHRDLADFRIQHPDLILLQYVDDLLLAATSEQDCQRGTRALLQTLGNLGYRASAKKAQICQKQVKYLGYLLKEGQRWLTEARKETVMGQPTPKTPRQLREFLGTAGFCRLWIPGFAEMAAPLYPLTKTGTLFNWGPDQQKAYQEIKQALLTAPALGLPDLTKPFELFVDEKQGYAKGVLTQKLGPWRRPVAYLSKKLDPVAAGWPPCLRMVAAIAVLTKDAGKLTMGQPLVILAPHAVEALVKQPPDRWLSNARMTHYQAMLLDTDRVQFGPVVALNPATLLPLPEKEAPHDCLEILAETHGTRPDLTDQPIPDADYTWYTDGSSFLQEGQRRAGAAVTTETEVIWARALPAGTSAQRAELIALTQALKMAEGKKLNVYTDSRYAFATAHVHGEIYRRRGLLTSEGREIKNKNEILALLKALFLPKRLSIIHCPGHQKGNSAEARGNRMADQAAREAAMKAVLETSTLLAGKRTADGSEFEKRTADGSEFESPKKKAKVE

SEQ ID NO: 952 - protein, 2118 aa, synthetic construct
MPAAKRVKLDGGDKKYSIGLDIGTNSVGWAVITDEYKVPSKKFKVLGNTDRHSIKKNLIGALLFDSGETAEATRLKRTARRRYTRRKNRICYLQEIFSNEMAKVDDSFFHRLEESFLVEEDKKHERHPIFGNIVDEVAYHEKYPTIYHLRKKLVDSTDKADLRLIYLALAHMIKFRGHFLIEGDLNPDNSDVDKLFIQLVQTYNQLFEENPINASGVDAKAILSARLSKSRRLENLIAQLPGEKKNGLFGNLIALSLGLTPNFKSNFDLAEDAKLQLSKDTYDDDLDNLLAQIGDQYADLFLAAKNLSDAILLSDILRVNTEITKAPLSASMIKRYDEHHQDLTLLKALVRQQLPEKYKEIFFDQSKNGYAGYIDGGASQEEFYKFIKPILEKMDGTEELLVKLNREDLLRKQRTFDNGSIPHQIHLGELHAILRRQEDFYPFLKDNREKIEKILTFRIPYYVGPLARGNSRFAWMTRKSEETITPWNFEEVVDKGASAQSFIERMTNFDKNLPNEKVLPKHSLLYEYFTVYNELTKVKYVTEGMRKPAFLSGEQKKAIVDLLFKTNRKVTVKQLKEDYFKKIECFDSVEISGVEDRFNASLGTYHDLLKIIKDKDFLDNEENEDILEDIVLTLTLFEDREMIEERLKTYAHLFDDKVMKQLKRRRYTGWGRLSRKLINGIRDKQSGKTILDFLKSDGFANRNFMQLIHDDSLTFKEDIQKAQVSGQGDSLHEHIANLAGSPAIKKGILQTVKVVDELVKVMGRHKPENIVIEMARENQTTQKGQKNSRERMKRIEEGIKELGSQILKEHPVENTQLQNEKLYLYYLQNGRDMYVDQELDINRLSDYDVDHIVPQSFLKDDSIDNKVLTRSDKARGKSDNVPSEEVVKKMKNYWRQLLNAKLITQRKFDNLTKAERGGLSELDKAGFIKRQLVETRQITKHVAQILDSRMNTKYDENDKLIREVKVITLKSKLVSDFRKDFQFYKVREINNYHHAHDAYLNAVVGTALIKKYPKLESEFVYGDYKVYDVRKMIAKSEQEIGKATAKYFFYSNIMNFFKTEITLANGEIRKRPLIETNGETGEIVWDKGRDFATVRKVLSMPQVNIVKKTEVQTGGFSKESILPKRNSDKLIARKKDWDPKKYGGFDSPTVAYSVLVVAKVEKGKSKKLKSVKELLGITIMERSSFEKNPIDFLEAKGYKEVKKDLIIKLPKYSLFELENGRKRMLASAGELQKGNELALPSKYVNFLYLASHYEKLKGSPEDNEQKQLFVEQHKHYLDEIIEQISEFSKRVILADANLDKVLSAYNKHRDKPIREQAENIIHLFTLTNLGAPAAFKYFDTTIDRKRYTSTKEVLDATLIHQSITGLYETRIDLSQLGGDGGSGGSSGGSSGSETPGTSESATPESSGGSSGGSSGGTLNIEDEYRLHETSKEPDVPLGSTWLSDFPQAWAETGGMGLAVRQAPLIIPLKATSTPVSIKQYPMSQEARLGIKPHIQRLLDQGILVPCQSPWNTPLLPVKKPGTNDYRPVQDLREVNKRVEDIHPTVPNPYNLLSGLPPSHQWYTVLDLKDAFFCLRLHPTSQPLFAFEWRDPEMGISGQLTWTRLPQGFKNSPTLFDEALHRDLADFRIQHPDLILLQYVDDLLLAATSEQDCQRGTRALLQTLGNLGYRASAKKAQICQKQVKYLGYLLKEGQRWLTEARKETVMGQPTPKTPRQLREFLGTAGFCRLWIPGFAEMAAPLYPLTKTGTLFNWGPDQQKAYQEIKQALLTAPALGLPDLTKPFELFVDEKQGYAKGVLTQKLGPWRRPVAYLSKKLDPVAAGWPPCLRMVAAIAVLTKDAGKLTMGQPLVILAPHAVEALVKQPPDRWLSNARMTHYQAMLLDTDRVQFGPVVALNPATLLPLPEKEAPHDCLEILAETHGTRPDLTDQPIPDADYTWYTDGSSFLQEGQRRAGAAVTTETEVIWARALPAGTSAQRAELIALTQALKMAEGKKLNVYTDSRYAFATAHVHGEIYRRRGLLTSEGREIKNKNEILALLKALFLPKRLSIIHCPGHQKGNSAEARGNRMADQAAREAAMKAVLETSTLLAGKRTADGSEFEKRTADGSEFESPKKKAKVE

SEQ ID NO: 953 - protein, 2105 aa, synthetic construct
MPAAKRVKLDGGDKKYSIGLDIGTNSVGWAVITDEYKVPSKKFKVLGNTDRHSIKKNLIGALLFDSGETAEATRLKRTARRRYTRRKNRICYLQEIFSNEMAKVDDSFFHRLEESFLVEEDKKHERHPIFGNIVDEVAYHEKYPTIYHLRKKLVDSTDKADLRLIYLALAHMIKFRGHFLIEGDLNPDNSDVDKLFIQLVQTYNQLFEENPINASGVDAKAILSARLSKSRRLENLIAQLPGEKKNGLFGNLIALSLGLTPNFKSNFDLAEDAKLQLSKDTYDDDLDNLLAQIGDQYADLFLAAKNLSDAILLSDILRVNTEITKAPLSASMIKRYDEHHQDLTLLKALVRQQLPEKYKEIFFDQSKNGYAGYIDGGASQEEFYKFIKPILEKMDGTEELLVKLNREDLLRKQRTFDNGSIPHQIHLGELHAILRRQEDFYPFLKDNREKIEKILTFRIPYYVGPLARGNSRFAWMTRKSEETITPWNFEEVVDKGASAQSFIERMTNFDKNLPNEKVLPKHSLLYEYFTVYNELTKVKYVTEGMRKPAFLSGEQKKAIVDLLFKTNRKVTVKQLKEDYFKKIECFDSVEISGVEDRFNASLGTYHDLLKIIKDKDFLDNEENEDILEDIVLTLTLFEDREMIEERLKTYAHLFDDKVMKQLKRRRYTGWGRLSRKLINGIRDKQSGKTILDFLKSDGFANRNFMQLIHDDSLTFKEDIQKAQVSGQGDSLHEHIANLAGSPAIKKGILQTVKVVDELVKVMGRHKPENIVIEMARENQTTQKGQKNSRERMKRIEEGIKELGSQILKEHPVENTQLQNEKLYLYYLQNGRDMYVDQELDINRLSDYDVDHIVPQSFLKDDSIDNKVLTRSDKARGKSDNVPSEEVVKKMKNYWRQLLNAKLITQRKFDNLTKAERGGLSELDKAGFIKRQLVETRQITKHVAQILDSRMNTKYDENDKLIREVKVITLKSKLVSDFRKDFQFYKVREINNYHHAHDAYLNAVVGTALIKKYPKLESEFVYGDYKVYDVRKMIAKSEQEIGKATAKYFFYSNIMNFFKTEITLANGEIRKRPLIETNGETGEIVWDKGRDFATVRKVLSMPQVNIVKKTEVQTGGFSKESILPKRNSDKLIARKKDWDPKKYGGFDSPTVAYSVLVVAKVEKGKSKKLKSVKELLGITIMERSSFEKNPIDFLEAKGYKEVKKDLIIKLPKYSLFELENGRKRMLASAGELQKGNELALPSKYVNFLYLASHYEKLKGSPEDNEQKQLFVEQHKHYLDEIIEQISEFSKRVILADANLDKVLSAYNKHRDKPIREQAENIIHLFTLTNLGAPAAFKYFDTTIDRKRYTSTKEVLDATLIHQSITGLYETRIDLSQLGGDGGGGGGSGGGGSGGGGSGGGGSGGTLNIEDEYRLHETSKEPDVPLGSTWLSDFPQAWAETGGMGLAVRQAPLIIPLKATSTPVSIKQYPMSQEARLGIKPHIQRLLDQGILVPCQSPWNTPLLPVKKPGTNDYRPVQDLREVNKRVEDIHPTVPNPYNLLSGLPPSHQWYTVLDLKDAFFCLRLHPTSQPLFAFEWRDPEMGISGQLTWTRLPQGFKNSPTLFDEALHRDLADFRIQHPDLILLQYVDDLLLAATSEQDCQRGTRALLQTLGNLGYRASAKKAQICQKQVKYLGYLLKEGQRWLTEARKETVMGQPTPKTPRQLREFLGTAGFCRLWIPGFAEMAAPLYPLTKTGTLFNWGPDQQKAYQEIKQALLTAPALGLPDLTKPFELFVDEKQGYAKGVLTQKLGPWRRPVAYLSKKLDPVAAGWPPCLRMVAAIAVLTKDAGKLTMGQPLVILAPHAVEALVKQPPDRWLSNARMTHYQAMLLDTDRVQFGPVVALNPATLLPLPEKEAPHDCLEILAETHGTRPDLTDQPIPDADYTWYTDGSSFLQEGQRRAGAAVTTETEVIWARALPAGTSAQRAELIALTQALKMAEGKKLNVYTDSRYAFATAHVHGEIYRRRGLLTSEGREIKNKNEILALLKALFLPKRLSIIHCPGHQKGNSAEARGNRMADQAAREAAMKAVLETSTLLAGKRTADGSEFEKRTADGSEFESPKKKAKVE

SEQ ID NO: 954 - protein, 2093 aa, synthetic construct
MPAAKRVKLDGGDKKYSIGLDIGTNSVGWAVITDEYKVPSKKFKVLGNTDRHSIKKNLIGALLFDSGETAEATRLKRTARRRYTRRKNRICYLQEIFSNEMAKVDDSFFHRLEESFLVEEDKKHERHPIFGNIVDEVAYHEKYPTIYHLRKKLVDSTDKADLRLIYLALAHMIKFRGHFLIEGDLNPDNSDVDKLFIQLVQTYNQLFEENPINASGVDAKAILSARLSKSRRLENLIAQLPGEKKNGLFGNLIALSLGLTPNFKSNFDLAEDAKLQLSKDTYDDDLDNLLAQIGDQYADLFLAAKNLSDAILLSDILRVNTEITKAPLSASMIKRYDEHHQDLTLLKALVRQQLPEKYKEIFFDQSKNGYAGYIDGGASQEEFYKFIKPILEKMDGTEELLVKLNREDLLRKQRTFDNGSIPHQIHLGELHAILRRQEDFYPFLKDNREKIEKILTFRIPYYVGPLARGNSRFAWMTRKSEETITPWNFEEVVDKGASAQSFIERMTNFDKNLPNEKVLPKHSLLYEYFTVYNELTKVKYVTEGMRKPAFLSGEQKKAIVDLLFKTNRKVTVKQLKEDYFKKIECFDSVEISGVEDRFNASLGTYHDLLKIIKDKDFLDNEENEDILEDIVLTLTLFEDREMIEERLKTYAHLFDDKVMKQLKRRRYTGWGRLSRKLINGIRDKQSGKTILDFLKSDGFANRNFMQLIHDDSLTFKEDIQKAQVSGQGDSLHEHIANLAGSPAIKKGILQTVKVVDELVKVMGRHKPENIVIEMARENQTTQKGQKNSRERMKRIEEGIKELGSQILKEHPVENTQLQNEKLYLYYLQNGRDMYVDQELDINRLSDYDVDHIVPQSFLKDDSIDNKVLTRSDKARGKSDNVPSEEVVKKMKNYWRQLLNAKLITQRKFDNLTKAERGGLSELDKAGFIKRQLVETRQITKHVAQILDSRMNTKYDENDKLIREVKVITLKSKLVSDFRKDFQFYKVREINNYHHAHDAYLNAVVGTALIKKYPKLESEFVYGDYKVYDVRKMIAKSEQEIGKATAKYFFYSNIMNFFKTEITLANGEIRKRPLIETNGETGEIVWDKGRDFATVRKVLSMPQVNIVKKTEVQTGGFSKESILPKRNSDKLIARKKDWDPKKYGGFDSPTVAYSVLVVAKVEKGKSKKLKSVKELLGITIMERSSFEKNPIDFLEAKGYKEVKKDLIIKLPKYSLFELENGRKRMLASAGELQKGNELALPSKYVNFLYLASHYEKLKGSPEDNEQKQLFVEQHKHYLDEIIEQISEFSKRVILADANLDKVLSAYNKHRDKPIREQAENIIHLFTLTNLGAPAAFKYFDTTIDRKRYTSTKEVLDATLIHQSITGLYETRIDLSQLGGDGGGSSEAAAKGGTLNIEDEYRLHETSKEPDVPLGSTWLSDFPQAWAETGGMGLAVRQAPLIIPLKATSTPVSIKQYPMSQEARLGIKPHIQRLLDQGILVPCQSPWNTPLLPVKKPGTNDYRPVQDLREVNKRVEDIHPTVPNPYNLLSGLPPSHQWYTVLDLKDAFFCLRLHPTSQPLFAFEWRDPEMGISGQLTWTRLPQGFKNSPTLFDEALHRDLADFRIQHPDLILLQYVDDLLLAATSEQDCQRGTRALLQTLGNLGYRASAKKAQICQKQVKYLGYLLKEGQRWLTEARKETVMGQPTPKTPRQLREFLGTAGFCRLWIPGFAEMAAPLYPLTKTGTLFNWGPDQQKAYQEIKQALLTAPALGLPDLTKPFELFVDEKQGYAKGVLTQKLGPWRRPVAYLSKKLDPVAAGWPPCLRMVAAIAVLTKDAGKLTMGQPLVILAPHAVEALVKQPPDRWLSNARMTHYQAMLLDTDRVQFGPVVALNPATLLPLPEKEAPHDCLEILAETHGTRPDLTDQPIPDADYTWYTDGSSFLQEGQRRAGAAVTTETEVIWARALPAGTSAQRAELIALTQALKMAEGKKLNVYTDSRYAFATAHVHGEIYRRRGLLTSEGREIKNKNEILALLKALFLPKRLSIIHCPGHQKGNSAEARGNRMADQAAREAAMKAVLETSTLLAGKRTADGSEFEKRTADGSEFESPKKKAKVE

SEQ ID NO: 955 - protein, 2096 aa, synthetic construct
MPAAKRVKLDGGDKKYSIGLDIGTNSVGWAVITDEYKVPSKKFKVLGNTDRHSIKKNLIGALLFDSGETAEATRLKRTARRRYTRRKNRICYLQEIFSNEMAKVDDSFFHRLEESFLVEEDKKHERHPIFGNIVDEVAYHEKYPTIYHLRKKLVDSTDKADLRLIYLALAHMIKFRGHFLIEGDLNPDNSDVDKLFIQLVQTYNQLFEENPINASGVDAKAILSARLSKSRRLENLIAQLPGEKKNGLFGNLIALSLGLTPNFKSNFDLAEDAKLQLSKDTYDDDLDNLLAQIGDQYADLFLAAKNLSDAILLSDILRVNTEITKAPLSASMIKRYDEHHQDLTLLKALVRQQLPEKYKEIFFDQSKNGYAGYIDGGASQEEFYKFIKPILEKMDGTEELLVKLNREDLLRKQRTFDNGSIPHQIHLGELHAILRRQEDFYPFLKDNREKIEKILTFRIPYYVGPLARGNSRFAWMTRKSEETITPWNFEEVVDKGASAQSFIERMTNFDKNLPNEKVLPKHSLLYEYFTVYNELTKVKYVTEGMRKPAFLSGEQKKAIVDLLFKTNRKVTVKQLKEDYFKKIECFDSVEISGVEDRFNASLGTYHDLLKIIKDKDFLDNEENEDILEDIVLTLTLFEDREMIEERLKTYAHLFDDKVMKQLKRRRYTGWGRLSRKLINGIRDKQSGKTILDFLKSDGFANRNFMQLIHDDSLTFKEDIQKAQVSGQGDSLHEHIANLAGSPAIKKGILQTVKVVDELVKVMGRHKPENIVIEMARENQTTQKGQKNSRERMKRIEEGIKELGSQILKEHPVENTQLQNEKLYLYYLQNGRDMYVDQELDINRLSDYDVDHIVPQSFLKDDSIDNKVLTRSDKARGKSDNVPSEEVVKKMKNYWRQLLNAKLITQRKFDNLTKAERGGLSELDKAGFIKRQLVETRQITKHVAQILDSRMNTKYDENDKLIREVKVITLKSKLVSDFRKDFQFYKVREINNYHHAHDAYLNAVVGTALIKKYPKLESEFVYGDYKVYDVRKMIAKSEQEIGKATAKYFFYSNIMNFFKTEITLANGEIRKRPLIETNGETGEIVWDKGRDFATVRKVLSMPQVNIVKKTEVQTGGFSKESILPKRNSDKLIARKKDWDPKKYGGFDSPTVAYSVLVVAKVEKGKSKKLKSVKELLGITIMERSSFEKNPIDFLEAKGYKEVKKDLIIKLPKYSLFELENGRKRMLASAGELQKGNELALPSKYVNFLYLASHYEKLKGSPEDNEQKQLFVEQHKHYLDEIIEQISEFSKRVILADANLDKVLSAYNKHRDKPIREQAENIIHLFTLTNLGAPAAFKYFDTTIDRKRYTSTKEVLDATLIHQSITGLYETRIDLSQLGGDGGEAAAKGGGGSSGGTLNIEDEYRLHETSKEPDVPLGSTWLSDFPQAWAETGGMGLAVRQAPLIIPLKATSTPVSIKQYPMSQEARLGIKPHIQRLLDQGILVPCQSPWNTPLLPVKKPGTNDYRPVQDLREVNKRVEDIHPTVPNPYNLLSGLPPSHQWYTVLDLKDAFFCLRLHPTSQPLFAFEWRDPEMGISGQLTWTRLPQGFKNSPTLFDEALHRDLADFRIQHPDLILLQYVDDLLLAATSEQDCQRGTRALLQTLGNLGYRASAKKAQICQKQVKYLGYLLKEGQRWLTEARKETVMGQPTPKTPRQLREFLGTAGFCRLWIPGFAEMAAPLYPLTKTGTLFNWGPDQQKAYQEIKQALLTAPALGLPDLTKPFELFVDEKQGYAKGVLTQKLGPWRRPVAYLSKKLDPVAAGWPPCLRMVAAIAVLTKDAGKLTMGQPLVILAPHAVEALVKQPPDRWLSNARMTHYQAMLLDTDRVQFGPVVALNPATLLPLPEKEAPHDCLEILAETHGTRPDLTDQPIPDADYTWYTDGSSFLQEGQRRAGAAVTTETEVIWARALPAGTSAQRAELIALTQALKMAEGKKLNVYTDSRYAFATAHVHGEIYRRRGLLTSEGREIKNKNEILALLKALFLPKRLSIIHCPGHQKGNSAEARGNRMADQAAREAAMKAVLETSTLLAGKRTADGSEFEKRTADGSEFESPKKKAKVE

SEQ ID NO: 956 - protein, 2092 aa, synthetic construct
MPAAKRVKLDGGDKKYSIGLDIGTNSVGWAVITDEYKVPSKKFKVLGNTDRHSIKKNLIGALLFDSGETAEATRLKRTARRRYTRRKNRICYLQEIFSNEMAKVDDSFFHRLEESFLVEEDKKHERHPIFGNIVDEVAYHEKYPTIYHLRKKLVDSTDKADLRLIYLALAHMIKFRGHFLIEGDLNPDNSDVDKLFIQLVQTYNQLFEENPINASGVDAKAILSARLSKSRRLENLIAQLPGEKKNGLFGNLIALSLGLTPNFKSNFDLAEDAKLQLSKDTYDDDLDNLLAQIGDQYADLFLAAKNLSDAILLSDILRVNTEITKAPLSASMIKRYDEHHQDLTLLKALVRQQLPEKYKEIFFDQSKNGYAGYIDGGASQEEFYKFIKPILEKMDGTEELLVKLNREDLLRKQRTFDNGSIPHQIHLGELHAILRRQEDFYPFLKDNREKIEKILTFRIPYYVGPLARGNSRFAWMTRKSEETITPWNFEEVVDKGASAQSFIERMTNFDKNLPNEKVLPKHSLLYEYFTVYNELTKVKYVTEGMRKPAFLSGEQKKAIVDLLFKTNRKVTVKQLKEDYFKKIECFDSVEISGVEDRFNASLGTYHDLLKIIKDKDFLDNEENEDILEDIVLTLTLFEDREMIEERLKTYAHLFDDKVMKQLKRRRYTGWGRLSRKLINGIRDKQSGKTILDFLKSDGFANRNFMQLIHDDSLTFKEDIQKAQVSGQGDSLHEHIANLAGSPAIKKGILQTVKVVDELVKVMGRHKPENIVIEMARENQTTQKGQKNSRERMKRIEEGIKELGSQILKEHPVENTQLQNEKLYLYYLQNGRDMYVDQELDINRLSDYDVDHIVPQSFLKDDSIDNKVLTRSDKARGKSDNVPSEEVVKKMKNYWRQLLNAKLITQRKFDNLTKAERGGLSELDKAGFIKRQLVETRQITKHVAQILDSRMNTKYDENDKLIREVKVITLKSKLVSDFRKDFQFYKVREINNYHHAHDAYLNAVVGTALIKKYPKLESEFVYGDYKVYDVRKMIAKSEQEIGKATAKYFFYSNIMNFFKTEITLANGEIRKRPLIETNGETGEIVWDKGRDFATVRKVLSMPQVNIVKKTEVQTGGFSKESILPKRNSDKLIARKKDWDPKKYGGFDSPTVAYSVLVVAKVEKGKSKKLKSVKELLGITIMERSSFEKNPIDFLEAKGYKEVKKDLIIKLPKYSLFELENGRKRMLASAGELQKGNELALPSKYVNFLYLASHYEKLKGSPEDNEQKQLFVEQHKHYLDEIIEQISEFSKRVILADANLDKVLSAYNKHRDKPIREQAENIIHLFTLTNLGAPAAFKYFDTTIDRKRYTSTKEVLDATLIHQSITGLYETRIDLSQLGGDGGGGGGGGGGGTLNIEDEYRLHETSKEPDVPLGSTWLSDFPQAWAETGGMGLAVRQAPLIIPLKATSTPVSIKQYPMSQEARLGIKPHIQRLLDQGILVPCQSPWNTPLLPVKKPGTNDYRPVQDLREVNKRVEDIHPTVPNPYNLLSGLPPSHQWYTVLDLKDAFFCLRLHPTSQPLFAFEWRDPEMGISGQLTWTRLPQGFKNSPTLFDEALHRDLADFRIQHPDLILLQYVDDLLLAATSEQDCQRGTRALLQTLGNLGYRASAKKAQICQKQVKYLGYLLKEGQRWLTEARKETVMGQPTPKTPRQLREFLGTAGFCRLWIPGFAEMAAPLYPLTKTGTLFNWGPDQQKAYQEIKQALLTAPALGLPDLTKPFELFVDEKQGYAKGVLTQKLGPWRRPVAYLSKKLDPVAAGWPPCLRMVAAIAVLTKDAGKLTMGQPLVILAPHAVEALVKQPPDRWLSNARMTHYQAMLLDTDRVQFGPVVALNPATLLPLPEKEAPHDCLEILAETHGTRPDLTDQPIPDADYTWYTDGSSFLQEGQRRAGAAVTTETEVIWARALPAGTSAQRAELIALTQALKMAEGKKLNVYTDSRYAFATAHVHGEIYRRRGLLTSEGREIKNKNEILALLKALFLPKRLSIIHCPGHQKGNSAEARGNRMADQAAREAAMKAVLETSTLLAGKRTADGSEFEKRTADGSEFESPKKKAKVE

SEQ ID NO: 957 - protein, 2094 aa, synthetic construct
MPAAKRVKLDGGDKKYSIGLDIGTNSVGWAVITDEYKVPSKKFKVLGNTDRHSIKKNLIGALLFDSGETAEATRLKRTARRRYTRRKNRICYLQEIFSNEMAKVDDSFFHRLEESFLVEEDKKHERHPIFGNIVDEVAYHEKYPTIYHLRKKLVDSTDKADLRLIYLALAHMIKFRGHFLIEGDLNPDNSDVDKLFIQLVQTYNQLFEENPINASGVDAKAILSARLSKSRRLENLIAQLPGEKKNGLFGNLIALSLGLTPNFKSNFDLAEDAKLQLSKDTYDDDLDNLLAQIGDQYADLFLAAKNLSDAILLSDILRVNTEITKAPLSASMIKRYDEHHQDLTLLKALVRQQLPEKYKEIFFDQSKNGYAGYIDGGASQEEFYKFIKPILEKMDGTEELLVKLNREDLLRKQRTFDNGSIPHQIHLGELHAILRRQEDFYPFLKDNREKIEKILTFRIPYYVGPLARGNSRFAWMTRKSEETITPWNFEEVVDKGASAQSFIERMTNFDKNLPNEKVLPKHSLLYEYFTVYNELTKVKYVTEGMRKPAFLSGEQKKAIVDLLFKTNRKVTVKQLKEDYFKKIECFDSVEISGVEDRFNASLGTYHDLLKIIKDKDFLDNEENEDILEDIVLTLTLFEDREMIEERLKTYAHLFDDKVMKQLKRRRYTGWGRLSRKLINGIRDKQSGKTILDFLKSDGFANRNFMQLIHDDSLTFKEDIQKAQVSGQGDSLHEHIANLAGSPAIKKGILQTVKVVDELVKVMGRHKPENIVIEMARENQTTQKGQKNSRERMKRIEEGIKELGSQILKEHPVENTQLQNEKLYLYYLQNGRDMYVDQELDINRLSDYDVDHIVPQSFLKDDSIDNKVLTRSDKARGKSDNVPSEEVVKKMKNYWRQLLNAKLITQRKFDNLTKAERGGLSELDKAGFIKRQLVETRQITKHVAQILDSRMNTKYDENDKLIREVKVITLKSKLVSDFRKDFQFYKVREINNYHHAHDAYLNAVVGTALIKKYPKLESEFVYGDYKVYDVRKMIAKSEQEIGKATAKYFFYSNIMNFFKTEITLANGEIRKRPLIETNGETGEIVWDKGRDFATVRKVLSMPQVNIVKKTEVQTGGFSKESILPKRNSDKLIARKKDWDPKKYGGFDSPTVAYSVLVVAKVEKGKSKKLKSVKELLGITIMERSSFEKNPIDFLEAKGYKEVKKDLIIKLPKYSLFELENGRKRMLASAGELQKGNELALPSKYVNFLYLASHYEKLKGSPEDNEQKQLFVEQHKHYLDEIIEQISEFSKRVILADANLDKVLSAYNKHRDKPIREQAENIIHLFTLTNLGAPAAFKYFDTTIDRKRYTSTKEVLDATLIHQSITGLYETRIDLSQLGGDGGGSSGGSGGGGGTLNIEDEYRLHETSKEPDVPLGSTWLSDFPQAWAETGGMGLAVRQAPLIIPLKATSTPVSIKQYPMSQEARLGIKPHIQRLLDQGILVPCQSPWNTPLLPVKKPGTNDYRPVQDLREVNKRVEDIHPTVPNPYNLLSGLPPSHQWYTVLDLKDAFFCLRLHPTSQPLFAFEWRDPEMGISGQLTWTRLPQGFKNSPTLFDEALHRDLADFRIQHPDLILLQYVDDLLLAATSEQDCQRGTRALLQTLGNLGYRASAKKAQICQKQVKYLGYLLKEGQRWLTEARKETVMGQPTPKTPRQLREFLGTAGFCRLWIPGFAEMAAPLYPLTKTGTLFNWGPDQQKAYQEIKQALLTAPALGLPDLTKPFELFVDEKQGYAKGVLTQKLGPWRRPVAYLSKKLDPVAAGWPPCLRMVAAIAVLTKDAGKLTMGQPLVILAPHAVEALVKQPPDRWLSNARMTHYQAMLLDTDRVQFGPVVALNPATLLPLPEKEAPHDCLEILAETHGTRPDLTDQPIPDADYTWYTDGSSFLQEGQRRAGAAVTTETEVIWARALPAGTSAQRAELIALTQALKMAEGKKLNVYTDSRYAFATAHVHGEIYRRRGLLTSEGREIKNKNEILALLKALFLPKRLSIIHCPGHQKGNSAEARGNRMADQAAREAAMKAVLETSTLLAGKRTADGSEFEKRTADGSEFESPKKKAKVE

SEQ ID NO: 958 - protein, 2103 aa, synthetic construct
MPAAKRVKLDGGDKKYSIGLDIGTNSVGWAVITDEYKVPSKKFKVLGNTDRHSIKKNLIGALLFDSGETAEATRLKRTARRRYTRRKNRICYLQEIFSNEMAKVDDSFFHRLEESFLVEEDKKHERHPIFGNIVDEVAYHEKYPTIYHLRKKLVDSTDKADLRLIYLALAHMIKFRGHFLIEGDLNPDNSDVDKLFIQLVQTYNQLFEENPINASGVDAKAILSARLSKSRRLENLIAQLPGEKKNGLFGNLIALSLGLTPNFKSNFDLAEDAKLQLSKDTYDDDLDNLLAQIGDQYADLFLAAKNLSDAILLSDILRVNTEITKAPLSASMIKRYDEHHQDLTLLKALVRQQLPEKYKEIFFDQSKNGYAGYIDGGASQEEFYKFIKPILEKMDGTEELLVKLNREDLLRKQRTFDNGSIPHQIHLGELHAILRRQEDFYPFLKDNREKIEKILTFRIPYYVGPLARGNSRFAWMTRKSEETITPWNFEEVVDKGASAQSFIERMTNFDKNLPNEKVLPKHSLLYEYFTVYNELTKVKYVTEGMRKPAFLSGEQKKAIVDLLFKTNRKVTVKQLKEDYFKKIECFDSVEISGVEDRFNASLGTYHDLLKIIKDKDFLDNEENEDILEDIVLTLTLFEDREMIEERLKTYAHLFDDKVMKQLKRRRYTGWGRLSRKLINGIRDKQSGKTILDFLKSDGFANRNFMQLIHDDSLTFKEDIQKAQVSGQGDSLHEHIANLAGSPAIKKGILQTVKVVDELVKVMGRHKPENIVIEMARENQTTQKGQKNSRERMKRIEEGIKELGSQILKEHPVENTQLQNEKLYLYYLQNGRDMYVDQELDINRLSDYDVDHIVPQSFLKDDSIDNKVLTRSDKARGKSDNVPSEEVVKKMKNYWRQLLNAKLITQRKFDNLTKAERGGLSELDKAGFIKRQLVETRQITKHVAQILDSRMNTKYDENDKLIREVKVITLKSKLVSDFRKDFQFYKVREINNYHHAHDAYLNAVVGTALIKKYPKLESEFVYGDYKVYDVRKMIAKSEQEIGKATAKYFFYSNIMNFFKTEITLANGEIRKRPLIETNGETGEIVWDKGRDFATVRKVLSMPQVNIVKKTEVQTGGFSKESILPKRNSDKLIARKKDWDPKKYGGFDSPTVAYSVLVVAKVEKGKSKKLKSVKELLGITIMERSSFEKNPIDFLEAKGYKEVKKDLIIKLPKYSLFELENGRKRMLASAGELQKGNELALPSKYVNFLYLASHYEKLKGSPEDNEQKQLFVEQHKHYLDEIIEQISEFSKRVILADANLDKVLSAYNKHRDKPIREQAENIIHLFTLTNLGAPAAFKYFDTTIDRKRYTSTKEVLDATLIHQSITGLYETRIDLSQLGGDGGGGSGGSGGSGGSGGSGGSGGTLNIEDEYRLHETSKEPDVPLGSTWLSDFPQAWAETGGMGLAVRQAPLIIPLKATSTPVSIKQYPMSQEARLGIKPHIQRLLDQGILVPCQSPWNTPLLPVKKPGTNDYRPVQDLREVNKRVEDIHPTVPNPYNLLSGLPPSHQWYTVLDLKDAFFCLRLHPTSQPLFAFEWRDPEMGISGQLTWTRLPQGFKNSPTLFNEALHRDLADFRIQHPDLILLQYVDDLLLAATSEQDCQRGTRALLQTLGNLGYRASAKKAQICQKQVKYLGYLLKEGQRWLTEARKETVMGQPTPKTPRQLREFLGTAGFCRLWIPGFAEMAAPLYPLTKPGTLFNWGPDQQKAYQEIKQALLTAPALGLPDLTKPFELFVDEKQGYAKGVLTQKLGPWRRPVAYLSKKLDPVAAGWPPCLRMVAAIAVLTKDAGKLTMGQPLVILAPHAVEALVKQPPDRWLSNARMTHYQAMLLDTDRVQFGPVVALNPATLLPLPEKEAPHDCLEILAETHGTRPDLTDQPIPDADYTWYTDGSSFLQEGQRRAGAAVTTETEVIWARALPAGTSAQRAELIALTQALKMAEGKKLNVYTDSRYAFATAHVHGEIYRRRGWLTSEGREIKNKNEILALLKALFLPKRLSIIHCPGHQKGNSAEARGNRMADQAAREAAMKAVLETSTLLAGKRTADGSEFEKRTADGSEFESPKKKAKVE

SEQ ID NO: 959 - protein, 2094 aa, synthetic construct
MPAAKRVKLDGGDKKYSIGLDIGTNSVGWAVITDEYKVPSKKFKVLGNTDRHSIKKNLIGALLFDSGETAEATRLKRTARRRYTRRKNRICYLQEIFSNEMAKVDDSFFHRLEESFLVEEDKKHERHPIFGNIVDEVAYHEKYPTIYHLRKKLVDSTDKADLRLIYLALAHMIKFRGHFLIEGDLNPDNSDVDKLFIQLVQTYNQLFEENPINASGVDAKAILSARLSKSRRLENLIAQLPGEKKNGLFGNLIALSLGLTPNFKSNFDLAEDAKLQLSKDTYDDDLDNLLAQIGDQYADLFLAAKNLSDAILLSDILRVNTEITKAPLSASMIKRYDEHHQDLTLLKALVRQQLPEKYKEIFFDQSKNGYAGYIDGGASQEEFYKFIKPILEKMDGTEELLVKLNREDLLRKQRTFDNGSIPHQIHLGELHAILRRQEDFYPFLKDNREKIEKILTFRIPYYVGPLARGNSRFAWMTRKSEETITPWNFEEVVDKGASAQSFIERMTNFDKNLPNEKVLPKHSLLYEYFTVYNELTKVKYVTEGMRKPAFLSGEQKKAIVDLLFKTNRKVTVKQLKEDYFKKIECFDSVEISGVEDRFNASLGTYHDLLKIIKDKDFLDNEENEDILEDIVLTLTLFEDREMIEERLKTYAHLFDDKVMKQLKRRRYTGWGRLSRKLINGIRDKQSGKTILDFLKSDGFANRNFMQLIHDDSLTFKEDIQKAQVSGQGDSLHEHIANLAGSPAIKKGILQTVKVVDELVKVMGRHKPENIVIEMARENQTTQKGQKNSRERMKRIEEGIKELGSQILKEHPVENTQLQNEKLYLYYLQNGRDMYVDQELDINRLSDYDVDHIVPQSFLKDDSIDNKVLTRSDKARGKSDNVPSEEVVKKMKNYWRQLLNAKLITQRKFDNLTKAERGGLSELDKAGFIKRQLVETRQITKHVAQILDSRMNTKYDENDKLIREVKVITLKSKLVSDFRKDFQFYKVREINNYHHAHDAYLNAVVGTALIKKYPKLESEFVYGDYKVYDVRKMIAKSEQEIGKATAKYFFYSNIMNFFKTEITLANGEIRKRPLIETNGETGEIVWDKGRDFATVRKVLSMPQVNIVKKTEVQTGGFSKESILPKRNSDKLIARKKDWDPKKYGGFDSPTVAYSVLVVAKVEKGKSKKLKSVKELLGITIMERSSFEKNPIDFLEAKGYKEVKKDLIIKLPKYSLFELENGRKRMLASAGELQKGNELALPSKYVNFLYLASHYEKLKGSPEDNEQKQLFVEQHKHYLDEIIEQISEFSKRVILADANLDKVLSAYNKHRDKPIREQAENIIHLFTLTNLGAPAAFKYFDTTIDRKRYTSTKEVLDATLIHQSITGLYETRIDLSQLGGDGGGSSGSSGSSGGTLNIEDEYRLHETSKEPDVPLGSTWLSDFPQAWAETGGMGLAVRQAPLIIPLKATSTPVSIKQYPMSQEARLGIKPHIQRLLDQGILVPCQSPWNTPLLPVKKPGTNDYRPVQDLREVNKRVEDIHPTVPNPYNLLSGLPPSHQWYTVLDLKDAFFCLRLHPTSQPLFAFEWRDPEMGISGQLTWTRLPQGFKNSPTLFNEALHRDLADFRIQHPDLILLQYVDDLLLAATSEQDCQRGTRALLQTLGNLGYRASAKKAQICQKQVKYLGYLLKEGQRWLTEARKETVMGQPTPKTPRQLREFLGTAGFCRLWIPGFAEMAAPLYPLTKPGTLFNWGPDQQKAYQEIKQALLTAPALGLPDLTKPFELFVDEKQGYAKGVLTQKLGPWRRPVAYLSKKLDPVAAGWPPCLRMVAAIAVLTKDAGKLTMGQPLVILAPHAVEALVKQPPDRWLSNARMTHYQAMLLDTDRVQFGPVVALNPATLLPLPEKEAPHDCLEILAETHGTRPDLTDQPIPDADYTWYTDGSSFLQEGQRRAGAAVTTETEVIWARALPAGTSAQRAELIALTQALKMAEGKKLNVYTDSRYAFATAHVHGEIYRRRGWLTSEGREIKNKNEILALLKALFLPKRLSIIHCPGHQKGNSAEARGNRMADQAAREAAMKAVLETSTLLAGKRTADGSEFEKRTADGSEFESPKKKAKVE

SEQ ID NO: 960 - protein, 2096 aa, synthetic construct
MPAAKRVKLDGGDKKYSIGLDIGTNSVGWAVITDEYKVPSKKFKVLGNTDRHSIKKNLIGALLFDSGETAEATRLKRTARRRYTRRKNRICYLQEIFSNEMAKVDDSFFHRLEESFLVEEDKKHERHPIFGNIVDEVAYHEKYPTIYHLRKKLVDSTDKADLRLIYLALAHMIKFRGHFLIEGDLNPDNSDVDKLFIQLVQTYNQLFEENPINASGVDAKAILSARLSKSRRLENLIAQLPGEKKNGLFGNLIALSLGLTPNFKSNFDLAEDAKLQLSKDTYDDDLDNLLAQIGDQYADLFLAAKNLSDAILLSDILRVNTEITKAPLSASMIKRYDEHHQDLTLLKALVRQQLPEKYKEIFFDQSKNGYAGYIDGGASQEEFYKFIKPILEKMDGTEELLVKLNREDLLRKQRTFDNGSIPHQIHLGELHAILRRQEDFYPFLKDNREKIEKILTFRIPYYVGPLARGNSRFAWMTRKSEETITPWNFEEVVDKGASAQSFIERMTNFDKNLPNEKVLPKHSLLYEYFTVYNELTKVKYVTEGMRKPAFLSGEQKKAIVDLLFKTNRKVTVKQLKEDYFKKIECFDSVEISGVEDRFNASLGTYHDLLKIIKDKDFLDNEENEDILEDIVLTLTLFEDREMIEERLKTYAHLFDDKVMKQLKRRRYTGWGRLSRKLINGIRDKQSGKTILDFLKSDGFANRNFMQLIHDDSLTFKEDIQKAQVSGQGDSLHEHIANLAGSPAIKKGILQTVKVVDELVKVMGRHKPENIVIEMARENQTTQKGQKNSRERMKRIEEGIKELGSQILKEHPVENTQLQNEKLYLYYLQNGRDMYVDQELDINRLSDYDVDHIVPQSFLKDDSIDNKVLTRSDKARGKSDNVPSEEVVKKMKNYWRQLLNAKLITQRKFDNLTKAERGGLSELDKAGFIKRQLVETRQITKHVAQILDSRMNTKYDENDKLIREVKVITLKSKLVSDFRKDFQFYKVREINNYHHAHDAYLNAVVGTALIKKYPKLESEFVYGDYKVYDVRKMIAKSEQEIGKATAKYFFYSNIMNFFKTEITLANGEIRKRPLIETNGETGEIVWDKGRDFATVRKVLSMPQVNIVKKTEVQTGGFSKESILPKRNSDKLIARKKDWDPKKYGGFDSPTVAYSVLVVAKVEKGKSKKLKSVKELLGITIMERSSFEKNPIDFLEAKGYKEVKKDLIIKLPKYSLFELENGRKRMLASAGELQKGNELALPSKYVNFLYLASHYEKLKGSPEDNEQKQLFVEQHKHYLDEIIEQISEFSKRVILADANLDKVLSAYNKHRDKPIREQAENIIHLFTLTNLGAPAAFKYFDTTIDRKRYTSTKEVLDATLIHQSITGLYETRIDLSQLGGDGGEAAAKGSSPAPGGTLNIEDEYRLHETSKEPDVPLGSTWLSDFPQAWAETGGMGLAVRQAPLIIPLKATSTPVSIKQYPMSQEARLGIKPHIQRLLDQGILVPCQSPWNTPLLPVKKPGTNDYRPVQDLREVNKRVEDIHPTVPNPYNLLSGLPPSHQWYTVLDLKDAFFCLRLHPTSQPLFAFEWRDPEMGISGQLTWTRLPQGFKNSPTLFNEALHRDLADFRIQHPDLILLQYVDDLLLAATSEQDCQRGTRALLQTLGNLGYRASAKKAQICQKQVKYLGYLLKEGQRWLTEARKETVMGQPTPKTPRQLREFLGTAGFCRLWIPGFAEMAAPLYPLTKPGTLFNWGPDQQKAYQEIKQALLTAPALGLPDLTKPFELFVDEKQGYAKGVLTQKLGPWRRPVAYLSKKLDPVAAGWPPCLRMVAAIAVLTKDAGKLTMGQPLVILAPHAVEALVKQPPDRWLSNARMTHYQAMLLDTDRVQFGPVVALNPATLLPLPEKEAPHDCLEILAETHGTRPDLTDQPIPDADYTWYTDGSSFLQEGQRRAGAAVTTETEVIWARALPAGTSAQRAELIALTQALKMAEGKKLNVYTDSRYAFATAHVHGEIYRRRGWLTSEGREIKNKNEILALLKALFLPKRLSIIHCPGHQKGNSAEARGNRMADQAAREAAMKAVLETSTLLAGKRTADGSEFEKRTADGSEFESPKKKAKVE

SEQ ID NO: 961 - protein, 2096 aa, synthetic construct
MPAAKRVKLDGGDKKYSIGLDIGTNSVGWAVITDEYKVPSKKFKVLGNTDRHSIKKNLIGALLFDSGETAEATRLKRTARRRYTRRKNRICYLQEIFSNEMAKVDDSFFHRLEESFLVEEDKKHERHPIFGNIVDEVAYHEKYPTIYHLRKKLVDSTDKADLRLIYLALAHMIKFRGHFLIEGDLNPDNSDVDKLFIQLVQTYNQLFEENPINASGVDAKAILSARLSKSRRLENLIAQLPGEKKNGLFGNLIALSLGLTPNFKSNFDLAEDAKLQLSKDTYDDDLDNLLAQIGDQYADLFLAAKNLSDAILLSDILRVNTEITKAPLSASMIKRYDEHHQDLTLLKALVRQQLPEKYKEIFFDQSKNGYAGYIDGGASQEEFYKFIKPILEKMDGTEELLVKLNREDLLRKQRTFDNGSIPHQIHLGELHAILRRQEDFYPFLKDNREKIEKILTFRIPYYVGPLARGNSRFAWMTRKSEETITPWNFEEVVDKGASAQSFIERMTNFDKNLPNEKVLPKHSLLYEYFTVYNELTKVKYVTEGMRKPAFLSGEQKKAIVDLLFKTNRKVTVKQLKEDYFKKIECFDSVEISGVEDRFNASLGTYHDLLKIIKDKDFLDNEENEDILEDIVLTLTLFEDREMIEERLKTYAHLFDDKVMKQLKRRRYTGWGRLSRKLINGIRDKQSGKTILDFLKSDGFANRNFMQLIHDDSLTFKEDIQKAQVSGQGDSLHEHIANLAGSPAIKKGILQTVKVVDELVKVMGRHKPENIVIEMARENQTTQKGQKNSRERMKRIEEGIKELGSQILKEHPVENTQLQNEKLYLYYLQNGRDMYVDQELDINRLSDYDVDHIVPQSFLKDDSIDNKVLTRSDKARGKSDNVPSEEVVKKMKNYWRQLLNAKLITQRKFDNLTKAERGGLSELDKAGFIKRQLVETRQITKHVAQILDSRMNTKYDENDKLIREVKVITLKSKLVSDFRKDFQFYKVREINNYHHAHDAYLNAVVGTALIKKYPKLESEFVYGDYKVYDVRKMIAKSEQEIGKATAKYFFYSNIMNFFKTEITLANGEIRKRPLIETNGETGEIVWDKGRDFATVRKVLSMPQVNIVKKTEVQTGGFSKESILPKRNSDKLIARKKDWDPKKYGGFDSPTVAYSVLVVAKVEKGKSKKLKSVKELLGITIMERSSFEKNPIDFLEAKGYKEVKKDLIIKLPKYSLFELENGRKRMLASAGELQKGNELALPSKYVNFLYLASHYEKLKGSPEDNEQKQLFVEQHKHYLDEIIEQISEFSKRVILADANLDKVLSAYNKHRDKPIREQAENIIHLFTLTNLGAPAAFKYFDTTIDRKRYTSTKEVLDATLIHQSITGLYETRIDLSQLGGDGGEAAAKPAPGGSGGTLNIEDEYRLHETSKEPDVPLGSTWLSDFPQAWAETGGMGLAVRQAPLIIPLKATSTPVSIKQYPMSQEARLGIKPHIQRLLDQGILVPCQSPWNTPLLPVKKPGTNDYRPVQDLREVNKRVEDIHPTVPNPYNLLSGLPPSHQWYTVLDLKDAFFCLRLHPTSQPLFAFEWRDPEMGISGQLTWTRLPQGFKNSPTLFNEALHRDLADFRIQHPDLILLQYVDDLLLAATSEQDCQRGTRALLQTLGNLGYRASAKKAQICQKQVKYLGYLLKEGQRWLTEARKETVMGQPTPKTPRQLREFLGTAGFCRLWIPGFAEMAAPLYPLTKPGTLFNWGPDQQKAYQEIKQALLTAPALGLPDLTKPFELFVDEKQGYAKGVLTQKLGPWRRPVAYLSKKLDPVAAGWPPCLRMVAAIAVLTKDAGKLTMGQPLVILAPHAVEALVKQPPDRWLSNARMTHYQAMLLDTDRVQFGPVVALNPATLLPLPEKEAPHDCLEILAETHGTRPDLTDQPIPDADYTWYTDGSSFLQEGQRRAGAAVTTETEVIWARALPAGTSAQRAELIALTQALKMAEGKKLNVYTDSRYAFATAHVHGEIYRRRGWLTSEGREIKNKNEILALLKALFLPKRLSIIHCPGHQKGNSAEARGNRMADQAAREAAMKAVLETSTLLAGKRTADGSEFEKRTADGSEFESPKKKAKVE

SEQ ID NO: 962 - protein, 2131 aa, synthetic construct
MPAAKRVKLDGGDKKYSIGLDIGTNSVGWAVITDEYKVPSKKFKVLGNTDRHSIKKNLIGALLFDSGETAEATRLKRTARRRYTRRKNRICYLQEIFSNEMAKVDDSFFHRLEESFLVEEDKKHERHPIFGNIVDEVAYHEKYPTIYHLRKKLVDSTDKADLRLIYLALAHMIKFRGHFLIEGDLNPDNSDVDKLFIQLVQTYNQLFEENPINASGVDAKAILSARLSKSRRLENLIAQLPGEKKNGLFGNLIALSLGLTPNFKSNFDLAEDAKLQLSKDTYDDDLDNLLAQIGDQYADLFLAAKNLSDAILLSDILRVNTEITKAPLSASMIKRYDEHHQDLTLLKALVRQQLPEKYKEIFFDQSKNGYAGYIDGGASQEEFYKFIKPILEKMDGTEELLVKLNREDLLRKQRTFDNGSIPHQIHLGELHAILRRQEDFYPFLKDNREKIEKILTFRIPYYVGPLARGNSRFAWMTRKSEETITPWNFEEVVDKGASAQSFIERMTNFDKNLPNEKVLPKHSLLYEYFTVYNELTKVKYVTEGMRKPAFLSGEQKKAIVDLLFKTNRKVTVKQLKEDYFKKIECFDSVEISGVEDRFNASLGTYHDLLKIIKDKDFLDNEENEDILEDIVLTLTLFEDREMIEERLKTYAHLFDDKVMKQLKRRRYTGWGRLSRKLINGIRDKQSGKTILDFLKSDGFANRNFMQLIHDDSLTFKEDIQKAQVSGQGDSLHEHIANLAGSPAIKKGILQTVKVVDELVKVMGRHKPENIVIEMARENQTTQKGQKNSRERMKRIEEGIKELGSQILKEHPVENTQLQNEKLYLYYLQNGRDMYVDQELDINRLSDYDVDHIVPQSFLKDDSIDNKVLTRSDKARGKSDNVPSEEVVKKMKNYWRQLLNAKLITQRKFDNLTKAERGGLSELDKAGFIKRQLVETRQITKHVAQILDSRMNTKYDENDKLIREVKVITLKSKLVSDFRKDFQFYKVREINNYHHAHDAYLNAVVGTALIKKYPKLESEFVYGDYKVYDVRKMIAKSEQEIGKATAKYFFYSNIMNFFKTEITLANGEIRKRPLIETNGETGEIVWDKGRDFATVRKVLSMPQVNIVKKTEVQTGGFSKESILPKRNSDKLIARKKDWDPKKYGGFDSPTVAYSVLVVAKVEKGKSKKLKSVKELLGITIMERSSFEKNPIDFLEAKGYKEVKKDLIIKLPKYSLFELENGRKRMLASAGELQKGNELALPSKYVNFLYLASHYEKLKGSPEDNEQKQLFVEQHKHYLDEIIEQISEFSKRVILADANLDKVLSAYNKHRDKPIREQAENIIHLFTLTNLGAPAAFKYFDTTIDRKRYTSTKEVLDATLIHQSITGLYETRIDLSQLGGDGGAEAAAKEAAAKEAAAKEAAAKALEAEAAAKEAAAKEAAAKEAAAKAGGTLNIEDEYRLHETSKEPDVPLGSTWLSDFPQAWAETGGMGLAVRQAPLIIPLKATSTPVSIKQYPMSQEARLGIKPHIQRLLDQGILVPCQSPWNTPLLPVKKPGTNDYRPVQDLREVNKRVEDIHPTVPNPYNLLSGLPPSHQWYTVLDLKDAFFCLRLHPTSQPLFAFEWRDPEMGISGQLTWTRLPQGFKNSPTLFNEALHRDLADFRIQHPDLILLQYVDDLLLAATSEQDCQRGTRALLQTLGNLGYRASAKKAQICQKQVKYLGYLLKEGQRWLTEARKETVMGQPTPKTPRQLREFLGTAGFCRLWIPGFAEMAAPLYPLTKPGTLFNWGPDQQKAYQEIKQALLTAPALGLPDLTKPFELFVDEKQGYAKGVLTQKLGPWRRPVAYLSKKLDPVAAGWPPCLRMVAAIAVLTKDAGKLTMGQPLVILAPHAVEALVKQPPDRWLSNARMTHYQAMLLDTDRVQFGPVVALNPATLLPLPEKEAPHDCLEILAETHGTRPDLTDQPIPDADYTWYTDGSSFLQEGQRRAGAAVTTETEVIWARALPAGTSAQRAELIALTQALKMAEGKKLNVYTDSRYAFATAHVHGEIYRRRGWLTSEGREIKNKNEILALLKALFLPKRLSIIHCPGHQKGNSAEARGNRMADQAAREAAMKAVLETSTLLAGKRTADGSEFEKRTADGSEFESPKKKAKVE

SEQ ID NO: 963 - protein, 2096 aa, synthetic construct
MPAAKRVKLDGGDKKYSIGLDIGTNSVGWAVITDEYKVPSKKFKVLGNTDRHSIKKNLIGALLFDSGETAEATRLKRTARRRYTRRKNRICYLQEIFSNEMAKVDDSFFHRLEESFLVEEDKKHERHPIFGNIVDEVAYHEKYPTIYHLRKKLVDSTDKADLRLIYLALAHMIKFRGHFLIEGDLNPDNSDVDKLFIQLVQTYNQLFEENPINASGVDAKAILSARLSKSRRLENLIAQLPGEKKNGLFGNLIALSLGLTPNFKSNFDLAEDAKLQLSKDTYDDDLDNLLAQIGDQYADLFLAAKNLSDAILLSDILRVNTEITKAPLSASMIKRYDEHHQDLTLLKALVRQQLPEKYKEIFFDQSKNGYAGYIDGGASQEEFYKFIKPILEKMDGTEELLVKLNREDLLRKQRTFDNGSIPHQIHLGELHAILRRQEDFYPFLKDNREKIEKILTFRIPYYVGPLARGNSRFAWMTRKSEETITPWNFEEVVDKGASAQSFIERMTNFDKNLPNEKVLPKHSLLYEYFTVYNELTKVKYVTEGMRKPAFLSGEQKKAIVDLLFKTNRKVTVKQLKEDYFKKIECFDSVEISGVEDRFNASLGTYHDLLKIIKDKDFLDNEENEDILEDIVLTLTLFEDREMIEERLKTYAHLFDDKVMKQLKRRRYTGWGRLSRKLINGIRDKQSGKTILDFLKSDGFANRNFMQLIHDDSLTFKEDIQKAQVSGQGDSLHEHIANLAGSPAIKKGILQTVKVVDELVKVMGRHKPENIVIEMARENQTTQKGQKNSRERMKRIEEGIKELGSQILKEHPVENTQLQNEKLYLYYLQNGRDMYVDQELDINRLSDYDVDHIVPQSFLKDDSIDNKVLTRSDKARGKSDNVPSEEVVKKMKNYWRQLLNAKLITQRKFDNLTKAERGGLSELDKAGFIKRQLVETRQITKHVAQILDSRMNTKYDENDKLIREVKVITLKSKLVSDFRKDFQFYKVREINNYHHAHDAYLNAVVGTALIKKYPKLESEFVYGDYKVYDVRKMIAKSEQEIGKATAKYFFYSNIMNFFKTEITLANGEIRKRPLIETNGETGEIVWDKGRDFATVRKVLSMPQVNIVKKTEVQTGGFSKESILPKRNSDKLIARKKDWDPKKYGGFDSPTVAYSVLVVAKVEKGKSKKLKSVKELLGITIMERSSFEKNPIDFLEAKGYKEVKKDLIIKLPKYSLFELENGRKRMLASAGELQKGNELALPSKYVNFLYLASHYEKLKGSPEDNEQKQLFVEQHKHYLDEIIEQISEFSKRVILADANLDKVLSAYNKHRDKPIREQAENIIHLFTLTNLGAPAAFKYFDTTIDRKRYTSTKEVLDATLIHQSITGLYETRIDLSQLGGDGGEAAAKGGGPAPGGTLNIEDEYRLHETSKEPDVPLGSTWLSDFPQAWAETGGMGLAVRQAPLIIPLKATSTPVSIKQYPMSQEARLGIKPHIQRLLDQGILVPCQSPWNTPLLPVKKPGTNDYRPVQDLREVNKRVEDIHPTVPNPYNLLSGLPPSHQWYTVLDLKDAFFCLRLHPTSQPLFAFEWRDPEMGISGQLTWTRLPQGFKNSPTLFNEALHRDLADFRIQHPDLILLQYVDDLLLAATSEQDCQRGTRALLQTLGNLGYRASAKKAQICQKQVKYLGYLLKEGQRWLTEARKETVMGQPTPKTPRQLREFLGTAGFCRLWIPGFAEMAAPLYPLTKPGTLFNWGPDQQKAYQEIKQALLTAPALGLPDLTKPFELFVDEKQGYAKGVLTQKLGPWRRPVAYLSKKLDPVAAGWPPCLRMVAAIAVLTKDAGKLTMGQPLVILAPHAVEALVKQPPDRWLSNARMTHYQAMLLDTDRVQFGPVVALNPATLLPLPEKEAPHDCLEILAETHGTRPDLTDQPIPDADYTWYTDGSSFLQEGQRRAGAAVTTETEVIWARALPAGTSAQRAELIALTQALKMAEGKKLNVYTDSRYAFATAHVHGEIYRRRGWLTSEGREIKNKNEILALLKALFLPKRLSIIHCPGHQKGNSAEARGNRMADQAAREAAMKAVLETSTLLAGKRTADGSEFEKRTADGSEFESPKKKAKVE

SEQ ID NO: 964 - protein, 2100 aa, synthetic construct
MPAAKRVKLDGGDKKYSIGLDIGTNSVGWAVITDEYKVPSKKFKVLGNTDRHSIKKNLIGALLFDSGETAEATRLKRTARRRYTRRKNRICYLQEIFSNEMAKVDDSFFHRLEESFLVEEDKKHERHPIFGNIVDEVAYHEKYPTIYHLRKKLVDSTDKADLRLIYLALAHMIKFRGHFLIEGDLNPDNSDVDKLFIQLVQTYNQLFEENPINASGVDAKAILSARLSKSRRLENLIAQLPGEKKNGLFGNLIALSLGLTPNFKSNFDLAEDAKLQLSKDTYDDDLDNLLAQIGDQYADLFLAAKNLSDAILLSDILRVNTEITKAPLSASMIKRYDEHHQDLTLLKALVRQQLPEKYKEIFFDQSKNGYAGYIDGGASQEEFYKFIKPILEKMDGTEELLVKLNREDLLRKQRTFDNGSIPHQIHLGELHAILRRQEDFYPFLKDNREKIEKILTFRIPYYVGPLARGNSRFAWMTRKSEETITPWNFEEVVDKGASAQSFIERMTNFDKNLPNEKVLPKHSLLYEYFTVYNELTKVKYVTEGMRKPAFLSGEQKKAIVDLLFKTNRKVTVKQLKEDYFKKIECFDSVEISGVEDRFNASLGTYHDLLKIIKDKDFLDNEENEDILEDIVLTLTLFEDREMIEERLKTYAHLFDDKVMKQLKRRRYTGWGRLSRKLINGIRDKQSGKTILDFLKSDGFANRNFMQLIHDDSLTFKEDIQKAQVSGQGDSLHEHIANLAGSPAIKKGILQTVKVVDELVKVMGRHKPENIVIEMARENQTTQKGQKNSRERMKRIEEGIKELGSQILKEHPVENTQLQNEKLYLYYLQNGRDMYVDQELDINRLSDYDVDHIVPQSFLKDDSIDNKVLTRSDKARGKSDNVPSEEVVKKMKNYWRQLLNAKLITQRKFDNLTKAERGGLSELDKAGFIKRQLVETRQITKHVAQILDSRMNTKYDENDKLIREVKVITLKSKLVSDFRKDFQFYKVREINNYHHAHDAYLNAVVGTALIKKYPKLESEFVYGDYKVYDVRKMIAKSEQEIGKATAKYFFYSNIMNFFKTEITLANGEIRKRPLIETNGETGEIVWDKGRDFATVRKVLSMPQVNIVKKTEVQTGGFSKESILPKRNSDKLIARKKDWDPKKYGGFDSPTVAYSVLVVAKVEKGKSKKLKSVKELLGITIMERSSFEKNPIDFLEAKGYKEVKKDLIIKLPKYSLFELENGRKRMLASAGELQKGNELALPSKYVNFLYLASHYEKLKGSPEDNEQKQLFVEQHKHYLDEIIEQISEFSKRVILADANLDKVLSAYNKHRDKPIREQAENIIHLFTLTNLGAPAAFKYFDTTIDRKRYTSTKEVLDATLIHQSITGLYETRIDLSQLGGDGGGSSGSSGSSGSSGSSGGTLNIEDEYRLHETSKEPDVPLGSTWLSDFPQAWAETGGMGLAVRQAPLIIPLKATSTPVSIKQYPMSQEARLGIKPHIQRLLDQGILVPCQSPWNTPLLPVKKPGTNDYRPVQDLREVNKRVEDIHPTVPNPYNLLSGLPPSHQWYTVLDLKDAFFCLRLHPTSQPLFAFEWRDPEMGISGQLTWTRLPQGFKNSPTLFNEALHRDLADFRIQHPDLILLQYVDDLLLAATSEQDCQRGTRALLQTLGNLGYRASAKKAQICQKQVKYLGYLLKEGQRWLTEARKETVMGQPTPKTPRQLREFLGTAGFCRLWIPGFAEMAAPLYPLTKPGTLFNWGPDQQKAYQEIKQALLTAPALGLPDLTKPFELFVDEKQGYAKGVLTQKLGPWRRPVAYLSKKLDPVAAGWPPCLRMVAAIAVLTKDAGKLTMGQPLVILAPHAVEALVKQPPDRWLSNARMTHYQAMLLDTDRVQFGPVVALNPATLLPLPEKEAPHDCLEILAETHGTRPDLTDQPIPDADYTWYTDGSSFLQEGQRRAGAAVTTETEVIWARALPAGTSAQRAELIALTQALKMAEGKKLNVYTDSRYAFATAHVHGEIYRRRGWLTSEGREIKNKNEILALLKALFLPKRLSIIHCPGHQKGNSAEARGNRMADQAAREAAMKAVLETSTLLAGKRTADGSEFEKRTADGSEFESPKKKAKVE

SEQ ID NO: 965 - protein, 2105 aa, synthetic construct
MPAAKRVKLDGGDKKYSIGLDIGTNSVGWAVITDEYKVPSKKFKVLGNTDRHSIKKNLIGALLFDSGETAEATRLKRTARRRYTRRKNRICYLQEIFSNEMAKVDDSFFHRLEESFLVEEDKKHERHPIFGNIVDEVAYHEKYPTIYHLRKKLVDSTDKADLRLIYLALAHMIKFRGHFLIEGDLNPDNSDVDKLFIQLVQTYNQLFEENPINASGVDAKAILSARLSKSRRLENLIAQLPGEKKNGLFGNLIALSLGLTPNFKSNFDLAEDAKLQLSKDTYDDDLDNLLAQIGDQYADLFLAAKNLSDAILLSDILRVNTEITKAPLSASMIKRYDEHHQDLTLLKALVRQQLPEKYKEIFFDQSKNGYAGYIDGGASQEEFYKFIKPILEKMDGTEELLVKLNREDLLRKQRTFDNGSIPHQIHLGELHAILRRQEDFYPFLKDNREKIEKILTFRIPYYVGPLARGNSRFAWMTRKSEETITPWNFEEVVDKGASAQSFIERMTNFDKNLPNEKVLPKHSLLYEYFTVYNELTKVKYVTEGMRKPAFLSGEQKKAIVDLLFKTNRKVTVKQLKEDYFKKIECFDSVEISGVEDRFNASLGTYHDLLKIIKDKDFLDNEENEDILEDIVLTLTLFEDREMIEERLKTYAHLFDDKVMKQLKRRRYTGWGRLSRKLINGIRDKQSGKTILDFLKSDGFANRNFMQLIHDDSLTFKEDIQKAQVSGQGDSLHEHIANLAGSPAIKKGILQTVKVVDELVKVMGRHKPENIVIEMARENQTTQKGQKNSRERMKRIEEGIKELGSQILKEHPVENTQLQNEKLYLYYLQNGRDMYVDQELDINRLSDYDVDHIVPQSFLKDDSIDNKVLTRSDKARGKSDNVPSEEVVKKMKNYWRQLLNAKLITQRKFDNLTKAERGGLSELDKAGFIKRQLVETRQITKHVAQILDSRMNTKYDENDKLIREVKVITLKSKLVSDFRKDFQFYKVREINNYHHAHDAYLNAVVGTALIKKYPKLESEFVYGDYKVYDVRKMIAKSEQEIGKATAKYFFYSNIMNFFKTEITLANGEIRKRPLIETNGETGEIVWDKGRDFATVRKVLSMPQVNIVKKTEVQTGGFSKESILPKRNSDKLIARKKDWDPKKYGGFDSPTVAYSVLVVAKVEKGKSKKLKSVKELLGITIMERSSFEKNPIDFLEAKGYKEVKKDLIIKLPKYSLFELENGRKRMLASAGELQKGNELALPSKYVNFLYLASHYEKLKGSPEDNEQKQLFVEQHKHYLDEIIEQISEFSKRVILADANLDKVLSAYNKHRDKPIREQAENIIHLFTLTNLGAPAAFKYFDTTIDRKRYTSTKEVLDATLIHQSITGLYETRIDLSQLGGDGGEAAAKEAAAKEAAAKEAAAKGGTLNIEDEYRLHETSKEPDVPLGSTWLSDFPQAWAETGGMGLAVRQAPLIIPLKATSTPVSIKQYPMSQEARLGIKPHIQRLLDQGILVPCQSPWNTPLLPVKKPGTNDYRPVQDLREVNKRVEDIHPTVPNPYNLLSGLPPSHQWYTVLDLKDAFFCLRLHPTSQPLFAFEWRDPEMGISGQLTWTRLPQGFKNSPTLFNEALHRDLADFRIQHPDLILLQYVDDLLLAATSEQDCQRGTRALLQTLGNLGYRASAKKAQICQKQVKYLGYLLKEGQRWLTEARKETVMGQPTPKTPRQLREFLGTAGFCRLWIPGFAEMAAPLYPLTKPGTLFNWGPDQQKAYQEIKQALLTAPALGLPDLTKPFELFVDEKQGYAKGVLTQKLGPWRRPVAYLSKKLDPVAAGWPPCLRMVAAIAVLTKDAGKLTMGQPLVILAPHAVEALVKQPPDRWLSNARMTHYQAMLLDTDRVQFGPVVALNPATLLPLPEKEAPHDCLEILAETHGTRPDLTDQPIPDADYTWYTDGSSFLQEGQRRAGAAVTTETEVIWARALPAGTSAQRAELIALTQALKMAEGKKLNVYTDSRYAFATAHVHGEIYRRRGWLTSEGREIKNKNEILALLKALFLPKRLSIIHCPGHQKGNSAEARGNRMADQAAREAAMKAVLETSTLLAGKRTADGSEFEKRTADGSEFESPKKKAKVE

SEQ ID NO: 966 - protein, 2093 aa, synthetic construct
MPAAKRVKLDGGDKKYSIGLDIGTNSVGWAVITDEYKVPSKKFKVLGNTDRHSIKKNLIGALLFDSGETAEATRLKRTARRRYTRRKNRICYLQEIFSNEMAKVDDSFFHRLEESFLVEEDKKHERHPIFGNIVDEVAYHEKYPTIYHLRKKLVDSTDKADLRLIYLALAHMIKFRGHFLIEGDLNPDNSDVDKLFIQLVQTYNQLFEENPINASGVDAKAILSARLSKSRRLENLIAQLPGEKKNGLFGNLIALSLGLTPNFKSNFDLAEDAKLQLSKDTYDDDLDNLLAQIGDQYADLFLAAKNLSDAILLSDILRVNTEITKAPLSASMIKRYDEHHQDLTLLKALVRQQLPEKYKEIFFDQSKNGYAGYIDGGASQEEFYKFIKPILEKMDGTEELLVKLNREDLLRKQRTFDNGSIPHQIHLGELHAILRRQEDFYPFLKDNREKIEKILTFRIPYYVGPLARGNSRFAWMTRKSEETITPWNFEEVVDKGASAQSFIERMTNFDKNLPNEKVLPKHSLLYEYFTVYNELTKVKYVTEGMRKPAFLSGEQKKAIVDLLFKTNRKVTVKQLKEDYFKKIECFDSVEISGVEDRFNASLGTYHDLLKIIKDKDFLDNEENEDILEDIVLTLTLFEDREMIEERLKTYAHLFDDKVMKQLKRRRYTGWGRLSRKLINGIRDKQSGKTILDFLKSDGFANRNFMQLIHDDSLTFKEDIQKAQVSGQGDSLHEHIANLAGSPAIKKGILQTVKVVDELVKVMGRHKPENIVIEMARENQTTQKGQKNSRERMKRIEEGIKELGSQILKEHPVENTQLQNEKLYLYYLQNGRDMYVDQELDINRLSDYDVDHIVPQSFLKDDSIDNKVLTRSDKARGKSDNVPSEEVVKKMKNYWRQLLNAKLITQRKFDNLTKAERGGLSELDKAGFIKRQLVETRQITKHVAQILDSRMNTKYDENDKLIREVKVITLKSKLVSDFRKDFQFYKVREINNYHHAHDAYLNAVVGTALIKKYPKLESEFVYGDYKVYDVRKMIAKSEQEIGKATAKYFFYSNIMNFFKTEITLANGEIRKRPLIETNGETGEIVWDKGRDFATVRKVLSMPQVNIVKKTEVQTGGFSKESILPKRNSDKLIARKKDWDPKKYGGFDSPTVAYSVLVVAKVEKGKSKKLKSVKELLGITIMERSSFEKNPIDFLEAKGYKEVKKDLIIKLPKYSLFELENGRKRMLASAGELQKGNELALPSKYVNFLYLASHYEKLKGSPEDNEQKQLFVEQHKHYLDEIIEQISEFSKRVILADANLDKVLSAYNKHRDKPIREQAENIIHLFTLTNLGAPAAFKYFDTTIDRKRYTSTKEVLDATLIHQSITGLYETRIDLSQLGGDGGGSSEAAAKGGTLNIEDEYRLHETSKEPDVPLGSTWLSDFPQAWAETGGMGLAVRQAPLIIPLKATSTPVSIKQYPMSQEARLGIKPHIQRLLDQGILVPCQSPWNTPLLPVKKPGTNDYRPVQDLREVNKRVEDIHPTVPNPYNLLSGLPPSHQWYTVLDLKDAFFCLRLHPTSQPLFAFEWRDPEMGISGQLTWTRLPQGFKNSPTLFNEALHRDLADFRIQHPDLILLQYVDDLLLAATSEQDCQRGTRALLQTLGNLGYRASAKKAQICQKQVKYLGYLLKEGQRWLTEARKETVMGQPTPKTPRQLREFLGTAGFCRLWIPGFAEMAAPLYPLTKPGTLFNWGPDQQKAYQEIKQALLTAPALGLPDLTKPFELFVDEKQGYAKGVLTQKLGPWRRPVAYLSKKLDPVAAGWPPCLRMVAAIAVLTKDAGKLTMGQPLVILAPHAVEALVKQPPDRWLSNARMTHYQAMLLDTDRVQFGPVVALNPATLLPLPEKEAPHDCLEILAETHGTRPDLTDQPIPDADYTWYTDGSSFLQEGQRRAGAAVTTETEVIWARALPAGTSAQRAELIALTQALKMAEGKKLNVYTDSRYAFATAHVHGEIYRRRGWLTSEGREIKNKNEILALLKALFLPKRLSIIHCPGHQKGNSAEARGNRMADQAAREAAMKAVLETSTLLAGKRTADGSEFEKRTADGSEFESPKKKAKVE

SEQ ID NO: 967 - protein, 2096 aa, synthetic construct
MPAAKRVKLDGGDKKYSIGLDIGTNSVGWAVITDEYKVPSKKFKVLGNTDRHSIKKNLIGALLFDSGETAEATRLKRTARRRYTRRKNRICYLQEIFSNEMAKVDDSFFHRLEESFLVEEDKKHERHPIFGNIVDEVAYHEKYPTIYHLRKKLVDSTDKADLRLIYLALAHMIKFRGHFLIEGDLNPDNSDVDKLFIQLVQTYNQLFEENPINASGVDAKAILSARLSKSRRLENLIAQLPGEKKNGLFGNLIALSLGLTPNFKSNFDLAEDAKLQLSKDTYDDDLDNLLAQIGDQYADLFLAAKNLSDAILLSDILRVNTEITKAPLSASMIKRYDEHHQDLTLLKALVRQQLPEKYKEIFFDQSKNGYAGYIDGGASQEEFYKFIKPILEKMDGTEELLVKLNREDLLRKQRTFDNGSIPHQIHLGELHAILRRQEDFYPFLKDNREKIEKILTFRIPYYVGPLARGNSRFAWMTRKSEETITPWNFEEVVDKGASAQSFIERMTNFDKNLPNEKVLPKHSLLYEYFTVYNELTKVKYVTEGMRKPAFLSGEQKKAIVDLLFKTNRKVTVKQLKEDYFKKIECFDSVEISGVEDRFNASLGTYHDLLKIIKDKDFLDNEENEDILEDIVLTLTLFEDREMIEERLKTYAHLFDDKVMKQLKRRRYTGWGRLSRKLINGIRDKQSGKTILDFLKSDGFANRNFMQLIHDDSLTFKEDIQKAQVSGQGDSLHEHIANLAGSPAIKKGILQTVKVVDELVKVMGRHKPENIVIEMARENQTTQKGQKNSRERMKRIEEGIKELGSQILKEHPVENTQLQNEKLYLYYLQNGRDMYVDQELDINRLSDYDVDHIVPQSFLKDDSIDNKVLTRSDKARGKSDNVPSEEVVKKMKNYWRQLLNAKLITQRKFDNLTKAERGGLSELDKAGFIKRQLVETRQITKHVAQILDSRMNTKYDENDKLIREVKVITLKSKLVSDFRKDFQFYKVREINNYHHAHDAYLNAVVGTALIKKYPKLESEFVYGDYKVYDVRKMIAKSEQEIGKATAKYFFYSNIMNFFKTEITLANGEIRKRPLIETNGETGEIVWDKGRDFATVRKVLSMPQVNIVKKTEVQTGGFSKESILPKRNSDKLIARKKDWDPKKYGGFDSPTVAYSVLVVAKVEKGKSKKLKSVKELLGITIMERSSFEKNPIDFLEAKGYKEVKKDLIIKLPKYSLFELENGRKRMLASAGELQKGNELALPSKYVNFLYLASHYEKLKGSPEDNEQKQLFVEQHKHYLDEIIEQISEFSKRVILADANLDKVLSAYNKHRDKPIREQAENIIHLFTLTNLGAPAAFKYFDTTIDRKRYTSTKEVLDATLIHQSITGLYETRIDLSQLGGDGGPAPGSSEAAAKGGTLNIEDEYRLHETSKEPDVPLGSTWLSDFPQAWAETGGMGLAVRQAPLIIPLKATSTPVSIKQYPMSQEARLGIKPHIQRLLDQGILVPCQSPWNTPLLPVKKPGTNDYRPVQDLREVNKRVEDIHPTVPNPYNLLSGLPPSHQWYTVLDLKDAFFCLRLHPTSQPLFAFEWRDPEMGISGQLTWTRLPQGFKNSPTLFNEALHRDLADFRIQHPDLILLQYVDDLLLAATSEQDCQRGTRALLQTLGNLGYRASAKKAQICQKQVKYLGYLLKEGQRWLTEARKETVMGQPTPKTPRQLREFLGTAGFCRLWIPGFAEMAAPLYPLTKPGTLFNWGPDQQKAYQEIKQALLTAPALGLPDLTKPFELFVDEKQGYAKGVLTQKLGPWRRPVAYLSKKLDPVAAGWPPCLRMVAAIAVLTKDAGKLTMGQPLVILAPHAVEALVKQPPDRWLSNARMTHYQAMLLDTDRVQFGPVVALNPATLLPLPEKEAPHDCLEILAETHGTRPDLTDQPIPDADYTWYTDGSSFLQEGQRRAGAAVTTETEVIWARALPAGTSAQRAELIALTQALKMAEGKKLNVYTDSRYAFATAHVHGEIYRRRGWLTSEGREIKNKNEILALLKALFLPKRLSIIHCPGHQKGNSAEARGNRMADQAAREAAMKAVLETSTLLAGKRTADGSEFEKRTADGSEFESPKKKAKVE

SEQ ID NO: 968 - protein, 2096 aa, synthetic construct
MPAAKRVKLDGGDKKYSIGLDIGTNSVGWAVITDEYKVPSKKFKVLGNTDRHSIKKNLIGALLFDSGETAEATRLKRTARRRYTRRKNRICYLQEIFSNEMAKVDDSFFHRLEESFLVEEDKKHERHPIFGNIVDEVAYHEKYPTIYHLRKKLVDSTDKADLRLIYLALAHMIKFRGHFLIEGDLNPDNSDVDKLFIQLVQTYNQLFEENPINASGVDAKAILSARLSKSRRLENLIAQLPGEKKNGLFGNLIALSLGLTPNFKSNFDLAEDAKLQLSKDTYDDDLDNLLAQIGDQYADLFLAAKNLSDAILLSDILRVNTEITKAPLSASMIKRYDEHHQDLTLLKALVRQQLPEKYKEIFFDQSKNGYAGYIDGGASQEEFYKFIKPILEKMDGTEELLVKLNREDLLRKQRTFDNGSIPHQIHLGELHAILRRQEDFYPFLKDNREKIEKILTFRIPYYVGPLARGNSRFAWMTRKSEETITPWNFEEVVDKGASAQSFIERMTNFDKNLPNEKVLPKHSLLYEYFTVYNELTKVKYVTEGMRKPAFLSGEQKKAIVDLLFKTNRKVTVKQLKEDYFKKIECFDSVEISGVEDRFNASLGTYHDLLKIIKDKDFLDNEENEDILEDIVLTLTLFEDREMIEERLKTYAHLFDDKVMKQLKRRRYTGWGRLSRKLINGIRDKQSGKTILDFLKSDGFANRNFMQLIHDDSLTFKEDIQKAQVSGQGDSLHEHIANLAGSPAIKKGILQTVKVVDELVKVMGRHKPENIVIEMARENQTTQKGQKNSRERMKRIEEGIKELGSQILKEHPVENTQLQNEKLYLYYLQNGRDMYVDQELDINRLSDYDVDHIVPQSFLKDDSIDNKVLTRSDKARGKSDNVPSEEVVKKMKNYWRQLLNAKLITQRKFDNLTKAERGGLSELDKAGFIKRQLVETRQITKHVAQILDSRMNTKYDENDKLIREVKVITLKSKLVSDFRKDFQFYKVREINNYHHAHDAYLNAVVGTALIKKYPKLESEFVYGDYKVYDVRKMIAKSEQEIGKATAKYFFYSNIMNFFKTEITLANGEIRKRPLIETNGETGEIVWDKGRDFATVRKVLSMPQVNIVKKTEVQTGGFSKESILPKRNSDKLIARKKDWDPKKYGGFDSPTVAYSVLVVAKVEKGKSKKLKSVKELLGITIMERSSFEKNPIDFLEAKGYKEVKKDLIIKLPKYSLFELENGRKRMLASAGELQKGNELALPSKYVNFLYLASHYEKLKGSPEDNEQKQLFVEQHKHYLDEIIEQISEFSKRVILADANLDKVLSAYNKHRDKPIREQAENIIHLFTLTNLGAPAAFKYFDTTIDRKRYTSTKEVLDATLIHQSITGLYETRIDLSQLGGDGGGGSPAPEAAAKGGTLNIEDEYRLHETSKEPDVPLGSTWLSDFPQAWAETGGMGLAVRQAPLIIPLKATSTPVSIKQYPMSQEARLGIKPHIQRLLDQGILVPCQSPWNTPLLPVKKPGTNDYRPVQDLREVNKRVEDIHPTVPNPYNLLSGLPPSHQWYTVLDLKDAFFCLRLHPTSQPLFAFEWRDPEMGISGQLTWTRLPQGFKNSPTLFNEALHRDLADFRIQHPDLILLQYVDDLLLAATSEQDCQRGTRALLQTLGNLGYRASAKKAQICQKQVKYLGYLLKEGQRWLTEARKETVMGQPTPKTPRQLREFLGTAGFCRLWIPGFAEMAAPLYPLTKPGTLFNWGPDQQKAYQEIKQALLTAPALGLPDLTKPFELFVDEKQGYAKGVLTQKLGPWRRPVAYLSKKLDPVAAGWPPCLRMVAAIAVLTKDAGKLTMGQPLVILAPHAVEALVKQPPDRWLSNARMTHYQAMLLDTDRVQFGPVVALNPATLLPLPEKEAPHDCLEILAETHGTRPDLTDQPIPDADYTWYTDGSSFLQEGQRRAGAAVTTETEVIWARALPAGTSAQRAELIALTQALKMAEGKKLNVYTDSRYAFATAHVHGEIYRRRGWLTSEGREIKNKNEILALLKALFLPKRLSIIHCPGHQKGNSAEARGNRMADQAAREAAMKAVLETSTLLAGKRTADGSEFEKRTADGSEFESPKKKAKVE

SEQ ID NO: 969 - protein, 2094 aa, synthetic construct
MPAAKRVKLDGGDKKYSIGLDIGTNSVGWAVITDEYKVPSKKFKVLGNTDRHSIKKNLIGALLFDSGETAEATRLKRTARRRYTRRKNRICYLQEIFSNEMAKVDDSFFHRLEESFLVEEDKKHERHPIFGNIVDEVAYHEKYPTIYHLRKKLVDSTDKADLRLIYLALAHMIKFRGHFLIEGDLNPDNSDVDKLFIQLVQTYNQLFEENPINASGVDAKAILSARLSKSRRLENLIAQLPGEKKNGLFGNLIALSLGLTPNFKSNFDLAEDAKLQLSKDTYDDDLDNLLAQIGDQYADLFLAAKNLSDAILLSDILRVNTEITKAPLSASMIKRYDEHHQDLTLLKALVRQQLPEKYKEIFFDQSKNGYAGYIDGGASQEEFYKFIKPILEKMDGTEELLVKLNREDLLRKQRTFDNGSIPHQIHLGELHAILRRQEDFYPFLKDNREKIEKILTFRIPYYVGPLARGNSRFAWMTRKSEETITPWNFEEVVDKGASAQSFIERMTNFDKNLPNEKVLPKHSLLYEYFTVYNELTKVKYVTEGMRKPAFLSGEQKKAIVDLLFKTNRKVTVKQLKEDYFKKIECFDSVEISGVEDRFNASLGTYHDLLKIIKDKDFLDNEENEDILEDIVLTLTLFEDREMIEERLKTYAHLFDDKVMKQLKRRRYTGWGRLSRKLINGIRDKQSGKTILDFLKSDGFANRNFMQLIHDDSLTFKEDIQKAQVSGQGDSLHEHIANLAGSPAIKKGILQTVKVVDELVKVMGRHKPENIVIEMARENQTTQKGQKNSRERMKRIEEGIKELGSQILKEHPVENTQLQNEKLYLYYLQNGRDMYVDQELDINRLSDYDVDHIVPQSFLKDDSIDNKVLTRSDKARGKSDNVPSEEVVKKMKNYWRQLLNAKLITQRKFDNLTKAERGGLSELDKAGFIKRQLVETRQITKHVAQILDSRMNTKYDENDKLIREVKVITLKSKLVSDFRKDFQFYKVREINNYHHAHDAYLNAVVGTALIKKYPKLESEFVYGDYKVYDVRKMIAKSEQEIGKATAKYFFYSNIMNFFKTEITLANGEIRKRPLIETNGETGEIVWDKGRDFATVRKVLSMPQVNIVKKTEVQTGGFSKESILPKRNSDKLIARKKDWDPKKYGGFDSPTVAYSVLVVAKVEKGKSKKLKSVKELLGITIMERSSFEKNPIDFLEAKGYKEVKKDLIIKLPKYSLFELENGRKRMLASAGELQKGNELALPSKYVNFLYLASHYEKLKGSPEDNEQKQLFVEQHKHYLDEIIEQISEFSKRVILADANLDKVLSAYNKHRDKPIREQAENIIHLFTLTNLGAPAAFKYFDTTIDRKRYTSTKEVLDATLIHQSITGLYETRIDLSQLGGDGGGGGGSSPAPGGTLNIEDEYRLHETSKEPDVPLGSTWLSDFPQAWAETGGMGLAVRQAPLIIPLKATSTPVSIKQYPMSQEARLGIKPHIQRLLDQGILVPCQSPWNTPLLPVKKPGTNDYRPVQDLREVNKRVEDIHPTVPNPYNLLSGLPPSHQWYTVLDLKDAFFCLRLHPTSQPLFAFEWRDPEMGISGQLTWTRLPQGFKNSPTLFNEALHRDLADFRIQHPDLILLQYVDDLLLAATSEQDCQRGTRALLQTLGNLGYRASAKKAQICQKQVKYLGYLLKEGQRWLTEARKETVMGQPTPKTPRQLREFLGTAGFCRLWIPGFAEMAAPLYPLTKPGTLFNWGPDQQKAYQEIKQALLTAPALGLPDLTKPFELFVDEKQGYAKGVLTQKLGPWRRPVAYLSKKLDPVAAGWPPCLRMVAAIAVLTKDAGKLTMGQPLVILAPHAVEALVKQPPDRWLSNARMTHYQAMLLDTDRVQFGPVVALNPATLLPLPEKEAPHDCLEILAETHGTRPDLTDQPIPDADYTWYTDGSSFLQEGQRRAGAAVTTETEVIWARALPAGTSAQRAELIALTQALKMAEGKKLNVYTDSRYAFATAHVHGEIYRRRGWLTSEGREIKNKNEILALLKALFLPKRLSIIHCPGHQKGNSAEARGNRMADQAAREAAMKAVLETSTLLAGKRTADGSEFEKRTADGSEFESPKKKAKVE

SEQ ID NO: 970 - protein, 2094 aa, synthetic construct
MPAAKRVKLDGGDKKYSIGLDIGTNSVGWAVITDEYKVPSKKFKVLGNTDRHSIKKNLIGALLFDSGETAEATRLKRTARRRYTRRKNRICYLQEIFSNEMAKVDDSFFHRLEESFLVEEDKKHERHPIFGNIVDEVAYHEKYPTIYHLRKKLVDSTDKADLRLIYLALAHMIKFRGHFLIEGDLNPDNSDVDKLFIQLVQTYNQLFEENPINASGVDAKAILSARLSKSRRLENLIAQLPGEKKNGLFGNLIALSLGLTPNFKSNFDLAEDAKLQLSKDTYDDDLDNLLAQIGDQYADLFLAAKNLSDAILLSDILRVNTEITKAPLSASMIKRYDEHHQDLTLLKALVRQQLPEKYKEIFFDQSKNGYAGYIDGGASQEEFYKFIKPILEKMDGTEELLVKLNREDLLRKQRTFDNGSIPHQIHLGELHAILRRQEDFYPFLKDNREKIEKILTFRIPYYVGPLARGNSRFAWMTRKSEETITPWNFEEVVDKGASAQSFIERMTNFDKNLPNEKVLPKHSLLYEYFTVYNELTKVKYVTEGMRKPAFLSGEQKKAIVDLLFKTNRKVTVKQLKEDYFKKIECFDSVEISGVEDRFNASLGTYHDLLKIIKDKDFLDNEENEDILEDIVLTLTLFEDREMIEERLKTYAHLFDDKVMKQLKRRRYTGWGRLSRKLINGIRDKQSGKTILDFLKSDGFANRNFMQLIHDDSLTFKEDIQKAQVSGQGDSLHEHIANLAGSPAIKKGILQTVKVVDELVKVMGRHKPENIVIEMARENQTTQKGQKNSRERMKRIEEGIKELGSQILKEHPVENTQLQNEKLYLYYLQNGRDMYVDQELDINRLSDYDVDHIVPQSFLKDDSIDNKVLTRSDKARGKSDNVPSEEVVKKMKNYWRQLLNAKLITQRKFDNLTKAERGGLSELDKAGFIKRQLVETRQITKHVAQILDSRMNTKYDENDKLIREVKVITLKSKLVSDFRKDFQFYKVREINNYHHAHDAYLNAVVGTALIKKYPKLESEFVYGDYKVYDVRKMIAKSEQEIGKATAKYFFYSNIMNFFKTEITLANGEIRKRPLIETNGETGEIVWDKGRDFATVRKVLSMPQVNIVKKTEVQTGGFSKESILPKRNSDKLIARKKDWDPKKYGGFDSPTVAYSVLVVAKVEKGKSKKLKSVKELLGITIMERSSFEKNPIDFLEAKGYKEVKKDLIIKLPKYSLFELENGRKRMLASAGELQKGNELALPSKYVNFLYLASHYEKLKGSPEDNEQKQLFVEQHKHYLDEIIEQISEFSKRVILADANLDKVLSAYNKHRDKPIREQAENIIHLFTLTNLGAPAAFKYFDTTIDRKRYTSTKEVLDATLIHQSITGLYETRIDLSQLGGDGGPAPGSSGGSGGTLNIEDEYRLHETSKEPDVPLGSTWLSDFPQAWAETGGMGLAVRQAPLIIPLKATSTPVSIKQYPMSQEARLGIKPHIQRLLDQGILVPCQSPWNTPLLPVKKPGTNDYRPVQDLREVNKRVEDIHPTVPNPYNLLSGLPPSHQWYTVLDLKDAFFCLRLHPTSQPLFAFEWRDPEMGISGQLTWTRLPQGFKNSPTLFNEALHRDLADFRIQHPDLILLQYVDDLLLAATSEQDCQRGTRALLQTLGNLGYRASAKKAQICQKQVKYLGYLLKEGQRWLTEARKETVMGQPTPKTPRQLREFLGTAGFCRLWIPGFAEMAAPLYPLTKPGTLFNWGPDQQKAYQEIKQALLTAPALGLPDLTKPFELFVDEKQGYAKGVLTQKLGPWRRPVAYLSKKLDPVAAGWPPCLRMVAAIAVLTKDAGKLTMGQPLVILAPHAVEALVKQPPDRWLSNARMTHYQAMLLDTDRVQFGPVVALNPATLLPLPEKEAPHDCLEILAETHGTRPDLTDQPIPDADYTWYTDGSSFLQEGQRRAGAAVTTETEVIWARALPAGTSAQRAELIALTQALKMAEGKKLNVYTDSRYAFATAHVHGEIYRRRGWLTSEGREIKNKNEILALLKALFLPKRLSIIHCPGHQKGNSAEARGNRMADQAAREAAMKAVLETSTLLAGKRTADGSEFEKRTADGSEFESPKKKAKVE

SEQ ID NO: 971 - protein, 2096 aa, synthetic construct
MPAAKRVKLDGGDKKYSIGLDIGTNSVGWAVITDEYKVPSKKFKVLGNTDRHSIKKNLIGALLFDSGETAEATRLKRTARRRYTRRKNRICYLQEIFSNEMAKVDDSFFHRLEESFLVEEDKKHERHPIFGNIVDEVAYHEKYPTIYHLRKKLVDSTDKADLRLIYLALAHMIKFRGHFLIEGDLNPDNSDVDKLFIQLVQTYNQLFEENPINASGVDAKAILSARLSKSRRLENLIAQLPGEKKNGLFGNLIALSLGLTPNFKSNFDLAEDAKLQLSKDTYDDDLDNLLAQIGDQYADLFLAAKNLSDAILLSDILRVNTEITKAPLSASMIKRYDEHHQDLTLLKALVRQQLPEKYKEIFFDQSKNGYAGYIDGGASQEEFYKFIKPILEKMDGTEELLVKLNREDLLRKQRTFDNGSIPHQIHLGELHAILRRQEDFYPFLKDNREKIEKILTFRIPYYVGPLARGNSRFAWMTRKSEETITPWNFEEVVDKGASAQSFIERMTNFDKNLPNEKVLPKHSLLYEYFTVYNELTKVKYVTEGMRKPAFLSGEQKKAIVDLLFKTNRKVTVKQLKEDYFKKIECFDSVEISGVEDRFNASLGTYHDLLKIIKDKDFLDNEENEDILEDIVLTLTLFEDREMIEERLKTYAHLFDDKVMKQLKRRRYTGWGRLSRKLINGIRDKQSGKTILDFLKSDGFANRNFMQLIHDDSLTFKEDIQKAQVSGQGDSLHEHIANLAGSPAIKKGILQTVKVVDELVKVMGRHKPENIVIEMARENQTTQKGQKNSRERMKRIEEGIKELGSQILKEHPVENTQLQNEKLYLYYLQNGRDMYVDQELDINRLSDYDVDHIVPQSFLKDDSIDNKVLTRSDKARGKSDNVPSEEVVKKMKNYWRQLLNAKLITQRKFDNLTKAERGGLSELDKAGFIKRQLVETRQITKHVAQILDSRMNTKYDENDKLIREVKVITLKSKLVSDFRKDFQFYKVREINNYHHAHDAYLNAVVGTALIKKYPKLESEFVYGDYKVYDVRKMIAKSEQEIGKATAKYFFYSNIMNFFKTEITLANGEIRKRPLIETNGETGEIVWDKGRDFATVRKVLSMPQVNIVKKTEVQTGGFSKESILPKRNSDKLIARKKDWDPKKYGGFDSPTVAYSVLVVAKVEKGKSKKLKSVKELLGITIMERSSFEKNPIDFLEAKGYKEVKKDLIIKLPKYSLFELENGRKRMLASAGELQKGNELALPSKYVNFLYLASHYEKLKGSPEDNEQKQLFVEQHKHYLDEIIEQISEFSKRVILADANLDKVLSAYNKHRDKPIREQAENIIHLFTLTNLGAPAAFKYFDTTIDRKRYTSTKEVLDATLIHQSITGLYETRIDLSQLGGDGGGSSGGGEAAAKGGTLNIEDEYRLHETSKEPDVPLGSTWLSDFPQAWAETGGMGLAVRQAPLIIPLKATSTPVSIKQYPMSQEARLGIKPHIQRLLDQGILVPCQSPWNTPLLPVKKPGTNDYRPVQDLREVNKRVEDIHPTVPNPYNLLSGLPPSHQWYTVLDLKDAFFCLRLHPTSQPLFAFEWRDPEMGISGQLTWTRLPQGFKNSPTLFNEALHRDLADFRIQHPDLILLQYVDDLLLAATSEQDCQRGTRALLQTLGNLGYRASAKKAQICQKQVKYLGYLLKEGQRWLTEARKETVMGQPTPKTPRQLREFLGTAGFCRLWIPGFAEMAAPLYPLTKPGTLFNWGPDQQKAYQEIKQALLTAPALGLPDLTKPFELFVDEKQGYAKGVLTQKLGPWRRPVAYLSKKLDPVAAGWPPCLRMVAAIAVLTKDAGKLTMGQPLVILAPHAVEALVKQPPDRWLSNARMTHYQAMLLDTDRVQFGPVVALNPATLLPLPEKEAPHDCLEILAETHGTRPDLTDQPIPDADYTWYTDGSSFLQEGQRRAGAAVTTETEVIWARALPAGTSAQRAELIALTQALKMAEGKKLNVYTDSRYAFATAHVHGEIYRRRGWLTSEGREIKNKNEILALLKALFLPKRLSIIHCPGHQKGNSAEARGNRMADQAAREAAMKAVLETSTLLAGKRTADGSEFEKRTADGSEFESPKKKAKVE

SEQ ID NO: 972 - protein, 2100 aa, synthetic construct
MPAAKRVKLDGGDKKYSIGLDIGTNSVGWAVITDEYKVPSKKFKVLGNTDRHSIKKNLIGALLFDSGETAEATRLKRTARRRYTRRKNRICYLQEIFSNEMAKVDDSFFHRLEESFLVEEDKKHERHPIFGNIVDEVAYHEKYPTIYHLRKKLVDSTDKADLRLIYLALAHMIKFRGHFLIEGDLNPDNSDVDKLFIQLVQTYNQLFEENPINASGVDAKAILSARLSKSRRLENLIAQLPGEKKNGLFGNLIALSLGLTPNFKSNFDLAEDAKLQLSKDTYDDDLDNLLAQIGDQYADLFLAAKNLSDAILLSDILRVNTEITKAPLSASMIKRYDEHHQDLTLLKALVRQQLPEKYKEIFFDQSKNGYAGYIDGGASQEEFYKFIKPILEKMDGTEELLVKLNREDLLRKQRTFDNGSIPHQIHLGELHAILRRQEDFYPFLKDNREKIEKILTFRIPYYVGPLARGNSRFAWMTRKSEETITPWNFEEVVDKGASAQSFIERMTNFDKNLPNEKVLPKHSLLYEYFTVYNELTKVKYVTEGMRKPAFLSGEQKKAIVDLLFKTNRKVTVKQLKEDYFKKIECFDSVEISGVEDRFNASLGTYHDLLKIIKDKDFLDNEENEDILEDIVLTLTLFEDREMIEERLKTYAHLFDDKVMKQLKRRRYTGWGRLSRKLINGIRDKQSGKTILDFLKSDGFANRNFMQLIHDDSLTFKEDIQKAQVSGQGDSLHEHIANLAGSPAIKKGILQTVKVVDELVKVMGRHKPENIVIEMARENQTTQKGQKNSRERMKRIEEGIKELGSQILKEHPVENTQLQNEKLYLYYLQNGRDMYVDQELDINRLSDYDVDHIVPQSFLKDDSIDNKVLTRSDKARGKSDNVPSEEVVKKMKNYWRQLLNAKLITQRKFDNLTKAERGGLSELDKAGFIKRQLVETRQITKHVAQILDSRMNTKYDENDKLIREVKVITLKSKLVSDFRKDFQFYKVREINNYHHAHDAYLNAVVGTALIKKYPKLESEFVYGDYKVYDVRKMIAKSEQEIGKATAKYFFYSNIMNFFKTEITLANGEIRKRPLIETNGETGEIVWDKGRDFATVRKVLSMPQVNIVKKTEVQTGGFSKESILPKRNSDKLIARKKDWDPKKYGGFDSPTVAYSVLVVAKVEKGKSKKLKSVKELLGITIMERSSFEKNPIDFLEAKGYKEVKKDLIIKLPKYSLFELENGRKRMLASAGELQKGNELALPSKYVNFLYLASHYEKLKGSPEDNEQKQLFVEQHKHYLDEIIEQISEFSKRVILADANLDKVLSAYNKHRDKPIREQAENIIHLFTLTNLGAPAAFKYFDTTIDRKRYTSTKEVLDATLIHQSITGLYETRIDLSQLGGDGGGGGGSEAAAKGGGGSGGTLNIEDEYRLHETSKEPDVPLGSTWLSDFPQAWAETGGMGLAVRQAPLIIPLKATSTPVSIKQYPMSQEARLGIKPHIQRLLDQGILVPCQSPWNTPLLPVKKPGTNDYRPVQDLREVNKRVEDIHPTVPNPYNLLSGLPPSHQWYTVLDLKDAFFCLRLHPTSQPLFAFEWRDPEMGISGQLTWTRLPQGFKNSPTLFNEALHRDLADFRIQHPDLILLQYVDDLLLAATSEQDCQRGTRALLQTLGNLGYRASAKKAQICQKQVKYLGYLLKEGQRWLTEARKETVMGQPTPKTPRQLREFLGTAGFCRLWIPGFAEMAAPLYPLTKPGTLFNWGPDQQKAYQEIKQALLTAPALGLPDLTKPFELFVDEKQGYAKGVLTQKLGPWRRPVAYLSKKLDPVAAGWPPCLRMVAAIAVLTKDAGKLTMGQPLVILAPHAVEALVKQPPDRWLSNARMTHYQAMLLDTDRVQFGPVVALNPATLLPLPEKEAPHDCLEILAETHGTRPDLTDQPIPDADYTWYTDGSSFLQEGQRRAGAAVTTETEVIWARALPAGTSAQRAELIALTQALKMAEGKKLNVYTDSRYAFATAHVHGEIYRRRGWLTSEGREIKNKNEILALLKALFLPKRLSIIHCPGHQKGNSAEARGNRMADQAAREAAMKAVLETSTLLAGKRTADGSEFEKRTADGSEFESPKKKAKVE

SEQ ID NO: 973 - protein, 2096 aa, synthetic construct
MPAAKRVKLDGGDKKYSIGLDIGTNSVGWAVITDEYKVPSKKFKVLGNTDRHSIKKNLIGALLFDSGETAEATRLKRTARRRYTRRKNRICYLQEIFSNEMAKVDDSFFHRLEESFLVEEDKKHERHPIFGNIVDEVAYHEKYPTIYHLRKKLVDSTDKADLRLIYLALAHMIKFRGHFLIEGDLNPDNSDVDKLFIQLVQTYNQLFEENPINASGVDAKAILSARLSKSRRLENLIAQLPGEKKNGLFGNLIALSLGLTPNFKSNFDLAEDAKLQLSKDTYDDDLDNLLAQIGDQYADLFLAAKNLSDAILLSDILRVNTEITKAPLSASMIKRYDEHHQDLTLLKALVRQQLPEKYKEIFFDQSKNGYAGYIDGGASQEEFYKFIKPILEKMDGTEELLVKLNREDLLRKQRTFDNGSIPHQIHLGELHAILRRQEDFYPFLKDNREKIEKILTFRIPYYVGPLARGNSRFAWMTRKSEETITPWNFEEVVDKGASAQSFIERMTNFDKNLPNEKVLPKHSLLYEYFTVYNELTKVKYVTEGMRKPAFLSGEQKKAIVDLLFKTNRKVTVKQLKEDYFKKIECFDSVEISGVEDRFNASLGTYHDLLKIIKDKDFLDNEENEDILEDIVLTLTLFEDREMIEERLKTYAHLFDDKVMKQLKRRRYTGWGRLSRKLINGIRDKQSGKTILDFLKSDGFANRNFMQLIHDDSLTFKEDIQKAQVSGQGDSLHEHIANLAGSPAIKKGILQTVKVVDELVKVMGRHKPENIVIEMARENQTTQKGQKNSRERMKRIEEGIKELGSQILKEHPVENTQLQNEKLYLYYLQNGRDMYVDQELDINRLSDYDVDHIVPQSFLKDDSIDNKVLTRSDKARGKSDNVPSEEVVKKMKNYWRQLLNAKLITQRKFDNLTKAERGGLSELDKAGFIKRQLVETRQITKHVAQILDSRMNTKYDENDKLIREVKVITLKSKLVSDFRKDFQFYKVREINNYHHAHDAYLNAVVGTALIKKYPKLESEFVYGDYKVYDVRKMIAKSEQEIGKATAKYFFYSNIMNFFKTEITLANGEIRKRPLIETNGETGEIVWDKGRDFATVRKVLSMPQVNIVKKTEVQTGGFSKESILPKRNSDKLIARKKDWDPKKYGGFDSPTVAYSVLVVAKVEKGKSKKLKSVKELLGITIMERSSFEKNPIDFLEAKGYKEVKKDLIIKLPKYSLFELENGRKRMLASAGELQKGNELALPSKYVNFLYLASHYEKLKGSPEDNEQKQLFVEQHKHYLDEIIEQISEFSKRVILADANLDKVLSAYNKHRDKPIREQAENIIHLFTLTNLGAPAAFKYFDTTIDRKRYTSTKEVLDATLIHQSITGLYETRIDLSQLGGDGGGGGGGSEAAAKGGTLNIEDEYRLHETSKEPDVPLGSTWLSDFPQAWAETGGMGLAVRQAPLIIPLKATSTPVSIKQYPMSQEARLGIKPHIQRLLDQGILVPCQSPWNTPLLPVKKPGTNDYRPVQDLREVNKRVEDIHPTVPNPYNLLSGLPPSHQWYTVLDLKDAFFCLRLHPTSQPLFAFEWRDPEMGISGQLTWTRLPQGFKNSPTLFNEALHRDLADFRIQHPDLILLQYVDDLLLAATSEQDCQRGTRALLQTLGNLGYRASAKKAQICQKQVKYLGYLLKEGQRWLTEARKETVMGQPTPKTPRQLREFLGTAGFCRLWIPGFAEMAAPLYPLTKPGTLFNWGPDQQKAYQEIKQALLTAPALGLPDLTKPFELFVDEKQGYAKGVLTQKLGPWRRPVAYLSKKLDPVAAGWPPCLRMVAAIAVLTKDAGKLTMGQPLVILAPHAVEALVKQPPDRWLSNARMTHYQAMLLDTDRVQFGPVVALNPATLLPLPEKEAPHDCLEILAETHGTRPDLTDQPIPDADYTWYTDGSSFLQEGQRRAGAAVTTETEVIWARALPAGTSAQRAELIALTQALKMAEGKKLNVYTDSRYAFATAHVHGEIYRRRGWLTSEGREIKNKNEILALLKALFLPKRLSIIHCPGHQKGNSAEARGNRMADQAAREAAMKAVLETSTLLAGKRTADGSEFEKRTADGSEFESPKKKAKVE

SEQ ID NO: 974 - protein, 2091 aa, synthetic construct
MPAAKRVKLDGGDKKYSIGLDIGTNSVGWAVITDEYKVPSKKFKVLGNTDRHSIKKNLIGALLFDSGETAEATRLKRTARRRYTRRKNRICYLQEIFSNEMAKVDDSFFHRLEESFLVEEDKKHERHPIFGNIVDEVAYHEKYPTIYHLRKKLVDSTDKADLRLIYLALAHMIKFRGHFLIEGDLNPDNSDVDKLFIQLVQTYNQLFEENPINASGVDAKAILSARLSKSRRLENLIAQLPGEKKNGLFGNLIALSLGLTPNFKSNFDLAEDAKLQLSKDTYDDDLDNLLAQIGDQYADLFLAAKNLSDAILLSDILRVNTEITKAPLSASMIKRYDEHHQDLTLLKALVRQQLPEKYKEIFFDQSKNGYAGYIDGGASQEEFYKFIKPILEKMDGTEELLVKLNREDLLRKQRTFDNGSIPHQIHLGELHAILRRQEDFYPFLKDNREKIEKILTFRIPYYVGPLARGNSRFAWMTRKSEETITPWNFEEVVDKGASAQSFIERMTNFDKNLPNEKVLPKHSLLYEYFTVYNELTKVKYVTEGMRKPAFLSGEQKKAIVDLLFKTNRKVTVKQLKEDYFKKIECFDSVEISGVEDRFNASLGTYHDLLKIIKDKDFLDNEENEDILEDIVLTLTLFEDREMIEERLKTYAHLFDDKVMKQLKRRRYTGWGRLSRKLINGIRDKQSGKTILDFLKSDGFANRNFMQLIHDDSLTFKEDIQKAQVSGQGDSLHEHIANLAGSPAIKKGILQTVKVVDELVKVMGRHKPENIVIEMARENQTTQKGQKNSRERMKRIEEGIKELGSQILKEHPVENTQLQNEKLYLYYLQNGRDMYVDQELDINRLSDYDVDHIVPQSFLKDDSIDNKVLTRSDKARGKSDNVPSEEVVKKMKNYWRQLLNAKLITQRKFDNLTKAERGGLSELDKAGFIKRQLVETRQITKHVAQILDSRMNTKYDENDKLIREVKVITLKSKLVSDFRKDFQFYKVREINNYHHAHDAYLNAVVGTALIKKYPKLESEFVYGDYKVYDVRKMIAKSEQEIGKATAKYFFYSNIMNFFKTEITLANGEIRKRPLIETNGETGEIVWDKGRDFATVRKVLSMPQVNIVKKTEVQTGGFSKESILPKRNSDKLIARKKDWDPKKYGGFDSPTVAYSVLVVAKVEKGKSKKLKSVKELLGITIMERSSFEKNPIDFLEAKGYKEVKKDLIIKLPKYSLFELENGRKRMLASAGELQKGNELALPSKYVNFLYLASHYEKLKGSPEDNEQKQLFVEQHKHYLDEIIEQISEFSKRVILADANLDKVLSAYNKHRDKPIREQAENIIHLFTLTNLGAPAAFKYFDTTIDRKRYTSTKEVLDATLIHQSITGLYETRIDLSQLGGDGGGGGGGSGGTLNIEDEYRLHETSKEPDVPLGSTWLSDFPQAWAETGGMGLAVRQAPLIIPLKATSTPVSIKQYPMSQEARLGIKPHIQRLLDQGILVPCQSPWNTPLLPVKKPGTNDYRPVQDLREVNKRVEDIHPTVPNPYNLLSGLPPSHQWYTVLDLKDAFFCLRLHPTSQPLFAFEWRDPEMGISGQLTWTRLPQGFKNSPTLFNEALHRDLADFRIQHPDLILLQYVDDLLLAATSEQDCQRGTRALLQTLGNLGYRASAKKAQICQKQVKYLGYLLKEGQRWLTEARKETVMGQPTPKTPRQLREFLGTAGFCRLWIPGFAEMAAPLYPLTKPGTLFNWGPDQQKAYQEIKQALLTAPALGLPDLTKPFELFVDEKQGYAKGVLTQKLGPWRRPVAYLSKKLDPVAAGWPPCLRMVAAIAVLTKDAGKLTMGQPLVILAPHAVEALVKQPPDRWLSNARMTHYQAMLLDTDRVQFGPVVALNPATLLPLPEKEAPHDCLEILAETHGTRPDLTDQPIPDADYTWYTDGSSFLQEGQRRAGAAVTTETEVIWARALPAGTSAQRAELIALTQALKMAEGKKLNVYTDSRYAFATAHVHGEIYRRRGWLTSEGREIKNKNEILALLKALFLPKRLSIIHCPGHQKGNSAEARGNRMADQAAREAAMKAVLETSTLLAGKRTADGSEFEKRTADGSEFESPKKKAKVE

SEQ ID NO: 975 - protein, 2096 aa, synthetic construct
MPAAKRVKLDGGDKKYSIGLDIGTNSVGWAVITDEYKVPSKKFKVLGNTDRHSIKKNLIGALLFDSGETAEATRLKRTARRRYTRRKNRICYLQEIFSNEMAKVDDSFFHRLEESFLVEEDKKHERHPIFGNIVDEVAYHEKYPTIYHLRKKLVDSTDKADLRLIYLALAHMIKFRGHFLIEGDLNPDNSDVDKLFIQLVQTYNQLFEENPINASGVDAKAILSARLSKSRRLENLIAQLPGEKKNGLFGNLIALSLGLTPNFKSNFDLAEDAKLQLSKDTYDDDLDNLLAQIGDQYADLFLAAKNLSDAILLSDILRVNTEITKAPLSASMIKRYDEHHQDLTLLKALVRQQLPEKYKEIFFDQSKNGYAGYIDGGASQEEFYKFIKPILEKMDGTEELLVKLNREDLLRKQRTFDNGSIPHQIHLGELHAILRRQEDFYPFLKDNREKIEKILTFRIPYYVGPLARGNSRFAWMTRKSEETITPWNFEEVVDKGASAQSFIERMTNFDKNLPNEKVLPKHSLLYEYFTVYNELTKVKYVTEGMRKPAFLSGEQKKAIVDLLFKTNRKVTVKQLKEDYFKKIECFDSVEISGVEDRFNASLGTYHDLLKIIKDKDFLDNEENEDILEDIVLTLTLFEDREMIEERLKTYAHLFDDKVMKQLKRRRYTGWGRLSRKLINGIRDKQSGKTILDFLKSDGFANRNFMQLIHDDSLTFKEDIQKAQVSGQGDSLHEHIANLAGSPAIKKGILQTVKVVDELVKVMGRHKPENIVIEMARENQTTQKGQKNSRERMKRIEEGIKELGSQILKEHPVENTQLQNEKLYLYYLQNGRDMYVDQELDINRLSDYDVDHIVPQSFLKDDSIDNKVLTRSDKARGKSDNVPSEEVVKKMKNYWRQLLNAKLITQRKFDNLTKAERGGLSELDKAGFIKRQLVETRQITKHVAQILDSRMNTKYDENDKLIREVKVITLKSKLVSDFRKDFQFYKVREINNYHHAHDAYLNAVVGTALIKKYPKLESEFVYGDYKVYDVRKMIAKSEQEIGKATAKYFFYSNIMNFFKTEITLANGEIRKRPLIETNGETGEIVWDKGRDFATVRKVLSMPQVNIVKKTEVQTGGFSKESILPKRNSDKLIARKKDWDPKKYGGFDSPTVAYSVLVVAKVEKGKSKKLKSVKELLGITIMERSSFEKNPIDFLEAKGYKEVKKDLIIKLPKYSLFELENGRKRMLASAGELQKGNELALPSKYVNFLYLASHYEKLKGSPEDNEQKQLFVEQHKHYLDEIIEQISEFSKRVILADANLDKVLSAYNKHRDKPIREQAENIIHLFTLTNLGAPAAFKYFDTTIDRKRYTSTKEVLDATLIHQSITGLYETRIDLSQLGGDGGGSSGGSEAAAKGGTLNIEDEYRLHETSKEPDVPLGSTWLSDFPQAWAETGGMGLAVRQAPLIIPLKATSTPVSIKQYPMSQEARLGIKPHIQRLLDQGILVPCQSPWNTPLLPVKKPGTNDYRPVQDLREVNKRVEDIHPTVPNPYNLLSGLPPSHQWYTVLDLKDAFFCLRLHPTSQPLFAFEWRDPEMGISGQLTWTRLPQGFKNSPTLFNEALHRDLADFRIQHPDLILLQYVDDLLLAATSEQDCQRGTRALLQTLGNLGYRASAKKAQICQKQVKYLGYLLKEGQRWLTEARKETVMGQPTPKTPRQLREFLGTAGFCRLWIPGFAEMAAPLYPLTKPGTLFNWGPDQQKAYQEIKQALLTAPALGLPDLTKPFELFVDEKQGYAKGVLTQKLGPWRRPVAYLSKKLDPVAAGWPPCLRMVAAIAVLTKDAGKLTMGQPLVILAPHAVEALVKQPPDRWLSNARMTHYQAMLLDTDRVQFGPVVALNPATLLPLPEKEAPHDCLEILAETHGTRPDLTDQPIPDADYTWYTDGSSFLQEGQRRAGAAVTTETEVIWARALPAGTSAQRAELIALTQALKMAEGKKLNVYTDSRYAFATAHVHGEIYRRRGWLTSEGREIKNKNEILALLKALFLPKRLSIIHCPGHQKGNSAEARGNRMADQAAREAAMKAVLETSTLLAGKRTADGSEFEKRTADGSEFESPKKKAKVE

SEQ ID NO: 976 - protein, 2115 aa, synthetic construct
MPAAKRVKLDGGDKKYSIGLDIGTNSVGWAVITDEYKVPSKKFKVLGNTDRHSIKKNLIGALLFDSGETAEATRLKRTARRRYTRRKNRICYLQEIFSNEMAKVDDSFFHRLEESFLVEEDKKHERHPIFGNIVDEVAYHEKYPTIYHLRKKLVDSTDKADLRLIYLALAHMIKFRGHFLIEGDLNPDNSDVDKLFIQLVQTYNQLFEENPINASGVDAKAILSARLSKSRRLENLIAQLPGEKKNGLFGNLIALSLGLTPNFKSNFDLAEDAKLQLSKDTYDDDLDNLLAQIGDQYADLFLAAKNLSDAILLSDILRVNTEITKAPLSASMIKRYDEHHQDLTLLKALVRQQLPEKYKEIFFDQSKNGYAGYIDGGASQEEFYKFIKPILEKMDGTEELLVKLNREDLLRKQRTFDNGSIPHQIHLGELHAILRRQEDFYPFLKDNREKIEKILTFRIPYYVGPLARGNSRFAWMTRKSEETITPWNFEEVVDKGASAQSFIERMTNFDKNLPNEKVLPKHSLLYEYFTVYNELTKVKYVTEGMRKPAFLSGEQKKAIVDLLFKTNRKVTVKQLKEDYFKKIECFDSVEISGVEDRFNASLGTYHDLLKIIKDKDFLDNEENEDILEDIVLTLTLFEDREMIEERLKTYAHLFDDKVMKQLKRRRYTGWGRLSRKLINGIRDKQSGKTILDFLKSDGFANRNFMQLIHDDSLTFKEDIQKAQVSGQGDSLHEHIANLAGSPAIKKGILQTVKVVDELVKVMGRHKPENIVIEMARENQTTQKGQKNSRERMKRIEEGIKELGSQILKEHPVENTQLQNEKLYLYYLQNGRDMYVDQELDINRLSDYDVDHIVPQSFLKDDSIDNKVLTRSDKARGKSDNVPSEEVVKKMKNYWRQLLNAKLITQRKFDNLTKAERGGLSELDKAGFIKRQLVETRQITKHVAQILDSRMNTKYDENDKLIREVKVITLKSKLVSDFRKDFQFYKVREINNYHHAHDAYLNAVVGTALIKKYPKLESEFVYGDYKVYDVRKMIAKSEQEIGKATAKYFFYSNIMNFFKTEITLANGEIRKRPLIETNGETGEIVWDKGRDFATVRKVLSMPQVNIVKKTEVQTGGFSKESILPKRNSDKLIARKKDWDPKKYGGFDSPTVAYSVLVVAKVEKGKSKKLKSVKELLGITIMERSSFEKNPIDFLEAKGYKEVKKDLIIKLPKYSLFELENGRKRMLASAGELQKGNELALPSKYVNFLYLASHYEKLKGSPEDNEQKQLFVEQHKHYLDEIIEQISEFSKRVILADANLDKVLSAYNKHRDKPIREQAENIIHLFTLTNLGAPAAFKYFDTTIDRKRYTSTKEVLDATLIHQSITGLYETRIDLSQLGGDGGGGGGSGGGGSGGGGSGGGGSGGGGSGGGGSGGTLNIEDEYRLHETSKEPDVPLGSTWLSDFPQAWAETGGMGLAVRQAPLIIPLKATSTPVSIKQYPMSQEARLGIKPHIQRLLDQGILVPCQSPWNTPLLPVKKPGTNDYRPVQDLREVNKRVEDIHPTVPNPYNLLSGLPPSHQWYTVLDLKDAFFCLRLHPTSQPLFAFEWRDPEMGISGQLTWTRLPQGFKNSPTLFNEALHRDLADFRIQHPDLILLQYVDDLLLAATSEQDCQRGTRALLQTLGNLGYRASAKKAQICQKQVKYLGYLLKEGQRWLTEARKETVMGQPTPKTPRQLREFLGTAGFCRLWIPGFAEMAAPLYPLTKPGTLFNWGPDQQKAYQEIKQALLTAPALGLPDLTKPFELFVDEKQGYAKGVLTQKLGPWRRPVAYLSKKLDPVAAGWPPCLRMVAAIAVLTKDAGKLTMGQPLVILAPHAVEALVKQPPDRWLSNARMTHYQAMLLDTDRVQFGPVVALNPATLLPLPEKEAPHDCLEILAETHGTRPDLTDQPIPDADYTWYTDGSSFLQEGQRRAGAAVTTETEVIWARALPAGTSAQRAELIALTQALKMAEGKKLNVYTDSRYAFATAHVHGEIYRRRGWLTSEGREIKNKNEILALLKALFLPKRLSIIHCPGHQKGNSAEARGNRMADQAAREAAMKAVLETSTLLAGKRTADGSEFEKRTADGSEFESPKKKAKVE

SEQ ID NO: 977 - protein, 2105 aa, synthetic construct
MPAAKRVKLDGGDKKYSIGLDIGTNSVGWAVITDEYKVPSKKFKVLGNTDRHSIKKNLIGALLFDSGETAEATRLKRTARRRYTRRKNRICYLQEIFSNEMAKVDDSFFHRLEESFLVEEDKKHERHPIFGNIVDEVAYHEKYPTIYHLRKKLVDSTDKADLRLIYLALAHMIKFRGHFLIEGDLNPDNSDVDKLFIQLVQTYNQLFEENPINASGVDAKAILSARLSKSRRLENLIAQLPGEKKNGLFGNLIALSLGLTPNFKSNFDLAEDAKLQLSKDTYDDDLDNLLAQIGDQYADLFLAAKNLSDAILLSDILRVNTEITKAPLSASMIKRYDEHHQDLTLLKALVRQQLPEKYKEIFFDQSKNGYAGYIDGGASQEEFYKFIKPILEKMDGTEELLVKLNREDLLRKQRTFDNGSIPHQIHLGELHAILRRQEDFYPFLKDNREKIEKILTFRIPYYVGPLARGNSRFAWMTRKSEETITPWNFEEVVDKGASAQSFIERMTNFDKNLPNEKVLPKHSLLYEYFTVYNELTKVKYVTEGMRKPAFLSGEQKKAIVDLLFKTNRKVTVKQLKEDYFKKIECFDSVEISGVEDRFNASLGTYHDLLKIIKDKDFLDNEENEDILEDIVLTLTLFEDREMIEERLKTYAHLFDDKVMKQLKRRRYTGWGRLSRKLINGIRDKQSGKTILDFLKSDGFANRNFMQLIHDDSLTFKEDIQKAQVSGQGDSLHEHIANLAGSPAIKKGILQTVKVVDELVKVMGRHKPENIVIEMARENQTTQKGQKNSRERMKRIEEGIKELGSQILKEHPVENTQLQNEKLYLYYLQNGRDMYVDQELDINRLSDYDVDHIVPQSFLKDDSIDNKVLTRSDKARGKSDNVPSEEVVKKMKNYWRQLLNAKLITQRKFDNLTKAERGGLSELDKAGFIKRQLVETRQITKHVAQILDSRMNTKYDENDKLIREVKVITLKSKLVSDFRKDFQFYKVREINNYHHAHDAYLNAVVGTALIKKYPKLESEFVYGDYKVYDVRKMIAKSEQEIGKATAKYFFYSNIMNFFKTEITLANGEIRKRPLIETNGETGEIVWDKGRDFATVRKVLSMPQVNIVKKTEVQTGGFSKESILPKRNSDKLIARKKDWDPKKYGGFDSPTVAYSVLVVAKVEKGKSKKLKSVKELLGITIMERSSFEKNPIDFLEAKGYKEVKKDLIIKLPKYSLFELENGRKRMLASAGELQKGNELALPSKYVNFLYLASHYEKLKGSPEDNEQKQLFVEQHKHYLDEIIEQISEFSKRVILADANLDKVLSAYNKHRDKPIREQAENIIHLFTLTNLGAPAAFKYFDTTIDRKRYTSTKEVLDATLIHQSITGLYETRIDLSQLGGDGGGGGGSGGGGSGGGGSGGGGSGGTLNIEDEYRLHETSKEPDVPLGSTWLSDFPQAWAETGGMGLAVRQAPLIIPLKATSTPVSIKQYPMSQEARLGIKPHIQRLLDQGILVPCQSPWNTPLLPVKKPGTNDYRPVQDLREVNKRVEDIHPTVPNPYNLLSGLPPSHQWYTVLDLKDAFFCLRLHPTSQPLFAFEWRDPEMGISGQLTWTRLPQGFKNSPTLFNEALHRDLADFRIQHPDLILLQYVDDLLLAATSEQDCQRGTRALLQTLGNLGYRASAKKAQICQKQVKYLGYLLKEGQRWLTEARKETVMGQPTPKTPRQLREFLGTAGFCRLWIPGFAEMAAPLYPLTKPGTLFNWGPDQQKAYQEIKQALLTAPALGLPDLTKPFELFVDEKQGYAKGVLTQKLGPWRRPVAYLSKKLDPVAAGWPPCLRMVAAIAVLTKDAGKLTMGQPLVILAPHAVEALVKQPPDRWLSNARMTHYQAMLLDTDRVQFGPVVALNPATLLPLPEKEAPHDCLEILAETHGTRPDLTDQPIPDADYTWYTDGSSFLQEGQRRAGAAVTTETEVIWARALPAGTSAQRAELIALTQALKMAEGKKLNVYTDSRYAFATAHVHGEIYRRRGWLTSEGREIKNKNEILALLKALFLPKRLSIIHCPGHQKGNSAEARGNRMADQAAREAAMKAVLETSTLLAGKRTADGSEFEKRTADGSEFESPKKKAKVE

SEQ ID NO: 978 - protein, 2094 aa, synthetic construct
MPAAKRVKLDGGDKKYSIGLDIGTNSVGWAVITDEYKVPSKKFKVLGNTDRHSIKKNLIGALLFDSGETAEATRLKRTARRRYTRRKNRICYLQEIFSNEMAKVDDSFFHRLEESFLVEEDKKHERHPIFGNIVDEVAYHEKYPTIYHLRKKLVDSTDKADLRLIYLALAHMIKFRGHFLIEGDLNPDNSDVDKLFIQLVQTYNQLFEENPINASGVDAKAILSARLSKSRRLENLIAQLPGEKKNGLFGNLIALSLGLTPNFKSNFDLAEDAKLQLSKDTYDDDLDNLLAQIGDQYADLFLAAKNLSDAILLSDILRVNTEITKAPLSASMIKRYDEHHQDLTLLKALVRQQLPEKYKEIFFDQSKNGYAGYIDGGASQEEFYKFIKPILEKMDGTEELLVKLNREDLLRKQRTFDNGSIPHQIHLGELHAILRRQEDFYPFLKDNREKIEKILTFRIPYYVGPLARGNSRFAWMTRKSEETITPWNFEEVVDKGASAQSFIERMTNFDKNLPNEKVLPKHSLLYEYFTVYNELTKVKYVTEGMRKPAFLSGEQKKAIVDLLFKTNRKVTVKQLKEDYFKKIECFDSVEISGVEDRFNASLGTYHDLLKIIKDKDFLDNEENEDILEDIVLTLTLFEDREMIEERLKTYAHLFDDKVMKQLKRRRYTGWGRLSRKLINGIRDKQSGKTILDFLKSDGFANRNFMQLIHDDSLTFKEDIQKAQVSGQGDSLHEHIANLAGSPAIKKGILQTVKVVDELVKVMGRHKPENIVIEMARENQTTQKGQKNSRERMKRIEEGIKELGSQILKEHPVENTQLQNEKLYLYYLQNGRDMYVDQELDINRLSDYDVDHIVPQSFLKDDSIDNKVLTRSDKARGKSDNVPSEEVVKKMKNYWRQLLNAKLITQRKFDNLTKAERGGLSELDKAGFIKRQLVETRQITKHVAQILDSRMNTKYDENDKLIREVKVITLKSKLVSDFRKDFQFYKVREINNYHHAHDAYLNAVVGTALIKKYPKLESEFVYGDYKVYDVRKMIAKSEQEIGKATAKYFFYSNIMNFFKTEITLANGEIRKRPLIETNGETGEIVWDKGRDFATVRKVLSMPQVNIVKKTEVQTGGFSKESILPKRNSDKLIARKKDWDPKKYGGFDSPTVAYSVLVVAKVEKGKSKKLKSVKELLGITIMERSSFEKNPIDFLEAKGYKEVKKDLIIKLPKYSLFELENGRKRMLASAGELQKGNELALPSKYVNFLYLASHYEKLKGSPEDNEQKQLFVEQHKHYLDEIIEQISEFSKRVILADANLDKVLSAYNKHRDKPIREQAENIIHLFTLTNLGAPAAFKYFDTTIDRKRYTSTKEVLDATLIHQSITGLYETRIDLSQLGGDGGPAPAPAPAPGGTLNIEDEYRLHETSKEPDVPLGSTWLSDFPQAWAETGGMGLAVRQAPLIIPLKATSTPVSIKQYPMSQEARLGIKPHIQRLLDQGILVPCQSPWNTPLLPVKKPGTNDYRPVQDLREVNKRVEDIHPTVPNPYNLLSGLPPSHQWYTVLDLKDAFFCLRLHPTSQPLFAFEWRDPEMGISGQLTWTRLPQGFKNSPTLFNEALHRDLADFRIQHPDLILLQYVDDLLLAATSEQDCQRGTRALLQTLGNLGYRASAKKAQICQKQVKYLGYLLKEGQRWLTEARKETVMGQPTPKTPRQLREFLGTAGFCRLWIPGFAEMAAPLYPLTKPGTLFNWGPDQQKAYQEIKQALLTAPALGLPDLTKPFELFVDEKQGYAKGVLTQKLGPWRRPVAYLSKKLDPVAAGWPPCLRMVAAIAVLTKDAGKLTMGQPLVILAPHAVEALVKQPPDRWLSNARMTHYQAMLLDTDRVQFGPVVALNPATLLPLPEKEAPHDCLEILAETHGTRPDLTDQPIPDADYTWYTDGSSFLQEGQRRAGAAVTTETEVIWARALPAGTSAQRAELIALTQALKMAEGKKLNVYTDSRYAFATAHVHGEIYRRRGWLTSEGREIKNKNEILALLKALFLPKRLSIIHCPGHQKGNSAEARGNRMADQAAREAAMKAVLETSTLLAGKRTADGSEFEKRTADGSEFESPKKKAKVE

SEQ ID NO: 979 - protein, 2096 aa, synthetic construct
MPAAKRVKLDGGDKKYSIGLDIGTNSVGWAVITDEYKVPSKKFKVLGNTDRHSIKKNLIGALLFDSGETAEATRLKRTARRRYTRRKNRICYLQEIFSNEMAKVDDSFFHRLEESFLVEEDKKHERHPIFGNIVDEVAYHEKYPTIYHLRKKLVDSTDKADLRLIYLALAHMIKFRGHFLIEGDLNPDNSDVDKLFIQLVQTYNQLFEENPINASGVDAKAILSARLSKSRRLENLIAQLPGEKKNGLFGNLIALSLGLTPNFKSNFDLAEDAKLQLSKDTYDDDLDNLLAQIGDQYADLFLAAKNLSDAILLSDILRVNTEITKAPLSASMIKRYDEHHQDLTLLKALVRQQLPEKYKEIFFDQSKNGYAGYIDGGASQEEFYKFIKPILEKMDGTEELLVKLNREDLLRKQRTFDNGSIPHQIHLGELHAILRRQEDFYPFLKDNREKIEKILTFRIPYYVGPLARGNSRFAWMTRKSEETITPWNFEEVVDKGASAQSFIERMTNFDKNLPNEKVLPKHSLLYEYFTVYNELTKVKYVTEGMRKPAFLSGEQKKAIVDLLFKTNRKVTVKQLKEDYFKKIECFDSVEISGVEDRFNASLGTYHDLLKIIKDKDFLDNEENEDILEDIVLTLTLFEDREMIEERLKTYAHLFDDKVMKQLKRRRYTGWGRLSRKLINGIRDKQSGKTILDFLKSDGFANRNFMQLIHDDSLTFKEDIQKAQVSGQGDSLHEHIANLAGSPAIKKGILQTVKVVDELVKVMGRHKPENIVIEMARENQTTQKGQKNSRERMKRIEEGIKELGSQILKEHPVENTQLQNEKLYLYYLQNGRDMYVDQELDINRLSDYDVDHIVPQSFLKDDSIDNKVLTRSDKARGKSDNVPSEEVVKKMKNYWRQLLNAKLITQRKFDNLTKAERGGLSELDKAGFIKRQLVETRQITKHVAQILDSRMNTKYDENDKLIREVKVITLKSKLVSDFRKDFQFYKVREINNYHHAHDAYLNAVVGTALIKKYPKLESEFVYGDYKVYDVRKMIAKSEQEIGKATAKYFFYSNIMNFFKTEITLANGEIRKRPLIETNGETGEIVWDKGRDFATVRKVLSMPQVNIVKKTEVQTGGFSKESILPKRNSDKLIARKKDWDPKKYGGFDSPTVAYSVLVVAKVEKGKSKKLKSVKELLGITIMERSSFEKNPIDFLEAKGYKEVKKDLIIKLPKYSLFELENGRKRMLASAGELQKGNELALPSKYVNFLYLASHYEKLKGSPEDNEQKQLFVEQHKHYLDEIIEQISEFSKRVILADANLDKVLSAYNKHRDKPIREQAENIIHLFTLTNLGAPAAFKYFDTTIDRKRYTSTKEVLDATLIHQSITGLYETRIDLSQLGGDGGGGGEAAAKGGSGGTLNIEDEYRLHETSKEPDVPLGSTWLSDFPQAWAETGGMGLAVRQAPLIIPLKATSTPVSIKQYPMSQEARLGIKPHIQRLLDQGILVPCQSPWNTPLLPVKKPGTNDYRPVQDLREVNKRVEDIHPTVPNPYNLLSGLPPSHQWYTVLDLKDAFFCLRLHPTSQPLFAFEWRDPEMGISGQLTWTRLPQGFKNSPTLFNEALHRDLADFRIQHPDLILLQYVDDLLLAATSEQDCQRGTRALLQTLGNLGYRASAKKAQICQKQVKYLGYLLKEGQRWLTEARKETVMGQPTPKTPRQLREFLGTAGFCRLWIPGFAEMAAPLYPLTKPGTLFNWGPDQQKAYQEIKQALLTAPALGLPDLTKPFELFVDEKQGYAKGVLTQKLGPWRRPVAYLSKKLDPVAAGWPPCLRMVAAIAVLTKDAGKLTMGQPLVILAPHAVEALVKQPPDRWLSNARMTHYQAMLLDTDRVQFGPVVALNPATLLPLPEKEAPHDCLEILAETHGTRPDLTDQPIPDADYTWYTDGSSFLQEGQRRAGAAVTTETEVIWARALPAGTSAQRAELIALTQALKMAEGKKLNVYTDSRYAFATAHVHGEIYRRRGWLTSEGREIKNKNEILALLKALFLPKRLSIIHCPGHQKGNSAEARGNRMADQAAREAAMKAVLETSTLLAGKRTADGSEFEKRTADGSEFESPKKKAKVE

SEQ ID NO: 980 - protein, 2094 aa, synthetic construct
MPAAKRVKLDGGDKKYSIGLDIGTNSVGWAVITDEYKVPSKKFKVLGNTDRHSIKKNLIGALLFDSGETAEATRLKRTARRRYTRRKNRICYLQEIFSNEMAKVDDSFFHRLEESFLVEEDKKHERHPIFGNIVDEVAYHEKYPTIYHLRKKLVDSTDKADLRLIYLALAHMIKFRGHFLIEGDLNPDNSDVDKLFIQLVQTYNQLFEENPINASGVDAKAILSARLSKSRRLENLIAQLPGEKKNGLFGNLIALSLGLTPNFKSNFDLAEDAKLQLSKDTYDDDLDNLLAQIGDQYADLFLAAKNLSDAILLSDILRVNTEITKAPLSASMIKRYDEHHQDLTLLKALVRQQLPEKYKEIFFDQSKNGYAGYIDGGASQEEFYKFIKPILEKMDGTEELLVKLNREDLLRKQRTFDNGSIPHQIHLGELHAILRRQEDFYPFLKDNREKIEKILTFRIPYYVGPLARGNSRFAWMTRKSEETITPWNFEEVVDKGASAQSFIERMTNFDKNLPNEKVLPKHSLLYEYFTVYNELTKVKYVTEGMRKPAFLSGEQKKAIVDLLFKTNRKVTVKQLKEDYFKKIECFDSVEISGVEDRFNASLGTYHDLLKIIKDKDFLDNEENEDILEDIVLTLTLFEDREMIEERLKTYAHLFDDKVMKQLKRRRYTGWGRLSRKLINGIRDKQSGKTILDFLKSDGFANRNFMQLIHDDSLTFKEDIQKAQVSGQGDSLHEHIANLAGSPAIKKGILQTVKVVDELVKVMGRHKPENIVIEMARENQTTQKGQKNSRERMKRIEEGIKELGSQILKEHPVENTQLQNEKLYLYYLQNGRDMYVDQELDINRLSDYDVDHIVPQSFLKDDSIDNKVLTRSDKARGKSDNVPSEEVVKKMKNYWRQLLNAKLITQRKFDNLTKAERGGLSELDKAGFIKRQLVETRQITKHVAQILDSRMNTKYDENDKLIREVKVITLKSKLVSDFRKDFQFYKVREINNYHHAHDAYLNAVVGTALIKKYPKLESEFVYGDYKVYDVRKMIAKSEQEIGKATAKYFFYSNIMNFFKTEITLANGEIRKRPLIETNGETGEIVWDKGRDFATVRKVLSMPQVNIVKKTEVQTGGFSKESILPKRNSDKLIARKKDWDPKKYGGFDSPTVAYSVLVVAKVEKGKSKKLKSVKELLGITIMERSSFEKNPIDFLEAKGYKEVKKDLIIKLPKYSLFELENGRKRMLASAGELQKGNELALPSKYVNFLYLASHYEKLKGSPEDNEQKQLFVEQHKHYLDEIIEQISEFSKRVILADANLDKVLSAYNKHRDKPIREQAENIIHLFTLTNLGAPAAFKYFDTTIDRKRYTSTKEVLDATLIHQSITGLYETRIDLSQLGGDGGGGSGGSGGSGGTLNIEDEYRLHETSKEPDVPLGSTWLSDFPQAWAETGGMGLAVRQAPLIIPLKATSTPVSIKQYPMSQEARLGIKPHIQRLLDQGILVPCQSPWNTPLLPVKKPGTNDYRPVQDLREVNKRVEDIHPTVPNPYNLLSGLPPSHQWYTVLDLKDAFFCLRLHPTSQPLFAFEWRDPEMGISGQLTWTRLPQGFKNSPTLFNEALHRDLADFRIQHPDLILLQYVDDLLLAATSEQDCQRGTRALLQTLGNLGYRASAKKAQICQKQVKYLGYLLKEGQRWLTEARKETVMGQPTPKTPRQLREFLGTAGFCRLWIPGFAEMAAPLYPLTKPGTLFNWGPDQQKAYQEIKQALLTAPALGLPDLTKPFELFVDEKQGYAKGVLTQKLGPWRRPVAYLSKKLDPVAAGWPPCLRMVAAIAVLTKDAGKLTMGQPLVILAPHAVEALVKQPPDRWLSNARMTHYQAMLLDTDRVQFGPVVALNPATLLPLPEKEAPHDCLEILAETHGTRPDLTDQPIPDADYTWYTDGSSFLQEGQRRAGAAVTTETEVIWARALPAGTSAQRAELIALTQALKMAEGKKLNVYTDSRYAFATAHVHGEIYRRRGWLTSEGREIKNKNEILALLKALFLPKRLSIIHCPGHQKGNSAEARGNRMADQAAREAAMKAVLETSTLLAGKRTADGSEFEKRTADGSEFESPKKKAKVE

SEQ ID NO: 981 - protein, 2100 aa, synthetic construct
MPAAKRVKLDGGDKKYSIGLDIGTNSVGWAVITDEYKVPSKKFKVLGNTDRHSIKKNLIGALLFDSGETAEATRLKRTARRRYTRRKNRICYLQEIFSNEMAKVDDSFFHRLEESFLVEEDKKHERHPIFGNIVDEVAYHEKYPTIYHLRKKLVDSTDKADLRLIYLALAHMIKFRGHFLIEGDLNPDNSDVDKLFIQLVQTYNQLFEENPINASGVDAKAILSARLSKSRRLENLIAQLPGEKKNGLFGNLIALSLGLTPNFKSNFDLAEDAKLQLSKDTYDDDLDNLLAQIGDQYADLFLAAKNLSDAILLSDILRVNTEITKAPLSASMIKRYDEHHQDLTLLKALVRQQLPEKYKEIFFDQSKNGYAGYIDGGASQEEFYKFIKPILEKMDGTEELLVKLNREDLLRKQRTFDNGSIPHQIHLGELHAILRRQEDFYPFLKDNREKIEKILTFRIPYYVGPLARGNSRFAWMTRKSEETITPWNFEEVVDKGASAQSFIERMTNFDKNLPNEKVLPKHSLLYEYFTVYNELTKVKYVTEGMRKPAFLSGEQKKAIVDLLFKTNRKVTVKQLKEDYFKKIECFDSVEISGVEDRFNASLGTYHDLLKIIKDKDFLDNEENEDILEDIVLTLTLFEDREMIEERLKTYAHLFDDKVMKQLKRRRYTGWGRLSRKLINGIRDKQSGKTILDFLKSDGFANRNFMQLIHDDSLTFKEDIQKAQVSGQGDSLHEHIANLAGSPAIKKGILQTVKVVDELVKVMGRHKPENIVIEMARENQTTQKGQKNSRERMKRIEEGIKELGSQILKEHPVENTQLQNEKLYLYYLQNGRDMYVDQELDINRLSDYDVDHIVPQSFLKDDSIDNKVLTRSDKARGKSDNVPSEEVVKKMKNYWRQLLNAKLITQRKFDNLTKAERGGLSELDKAGFIKRQLVETRQITKHVAQILDSRMNTKYDENDKLIREVKVITLKSKLVSDFRKDFQFYKVREINNYHHAHDAYLNAVVGTALIKKYPKLESEFVYGDYKVYDVRKMIAKSEQEIGKATAKYFFYSNIMNFFKTEITLANGEIRKRPLIETNGETGEIVWDKGRDFATVRKVLSMPQVNIVKKTEVQTGGFSKESILPKRNSDKLIARKKDWDPKKYGGFDSPTVAYSVLVVAKVEKGKSKKLKSVKELLGITIMERSSFEKNPIDFLEAKGYKEVKKDLIIKLPKYSLFELENGRKRMLASAGELQKGNELALPSKYVNFLYLASHYEKLKGSPEDNEQKQLFVEQHKHYLDEIIEQISEFSKRVILADANLDKVLSAYNKHRDKPIREQAENIIHLFTLTNLGAPAAFKYFDTTIDRKRYTSTKEVLDATLIHQSITGLYETRIDLSQLGGDGGEAAAKGGGGSEAAAKGGTLNIEDEYRLHETSKEPDVPLGSTWLSDFPQAWAETGGMGLAVRQAPLIIPLKATSTPVSIKQYPMSQEARLGIKPHIQRLLDQGILVPCQSPWNTPLLPVKKPGTNDYRPVQDLREVNKRVEDIHPTVPNPYNLLSGLPPSHQWYTVLDLKDAFFCLRLHPTSQPLFAFEWRDPEMGISGQLTWTRLPQGFKNSPTLFNEALHRDLADFRIQHPDLILLQYVDDLLLAATSEQDCQRGTRALLQTLGNLGYRASAKKAQICQKQVKYLGYLLKEGQRWLTEARKETVMGQPTPKTPRQLREFLGTAGFCRLWIPGFAEMAAPLYPLTKPGTLFNWGPDQQKAYQEIKQALLTAPALGLPDLTKPFELFVDEKQGYAKGVLTQKLGPWRRPVAYLSKKLDPVAAGWPPCLRMVAAIAVLTKDAGKLTMGQPLVILAPHAVEALVKQPPDRWLSNARMTHYQAMLLDTDRVQFGPVVALNPATLLPLPEKEAPHDCLEILAETHGTRPDLTDQPIPDADYTWYTDGSSFLQEGQRRAGAAVTTETEVIWARALPAGTSAQRAELIALTQALKMAEGKKLNVYTDSRYAFATAHVHGEIYRRRGWLTSEGREIKNKNEILALLKALFLPKRLSIIHCPGHQKGNSAEARGNRMADQAAREAAMKAVLETSTLLAGKRTADGSEFEKRTADGSEFESPKKKAKVE

SEQ ID NO: 982 - protein, 2093 aa, synthetic construct
MPAAKRVKLDGGDKKYSIGLDIGTNSVGWAVITDEYKVPSKKFKVLGNTDRHSIKKNLIGALLFDSGETAEATRLKRTARRRYTRRKNRICYLQEIFSNEMAKVDDSFFHRLEESFLVEEDKKHERHPIFGNIVDEVAYHEKYPTIYHLRKKLVDSTDKADLRLIYLALAHMIKFRGHFLIEGDLNPDNSDVDKLFIQLVQTYNQLFEENPINASGVDAKAILSARLSKSRRLENLIAQLPGEKKNGLFGNLIALSLGLTPNFKSNFDLAEDAKLQLSKDTYDDDLDNLLAQIGDQYADLFLAAKNLSDAILLSDILRVNTEITKAPLSASMIKRYDEHHQDLTLLKALVRQQLPEKYKEIFFDQSKNGYAGYIDGGASQEEFYKFIKPILEKMDGTEELLVKLNREDLLRKQRTFDNGSIPHQIHLGELHAILRRQEDFYPFLKDNREKIEKILTFRIPYYVGPLARGNSRFAWMTRKSEETITPWNFEEVVDKGASAQSFIERMTNFDKNLPNEKVLPKHSLLYEYFTVYNELTKVKYVTEGMRKPAFLSGEQKKAIVDLLFKTNRKVTVKQLKEDYFKKIECFDSVEISGVEDRFNASLGTYHDLLKIIKDKDFLDNEENEDILEDIVLTLTLFEDREMIEERLKTYAHLFDDKVMKQLKRRRYTGWGRLSRKLINGIRDKQSGKTILDFLKSDGFANRNFMQLIHDDSLTFKEDIQKAQVSGQGDSLHEHIANLAGSPAIKKGILQTVKVVDELVKVMGRHKPENIVIEMARENQTTQKGQKNSRERMKRIEEGIKELGSQILKEHPVENTQLQNEKLYLYYLQNGRDMYVDQELDINRLSDYDVDHIVPQSFLKDDSIDNKVLTRSDKARGKSDNVPSEEVVKKMKNYWRQLLNAKLITQRKFDNLTKAERGGLSELDKAGFIKRQLVETRQITKHVAQILDSRMNTKYDENDKLIREVKVITLKSKLVSDFRKDFQFYKVREINNYHHAHDAYLNAVVGTALIKKYPKLESEFVYGDYKVYDVRKMIAKSEQEIGKATAKYFFYSNIMNFFKTEITLANGEIRKRPLIETNGETGEIVWDKGRDFATVRKVLSMPQVNIVKKTEVQTGGFSKESILPKRNSDKLIARKKDWDPKKYGGFDSPTVAYSVLVVAKVEKGKSKKLKSVKELLGITIMERSSFEKNPIDFLEAKGYKEVKKDLIIKLPKYSLFELENGRKRMLASAGELQKGNELALPSKYVNFLYLASHYEKLKGSPEDNEQKQLFVEQHKHYLDEIIEQISEFSKRVILADANLDKVLSAYNKHRDKPIREQAENIIHLFTLTNLGAPAAFKYFDTTIDRKRYTSTKEVLDATLIHQSITGLYETRIDLSQLGGDGGEAAAKPAPGGTLNIEDEYRLHETSKEPDVPLGSTWLSDFPQAWAETGGMGLAVRQAPLIIPLKATSTPVSIKQYPMSQEARLGIKPHIQRLLDQGILVPCQSPWNTPLLPVKKPGTNDYRPVQDLREVNKRVEDIHPTVPNPYNLLSGLPPSHQWYTVLDLKDAFFCLRLHPTSQPLFAFEWRDPEMGISGQLTWTRLPQGFKNSPTLFNEALHRDLADFRIQHPDLILLQYVDDLLLAATSEQDCQRGTRALLQTLGNLGYRASAKKAQICQKQVKYLGYLLKEGQRWLTEARKETVMGQPTPKTPRQLREFLGTAGFCRLWIPGFAEMAAPLYPLTKPGTLFNWGPDQQKAYQEIKQALLTAPALGLPDLTKPFELFVDEKQGYAKGVLTQKLGPWRRPVAYLSKKLDPVAAGWPPCLRMVAAIAVLTKDAGKLTMGQPLVILAPHAVEALVKQPPDRWLSNARMTHYQAMLLDTDRVQFGPVVALNPATLLPLPEKEAPHDCLEILAETHGTRPDLTDQPIPDADYTWYTDGSSFLQEGQRRAGAAVTTETEVIWARALPAGTSAQRAELIALTQALKMAEGKKLNVYTDSRYAFATAHVHGEIYRRRGWLTSEGREIKNKNEILALLKALFLPKRLSIIHCPGHQKGNSAEARGNRMADQAAREAAMKAVLETSTLLAGKRTADGSEFEKRTADGSEFESPKKKAKVE

SEQ ID NO: 983 - protein, 2090 aa, synthetic construct
MPAAKRVKLDGGDKKYSIGLDIGTNSVGWAVITDEYKVPSKKFKVLGNTDRHSIKKNLIGALLFDSGETAEATRLKRTARRRYTRRKNRICYLQEIFSNEMAKVDDSFFHRLEESFLVEEDKKHERHPIFGNIVDEVAYHEKYPTIYHLRKKLVDSTDKADLRLIYLALAHMIKFRGHFLIEGDLNPDNSDVDKLFIQLVQTYNQLFEENPINASGVDAKAILSARLSKSRRLENLIAQLPGEKKNGLFGNLIALSLGLTPNFKSNFDLAEDAKLQLSKDTYDDDLDNLLAQIGDQYADLFLAAKNLSDAILLSDILRVNTEITKAPLSASMIKRYDEHHQDLTLLKALVRQQLPEKYKEIFFDQSKNGYAGYIDGGASQEEFYKFIKPILEKMDGTEELLVKLNREDLLRKQRTFDNGSIPHQIHLGELHAILRRQEDFYPFLKDNREKIEKILTFRIPYYVGPLARGNSRFAWMTRKSEETITPWNFEEVVDKGASAQSFIERMTNFDKNLPNEKVLPKHSLLYEYFTVYNELTKVKYVTEGMRKPAFLSGEQKKAIVDLLFKTNRKVTVKQLKEDYFKKIECFDSVEISGVEDRFNASLGTYHDLLKIIKDKDFLDNEENEDILEDIVLTLTLFEDREMIEERLKTYAHLFDDKVMKQLKRRRYTGWGRLSRKLINGIRDKQSGKTILDFLKSDGFANRNFMQLIHDDSLTFKEDIQKAQVSGQGDSLHEHIANLAGSPAIKKGILQTVKVVDELVKVMGRHKPENIVIEMARENQTTQKGQKNSRERMKRIEEGIKELGSQILKEHPVENTQLQNEKLYLYYLQNGRDMYVDQELDINRLSDYDVDHIVPQSFLKDDSIDNKVLTRSDKARGKSDNVPSEEVVKKMKNYWRQLLNAKLITQRKFDNLTKAERGGLSELDKAGFIKRQLVETRQITKHVAQILDSRMNTKYDENDKLIREVKVITLKSKLVSDFRKDFQFYKVREINNYHHAHDAYLNAVVGTALIKKYPKLESEFVYGDYKVYDVRKMIAKSEQEIGKATAKYFFYSNIMNFFKTEITLANGEIRKRPLIETNGETGEIVWDKGRDFATVRKVLSMPQVNIVKKTEVQTGGFSKESILPKRNSDKLIARKKDWDPKKYGGFDSPTVAYSVLVVAKVEKGKSKKLKSVKELLGITIMERSSFEKNPIDFLEAKGYKEVKKDLIIKLPKYSLFELENGRKRMLASAGELQKGNELALPSKYVNFLYLASHYEKLKGSPEDNEQKQLFVEQHKHYLDEIIEQISEFSKRVILADANLDKVLSAYNKHRDKPIREQAENIIHLFTLTNLGAPAAFKYFDTTIDRKRYTSTKEVLDATLIHQSITGLYETRIDLSQLGGDGGPAPAPGGTLNIEDEYRLHETSKEPDVPLGSTWLSDFPQAWAETGGMGLAVRQAPLIIPLKATSTPVSIKQYPMSQEARLGIKPHIQRLLDQGILVPCQSPWNTPLLPVKKPGTNDYRPVQDLREVNKRVEDIHPTVPNPYNLLSGLPPSHQWYTVLDLKDAFFCLRLHPTSQPLFAFEWRDPEMGISGQLTWTRLPQGFKNSPTLFNEALHRDLADFRIQHPDLILLQYVDDLLLAATSEQDCQRGTRALLQTLGNLGYRASAKKAQICQKQVKYLGYLLKEGQRWLTEARKETVMGQPTPKTPRQLREFLGTAGFCRLWIPGFAEMAAPLYPLTKPGTLFNWGPDQQKAYQEIKQALLTAPALGLPDLTKPFELFVDEKQGYAKGVLTQKLGPWRRPVAYLSKKLDPVAAGWPPCLRMVAAIAVLTKDAGKLTMGQPLVILAPHAVEALVKQPPDRWLSNARMTHYQAMLLDTDRVQFGPVVALNPATLLPLPEKEAPHDCLEILAETHGTRPDLTDQPIPDADYTWYTDGSSFLQEGQRRAGAAVTTETEVIWARALPAGTSAQRAELIALTQALKMAEGKKLNVYTDSRYAFATAHVHGEIYRRRGWLTSEGREIKNKNEILALLKALFLPKRLSIIHCPGHQKGNSAEARGNRMADQAAREAAMKAVLETSTLLAGKRTADGSEFEKRTADGSEFESPKKKAKVE

SEQ ID NO: 984 - protein, 2094 aa, synthetic construct
MPAAKRVKLDGGDKKYSIGLDIGTNSVGWAVITDEYKVPSKKFKVLGNTDRHSIKKNLIGALLFDSGETAEATRLKRTARRRYTRRKNRICYLQEIFSNEMAKVDDSFFHRLEESFLVEEDKKHERHPIFGNIVDEVAYHEKYPTIYHLRKKLVDSTDKADLRLIYLALAHMIKFRGHFLIEGDLNPDNSDVDKLFIQLVQTYNQLFEENPINASGVDAKAILSARLSKSRRLENLIAQLPGEKKNGLFGNLIALSLGLTPNFKSNFDLAEDAKLQLSKDTYDDDLDNLLAQIGDQYADLFLAAKNLSDAILLSDILRVNTEITKAPLSASMIKRYDEHHQDLTLLKALVRQQLPEKYKEIFFDQSKNGYAGYIDGGASQEEFYKFIKPILEKMDGTEELLVKLNREDLLRKQRTFDNGSIPHQIHLGELHAILRRQEDFYPFLKDNREKIEKILTFRIPYYVGPLARGNSRFAWMTRKSEETITPWNFEEVVDKGASAQSFIERMTNFDKNLPNEKVLPKHSLLYEYFTVYNELTKVKYVTEGMRKPAFLSGEQKKAIVDLLFKTNRKVTVKQLKEDYFKKIECFDSVEISGVEDRFNASLGTYHDLLKIIKDKDFLDNEENEDILEDIVLTLTLFEDREMIEERLKTYAHLFDDKVMKQLKRRRYTGWGRLSRKLINGIRDKQSGKTILDFLKSDGFANRNFMQLIHDDSLTFKEDIQKAQVSGQGDSLHEHIANLAGSPAIKKGILQTVKVVDELVKVMGRHKPENIVIEMARENQTTQKGQKNSRERMKRIEEGIKELGSQILKEHPVENTQLQNEKLYLYYLQNGRDMYVDQELDINRLSDYDVDHIVPQSFLKDDSIDNKVLTRSDKARGKSDNVPSEEVVKKMKNYWRQLLNAKLITQRKFDNLTKAERGGLSELDKAGFIKRQLVETRQITKHVAQILDSRMNTKYDENDKLIREVKVITLKSKLVSDFRKDFQFYKVREINNYHHAHDAYLNAVVGTALIKKYPKLESEFVYGDYKVYDVRKMIAKSEQEIGKATAKYFFYSNIMNFFKTEITLANGEIRKRPLIETNGETGEIVWDKGRDFATVRKVLSMPQVNIVKKTEVQTGGFSKESILPKRNSDKLIARKKDWDPKKYGGFDSPTVAYSVLVVAKVEKGKSKKLKSVKELLGITIMERSSFEKNPIDFLEAKGYKEVKKDLIIKLPKYSLFELENGRKRMLASAGELQKGNELALPSKYVNFLYLASHYEKLKGSPEDNEQKQLFVEQHKHYLDEIIEQISEFSKRVILADANLDKVLSAYNKHRDKPIREQAENIIHLFTLTNLGAPAAFKYFDTTIDRKRYTSTKEVLDATLIHQSITGLYETRIDLSQLGGDGGGGGPAPGGSGGTLNIEDEYRLHETSKEPDVPLGSTWLSDFPQAWAETGGMGLAVRQAPLIIPLKATSTPVSIKQYPMSQEARLGIKPHIQRLLDQGILVPCQSPWNTPLLPVKKPGTNDYRPVQDLREVNKRVEDIHPTVPNPYNLLSGLPPSHQWYTVLDLKDAFFCLRLHPTSQPLFAFEWRDPEMGISGQLTWTRLPQGFKNSPTLFNEALHRDLADFRIQHPDLILLQYVDDLLLAATSEQDCQRGTRALLQTLGNLGYRASAKKAQICQKQVKYLGYLLKEGQRWLTEARKETVMGQPTPKTPRQLREFLGTAGFCRLWIPGFAEMAAPLYPLTKPGTLFNWGPDQQKAYQEIKQALLTAPALGLPDLTKPFELFVDEKQGYAKGVLTQKLGPWRRPVAYLSKKLDPVAAGWPPCLRMVAAIAVLTKDAGKLTMGQPLVILAPHAVEALVKQPPDRWLSNARMTHYQAMLLDTDRVQFGPVVALNPATLLPLPEKEAPHDCLEILAETHGTRPDLTDQPIPDADYTWYTDGSSFLQEGQRRAGAAVTTETEVIWARALPAGTSAQRAELIALTQALKMAEGKKLNVYTDSRYAFATAHVHGEIYRRRGWLTSEGREIKNKNEILALLKALFLPKRLSIIHCPGHQKGNSAEARGNRMADQAAREAAMKAVLETSTLLAGKRTADGSEFEKRTADGSEFESPKKKAKVE

SEQ ID NO: 985 - protein, 2096 aa, synthetic construct
MPAAKRVKLDGGDKKYSIGLDIGTNSVGWAVITDEYKVPSKKFKVLGNTDRHSIKKNLIGALLFDSGETAEATRLKRTARRRYTRRKNRICYLQEIFSNEMAKVDDSFFHRLEESFLVEEDKKHERHPIFGNIVDEVAYHEKYPTIYHLRKKLVDSTDKADLRLIYLALAHMIKFRGHFLIEGDLNPDNSDVDKLFIQLVQTYNQLFEENPINASGVDAKAILSARLSKSRRLENLIAQLPGEKKNGLFGNLIALSLGLTPNFKSNFDLAEDAKLQLSKDTYDDDLDNLLAQIGDQYADLFLAAKNLSDAILLSDILRVNTEITKAPLSASMIKRYDEHHQDLTLLKALVRQQLPEKYKEIFFDQSKNGYAGYIDGGASQEEFYKFIKPILEKMDGTEELLVKLNREDLLRKQRTFDNGSIPHQIHLGELHAILRRQEDFYPFLKDNREKIEKILTFRIPYYVGPLARGNSRFAWMTRKSEETITPWNFEEVVDKGASAQSFIERMTNFDKNLPNEKVLPKHSLLYEYFTVYNELTKVKYVTEGMRKPAFLSGEQKKAIVDLLFKTNRKVTVKQLKEDYFKKIECFDSVEISGVEDRFNASLGTYHDLLKIIKDKDFLDNEENEDILEDIVLTLTLFEDREMIEERLKTYAHLFDDKVMKQLKRRRYTGWGRLSRKLINGIRDKQSGKTILDFLKSDGFANRNFMQLIHDDSLTFKEDIQKAQVSGQGDSLHEHIANLAGSPAIKKGILQTVKVVDELVKVMGRHKPENIVIEMARENQTTQKGQKNSRERMKRIEEGIKELGSQILKEHPVENTQLQNEKLYLYYLQNGRDMYVDQELDINRLSDYDVDHIVPQSFLKDDSIDNKVLTRSDKARGKSDNVPSEEVVKKMKNYWRQLLNAKLITQRKFDNLTKAERGGLSELDKAGFIKRQLVETRQITKHVAQILDSRMNTKYDENDKLIREVKVITLKSKLVSDFRKDFQFYKVREINNYHHAHDAYLNAVVGTALIKKYPKLESEFVYGDYKVYDVRKMIAKSEQEIGKATAKYFFYSNIMNFFKTEITLANGEIRKRPLIETNGETGEIVWDKGRDFATVRKVLSMPQVNIVKKTEVQTGGFSKESILPKRNSDKLIARKKDWDPKKYGGFDSPTVAYSVLVVAKVEKGKSKKLKSVKELLGITIMERSSFEKNPIDFLEAKGYKEVKKDLIIKLPKYSLFELENGRKRMLASAGELQKGNELALPSKYVNFLYLASHYEKLKGSPEDNEQKQLFVEQHKHYLDEIIEQISEFSKRVILADANLDKVLSAYNKHRDKPIREQAENIIHLFTLTNLGAPAAFKYFDTTIDRKRYTSTKEVLDATLIHQSITGLYETRIDLSQLGGDGGGGGEAAAKPAPGGTLNIEDEYRLHETSKEPDVPLGSTWLSDFPQAWAETGGMGLAVRQAPLIIPLKATSTPVSIKQYPMSQEARLGIKPHIQRLLDQGILVPCQSPWNTPLLPVKKPGTNDYRPVQDLREVNKRVEDIHPTVPNPYNLLSGLPPSHQWYTVLDLKDAFFCLRLHPTSQPLFAFEWRDPEMGISGQLTWTRLPQGFKNSPTLFNEALHRDLADFRIQHPDLILLQYVDDLLLAATSEQDCQRGTRALLQTLGNLGYRASAKKAQICQKQVKYLGYLLKEGQRWLTEARKETVMGQPTPKTPRQLREFLGTAGFCRLWIPGFAEMAAPLYPLTKPGTLFNWGPDQQKAYQEIKQALLTAPALGLPDLTKPFELFVDEKQGYAKGVLTQKLGPWRRPVAYLSKKLDPVAAGWPPCLRMVAAIAVLTKDAGKLTMGQPLVILAPHAVEALVKQPPDRWLSNARMTHYQAMLLDTDRVQFGPVVALNPATLLPLPEKEAPHDCLEILAETHGTRPDLTDQPIPDADYTWYTDGSSFLQEGQRRAGAAVTTETEVIWARALPAGTSAQRAELIALTQALKMAEGKKLNVYTDSRYAFATAHVHGEIYRRRGWLTSEGREIKNKNEILALLKALFLPKRLSIIHCPGHQKGNSAEARGNRMADQAAREAAMKAVLETSTLLAGKRTADGSEFEKRTADGSEFESPKKKAKVE

SEQ ID NO: 986 - protein, 2094 aa, synthetic construct
MPAAKRVKLDGGDKKYSIGLDIGTNSVGWAVITDEYKVPSKKFKVLGNTDRHSIKKNLIGALLFDSGETAEATRLKRTARRRYTRRKNRICYLQEIFSNEMAKVDDSFFHRLEESFLVEEDKKHERHPIFGNIVDEVAYHEKYPTIYHLRKKLVDSTDKADLRLIYLALAHMIKFRGHFLIEGDLNPDNSDVDKLFIQLVQTYNQLFEENPINASGVDAKAILSARLSKSRRLENLIAQLPGEKKNGLFGNLIALSLGLTPNFKSNFDLAEDAKLQLSKDTYDDDLDNLLAQIGDQYADLFLAAKNLSDAILLSDILRVNTEITKAPLSASMIKRYDEHHQDLTLLKALVRQQLPEKYKEIFFDQSKNGYAGYIDGGASQEEFYKFIKPILEKMDGTEELLVKLNREDLLRKQRTFDNGSIPHQIHLGELHAILRRQEDFYPFLKDNREKIEKILTFRIPYYVGPLARGNSRFAWMTRKSEETITPWNFEEVVDKGASAQSFIERMTNFDKNLPNEKVLPKHSLLYEYFTVYNELTKVKYVTEGMRKPAFLSGEQKKAIVDLLFKTNRKVTVKQLKEDYFKKIECFDSVEISGVEDRFNASLGTYHDLLKIIKDKDFLDNEENEDILEDIVLTLTLFEDREMIEERLKTYAHLFDDKVMKQLKRRRYTGWGRLSRKLINGIRDKQSGKTILDFLKSDGFANRNFMQLIHDDSLTFKEDIQKAQVSGQGDSLHEHIANLAGSPAIKKGILQTVKVVDELVKVMGRHKPENIVIEMARENQTTQKGQKNSRERMKRIEEGIKELGSQILKEHPVENTQLQNEKLYLYYLQNGRDMYVDQELDINRLSDYDVDHIVPQSFLKDDSIDNKVLTRSDKARGKSDNVPSEEVVKKMKNYWRQLLNAKLITQRKFDNLTKAERGGLSELDKAGFIKRQLVETRQITKHVAQILDSRMNTKYDENDKLIREVKVITLKSKLVSDFRKDFQFYKVREINNYHHAHDAYLNAVVGTALIKKYPKLESEFVYGDYKVYDVRKMIAKSEQEIGKATAKYFFYSNIMNFFKTEITLANGEIRKRPLIETNGETGEIVWDKGRDFATVRKVLSMPQVNIVKKTEVQTGGFSKESILPKRNSDKLIARKKDWDPKKYGGFDSPTVAYSVLVVAKVEKGKSKKLKSVKELLGITIMERSSFEKNPIDFLEAKGYKEVKKDLIIKLPKYSLFELENGRKRMLASAGELQKGNELALPSKYVNFLYLASHYEKLKGSPEDNEQKQLFVEQHKHYLDEIIEQISEFSKRVILADANLDKVLSAYNKHRDKPIREQAENIIHLFTLTNLGAPAAFKYFDTTIDRKRYTSTKEVLDATLIHQSITGLYETRIDLSQLGGDGGGGSPAPGSSGGTLNIEDEYRLHETSKEPDVPLGSTWLSDFPQAWAETGGMGLAVRQAPLIIPLKATSTPVSIKQYPMSQEARLGIKPHIQRLLDQGILVPCQSPWNTPLLPVKKPGTNDYRPVQDLREVNKRVEDIHPTVPNPYNLLSGLPPSHQWYTVLDLKDAFFCLRLHPTSQPLFAFEWRDPEMGISGQLTWTRLPQGFKNSPTLFNEALHRDLADFRIQHPDLILLQYVDDLLLAATSEQDCQRGTRALLQTLGNLGYRASAKKAQICQKQVKYLGYLLKEGQRWLTEARKETVMGQPTPKTPRQLREFLGTAGFCRLWIPGFAEMAAPLYPLTKPGTLFNWGPDQQKAYQEIKQALLTAPALGLPDLTKPFELFVDEKQGYAKGVLTQKLGPWRRPVAYLSKKLDPVAAGWPPCLRMVAAIAVLTKDAGKLTMGQPLVILAPHAVEALVKQPPDRWLSNARMTHYQAMLLDTDRVQFGPVVALNPATLLPLPEKEAPHDCLEILAETHGTRPDLTDQPIPDADYTWYTDGSSFLQEGQRRAGAAVTTETEVIWARALPAGTSAQRAELIALTQALKMAEGKKLNVYTDSRYAFATAHVHGEIYRRRGWLTSEGREIKNKNEILALLKALFLPKRLSIIHCPGHQKGNSAEARGNRMADQAAREAAMKAVLETSTLLAGKRTADGSEFEKRTADGSEFESPKKKAKVE

SEQ ID NO: 987 - protein, 2094 aa, synthetic construct
MPAAKRVKLDGGDKKYSIGLDIGTNSVGWAVITDEYKVPSKKFKVLGNTDRHSIKKNLIGALLFDSGETAEATRLKRTARRRYTRRKNRICYLQEIFSNEMAKVDDSFFHRLEESFLVEEDKKHERHPIFGNIVDEVAYHEKYPTIYHLRKKLVDSTDKADLRLIYLALAHMIKFRGHFLIEGDLNPDNSDVDKLFIQLVQTYNQLFEENPINASGVDAKAILSARLSKSRRLENLIAQLPGEKKNGLFGNLIALSLGLTPNFKSNFDLAEDAKLQLSKDTYDDDLDNLLAQIGDQYADLFLAAKNLSDAILLSDILRVNTEITKAPLSASMIKRYDEHHQDLTLLKALVRQQLPEKYKEIFFDQSKNGYAGYIDGGASQEEFYKFIKPILEKMDGTEELLVKLNREDLLRKQRTFDNGSIPHQIHLGELHAILRRQEDFYPFLKDNREKIEKILTFRIPYYVGPLARGNSRFAWMTRKSEETITPWNFEEVVDKGASAQSFIERMTNFDKNLPNEKVLPKHSLLYEYFTVYNELTKVKYVTEGMRKPAFLSGEQKKAIVDLLFKTNRKVTVKQLKEDYFKKIECFDSVEISGVEDRFNASLGTYHDLLKIIKDKDFLDNEENEDILEDIVLTLTLFEDREMIEERLKTYAHLFDDKVMKQLKRRRYTGWGRLSRKLINGIRDKQSGKTILDFLKSDGFANRNFMQLIHDDSLTFKEDIQKAQVSGQGDSLHEHIANLAGSPAIKKGILQTVKVVDELVKVMGRHKPENIVIEMARENQTTQKGQKNSRERMKRIEEGIKELGSQILKEHPVENTQLQNEKLYLYYLQNGRDMYVDQELDINRLSDYDVDHIVPQSFLKDDSIDNKVLTRSDKARGKSDNVPSEEVVKKMKNYWRQLLNAKLITQRKFDNLTKAERGGLSELDKAGFIKRQLVETRQITKHVAQILDSRMNTKYDENDKLIREVKVITLKSKLVSDFRKDFQFYKVREINNYHHAHDAYLNAVVGTALIKKYPKLESEFVYGDYKVYDVRKMIAKSEQEIGKATAKYFFYSNIMNFFKTEITLANGEIRKRPLIETNGETGEIVWDKGRDFATVRKVLSMPQVNIVKKTEVQTGGFSKESILPKRNSDKLIARKKDWDPKKYGGFDSPTVAYSVLVVAKVEKGKSKKLKSVKELLGITIMERSSFEKNPIDFLEAKGYKEVKKDLIIKLPKYSLFELENGRKRMLASAGELQKGNELALPSKYVNFLYLASHYEKLKGSPEDNEQKQLFVEQHKHYLDEIIEQISEFSKRVILADANLDKVLSAYNKHRDKPIREQAENIIHLFTLTNLGAPAAFKYFDTTIDRKRYTSTKEVLDATLIHQSITGLYETRIDLSQLGGDGGGSSPAPGGSGGTLNIEDEYRLHETSKEPDVPLGSTWLSDFPQAWAETGGMGLAVRQAPLIIPLKATSTPVSIKQYPMSQEARLGIKPHIQRLLDQGILVPCQSPWNTPLLPVKKPGTNDYRPVQDLREVNKRVEDIHPTVPNPYNLLSGLPPSHQWYTVLDLKDAFFCLRLHPTSQPLFAFEWRDPEMGISGQLTWTRLPQGFKNSPTLFNEALHRDLADFRIQHPDLILLQYVDDLLLAATSEQDCQRGTRALLQTLGNLGYRASAKKAQICQKQVKYLGYLLKEGQRWLTEARKETVMGQPTPKTPRQLREFLGTAGFCRLWIPGFAEMAAPLYPLTKPGTLFNWGPDQQKAYQEIKQALLTAPALGLPDLTKPFELFVDEKQGYAKGVLTQKLGPWRRPVAYLSKKLDPVAAGWPPCLRMVAAIAVLTKDAGKLTMGQPLVILAPHAVEALVKQPPDRWLSNARMTHYQAMLLDTDRVQFGPVVALNPATLLPLPEKEAPHDCLEILAETHGTRPDLTDQPIPDADYTWYTDGSSFLQEGQRRAGAAVTTETEVIWARALPAGTSAQRAELIALTQALKMAEGKKLNVYTDSRYAFATAHVHGEIYRRRGWLTSEGREIKNKNEILALLKALFLPKRLSIIHCPGHQKGNSAEARGNRMADQAAREAAMKAVLETSTLLAGKRTADGSEFEKRTADGSEFESPKKKAKVE

SEQ ID NO: 988 - protein, 2090 aa, synthetic construct
MPAAKRVKLDGGDKKYSIGLDIGTNSVGWAVITDEYKVPSKKFKVLGNTDRHSIKKNLIGALLFDSGETAEATRLKRTARRRYTRRKNRICYLQEIFSNEMAKVDDSFFHRLEESFLVEEDKKHERHPIFGNIVDEVAYHEKYPTIYHLRKKLVDSTDKADLRLIYLALAHMIKFRGHFLIEGDLNPDNSDVDKLFIQLVQTYNQLFEENPINASGVDAKAILSARLSKSRRLENLIAQLPGEKKNGLFGNLIALSLGLTPNFKSNFDLAEDAKLQLSKDTYDDDLDNLLAQIGDQYADLFLAAKNLSDAILLSDILRVNTEITKAPLSASMIKRYDEHHQDLTLLKALVRQQLPEKYKEIFFDQSKNGYAGYIDGGASQEEFYKFIKPILEKMDGTEELLVKLNREDLLRKQRTFDNGSIPHQIHLGELHAILRRQEDFYPFLKDNREKIEKILTFRIPYYVGPLARGNSRFAWMTRKSEETITPWNFEEVVDKGASAQSFIERMTNFDKNLPNEKVLPKHSLLYEYFTVYNELTKVKYVTEGMRKPAFLSGEQKKAIVDLLFKTNRKVTVKQLKEDYFKKIECFDSVEISGVEDRFNASLGTYHDLLKIIKDKDFLDNEENEDILEDIVLTLTLFEDREMIEERLKTYAHLFDDKVMKQLKRRRYTGWGRLSRKLINGIRDKQSGKTILDFLKSDGFANRNFMQLIHDDSLTFKEDIQKAQVSGQGDSLHEHIANLAGSPAIKKGILQTVKVVDELVKVMGRHKPENIVIEMARENQTTQKGQKNSRERMKRIEEGIKELGSQILKEHPVENTQLQNEKLYLYYLQNGRDMYVDQELDINRLSDYDVDHIVPQSFLKDDSIDNKVLTRSDKARGKSDNVPSEEVVKKMKNYWRQLLNAKLITQRKFDNLTKAERGGLSELDKAGFIKRQLVETRQITKHVAQILDSRMNTKYDENDKLIREVKVITLKSKLVSDFRKDFQFYKVREINNYHHAHDAYLNAVVGTALIKKYPKLESEFVYGDYKVYDVRKMIAKSEQEIGKATAKYFFYSNIMNFFKTEITLANGEIRKRPLIETNGETGEIVWDKGRDFATVRKVLSMPQVNIVKKTEVQTGGFSKESILPKRNSDKLIARKKDWDPKKYGGFDSPTVAYSVLVVAKVEKGKSKKLKSVKELLGITIMERSSFEKNPIDFLEAKGYKEVKKDLIIKLPKYSLFELENGRKRMLASAGELQKGNELALPSKYVNFLYLASHYEKLKGSPEDNEQKQLFVEQHKHYLDEIIEQISEFSKRVILADANLDKVLSAYNKHRDKPIREQAENIIHLFTLTNLGAPAAFKYFDTTIDRKRYTSTKEVLDATLIHQSITGLYETRIDLSQLGGDGGEAAAKGGTLNIEDEYRLHETSKEPDVPLGSTWLSDFPQAWAETGGMGLAVRQAPLIIPLKATSTPVSIKQYPMSQEARLGIKPHIQRLLDQGILVPCQSPWNTPLLPVKKPGTNDYRPVQDLREVNKRVEDIHPTVPNPYNLLSGLPPSHQWYTVLDLKDAFFCLRLHPTSQPLFAFEWRDPEMGISGQLTWTRLPQGFKNSPTLFNEALHRDLADFRIQHPDLILLQYVDDLLLAATSEQDCQRGTRALLQTLGNLGYRASAKKAQICQKQVKYLGYLLKEGQRWLTEARKETVMGQPTPKTPRQLREFLGTAGFCRLWIPGFAEMAAPLYPLTKPGTLFNWGPDQQKAYQEIKQALLTAPALGLPDLTKPFELFVDEKQGYAKGVLTQKLGPWRRPVAYLSKKLDPVAAGWPPCLRMVAAIAVLTKDAGKLTMGQPLVILAPHAVEALVKQPPDRWLSNARMTHYQAMLLDTDRVQFGPVVALNPATLLPLPEKEAPHDCLEILAETHGTRPDLTDQPIPDADYTWYTDGSSFLQEGQRRAGAAVTTETEVIWARALPAGTSAQRAELIALTQALKMAEGKKLNVYTDSRYAFATAHVHGEIYRRRGWLTSEGREIKNKNEILALLKALFLPKRLSIIHCPGHQKGNSAEARGNRMADQAAREAAMKAVLETSTLLAGKRTADGSEFEKRTADGSEFESPKKKAKVE

SEQ ID NO: 989 - protein, 2094 aa, synthetic construct
MPAAKRVKLDGGDKKYSIGLDIGTNSVGWAVITDEYKVPSKKFKVLGNTDRHSIKKNLIGALLFDSGETAEATRLKRTARRRYTRRKNRICYLQEIFSNEMAKVDDSFFHRLEESFLVEEDKKHERHPIFGNIVDEVAYHEKYPTIYHLRKKLVDSTDKADLRLIYLALAHMIKFRGHFLIEGDLNPDNSDVDKLFIQLVQTYNQLFEENPINASGVDAKAILSARLSKSRRLENLIAQLPGEKKNGLFGNLIALSLGLTPNFKSNFDLAEDAKLQLSKDTYDDDLDNLLAQIGDQYADLFLAAKNLSDAILLSDILRVNTEITKAPLSASMIKRYDEHHQDLTLLKALVRQQLPEKYKEIFFDQSKNGYAGYIDGGASQEEFYKFIKPILEKMDGTEELLVKLNREDLLRKQRTFDNGSIPHQIHLGELHAILRRQEDFYPFLKDNREKIEKILTFRIPYYVGPLARGNSRFAWMTRKSEETITPWNFEEVVDKGASAQSFIERMTNFDKNLPNEKVLPKHSLLYEYFTVYNELTKVKYVTEGMRKPAFLSGEQKKAIVDLLFKTNRKVTVKQLKEDYFKKIECFDSVEISGVEDRFNASLGTYHDLLKIIKDKDFLDNEENEDILEDIVLTLTLFEDREMIEERLKTYAHLFDDKVMKQLKRRRYTGWGRLSRKLINGIRDKQSGKTILDFLKSDGFANRNFMQLIHDDSLTFKEDIQKAQVSGQGDSLHEHIANLAGSPAIKKGILQTVKVVDELVKVMGRHKPENIVIEMARENQTTQKGQKNSRERMKRIEEGIKELGSQILKEHPVENTQLQNEKLYLYYLQNGRDMYVDQELDINRLSDYDVDHIVPQSFLKDDSIDNKVLTRSDKARGKSDNVPSEEVVKKMKNYWRQLLNAKLITQRKFDNLTKAERGGLSELDKAGFIKRQLVETRQITKHVAQILDSRMNTKYDENDKLIREVKVITLKSKLVSDFRKDFQFYKVREINNYHHAHDAYLNAVVGTALIKKYPKLESEFVYGDYKVYDVRKMIAKSEQEIGKATAKYFFYSNIMNFFKTEITLANGEIRKRPLIETNGETGEIVWDKGRDFATVRKVLSMPQVNIVKKTEVQTGGFSKESILPKRNSDKLIARKKDWDPKKYGGFDSPTVAYSVLVVAKVEKGKSKKLKSVKELLGITIMERSSFEKNPIDFLEAKGYKEVKKDLIIKLPKYSLFELENGRKRMLASAGELQKGNELALPSKYVNFLYLASHYEKLKGSPEDNEQKQLFVEQHKHYLDEIIEQISEFSKRVILADANLDKVLSAYNKHRDKPIREQAENIIHLFTLTNLGAPAAFKYFDTTIDRKRYTSTKEVLDATLIHQSITGLYETRIDLSQLGGDGGGGGGGSGSSGGTLNIEDEYRLHETSKEPDVPLGSTWLSDFPQAWAETGGMGLAVRQAPLIIPLKATSTPVSIKQYPMSQEARLGIKPHIQRLLDQGILVPCQSPWNTPLLPVKKPGTNDYRPVQDLREVNKRVEDIHPTVPNPYNLLSGLPPSHQWYTVLDLKDAFFCLRLHPTSQPLFAFEWRDPEMGISGQLTWTRLPQGFKNSPTLFNEALHRDLADFRIQHPDLILLQYVDDLLLAATSEQDCQRGTRALLQTLGNLGYRASAKKAQICQKQVKYLGYLLKEGQRWLTEARKETVMGQPTPKTPRQLREFLGTAGFCRLWIPGFAEMAAPLYPLTKPGTLFNWGPDQQKAYQEIKQALLTAPALGLPDLTKPFELFVDEKQGYAKGVLTQKLGPWRRPVAYLSKKLDPVAAGWPPCLRMVAAIAVLTKDAGKLTMGQPLVILAPHAVEALVKQPPDRWLSNARMTHYQAMLLDTDRVQFGPVVALNPATLLPLPEKEAPHDCLEILAETHGTRPDLTDQPIPDADYTWYTDGSSFLQEGQRRAGAAVTTETEVIWARALPAGTSAQRAELIALTQALKMAEGKKLNVYTDSRYAFATAHVHGEIYRRRGWLTSEGREIKNKNEILALLKALFLPKRLSIIHCPGHQKGNSAEARGNRMADQAAREAAMKAVLETSTLLAGKRTADGSEFEKRTADGSEFESPKKKAKVE

SEQ ID NO: 990 - protein, 2091 aa, synthetic construct
MPAAKRVKLDGGDKKYSIGLDIGTNSVGWAVITDEYKVPSKKFKVLGNTDRHSIKKNLIGALLFDSGETAEATRLKRTARRRYTRRKNRICYLQEIFSNEMAKVDDSFFHRLEESFLVEEDKKHERHPIFGNIVDEVAYHEKYPTIYHLRKKLVDSTDKADLRLIYLALAHMIKFRGHFLIEGDLNPDNSDVDKLFIQLVQTYNQLFEENPINASGVDAKAILSARLSKSRRLENLIAQLPGEKKNGLFGNLIALSLGLTPNFKSNFDLAEDAKLQLSKDTYDDDLDNLLAQIGDQYADLFLAAKNLSDAILLSDILRVNTEITKAPLSASMIKRYDEHHQDLTLLKALVRQQLPEKYKEIFFDQSKNGYAGYIDGGASQEEFYKFIKPILEKMDGTEELLVKLNREDLLRKQRTFDNGSIPHQIHLGELHAILRRQEDFYPFLKDNREKIEKILTFRIPYYVGPLARGNSRFAWMTRKSEETITPWNFEEVVDKGASAQSFIERMTNFDKNLPNEKVLPKHSLLYEYFTVYNELTKVKYVTEGMRKPAFLSGEQKKAIVDLLFKTNRKVTVKQLKEDYFKKIECFDSVEISGVEDRFNASLGTYHDLLKIIKDKDFLDNEENEDILEDIVLTLTLFEDREMIEERLKTYAHLFDDKVMKQLKRRRYTGWGRLSRKLINGIRDKQSGKTILDFLKSDGFANRNFMQLIHDDSLTFKEDIQKAQVSGQGDSLHEHIANLAGSPAIKKGILQTVKVVDELVKVMGRHKPENIVIEMARENQTTQKGQKNSRERMKRIEEGIKELGSQILKEHPVENTQLQNEKLYLYYLQNGRDMYVDQELDINRLSDYDVDHIVPQSFLKDDSIDNKVLTRSDKARGKSDNVPSEEVVKKMKNYWRQLLNAKLITQRKFDNLTKAERGGLSELDKAGFIKRQLVETRQITKHVAQILDSRMNTKYDENDKLIREVKVITLKSKLVSDFRKDFQFYKVREINNYHHAHDAYLNAVVGTALIKKYPKLESEFVYGDYKVYDVRKMIAKSEQEIGKATAKYFFYSNIMNFFKTEITLANGEIRKRPLIETNGETGEIVWDKGRDFATVRKVLSMPQVNIVKKTEVQTGGFSKESILPKRNSDKLIARKKDWDPKKYGGFDSPTVAYSVLVVAKVEKGKSKKLKSVKELLGITIMERSSFEKNPIDFLEAKGYKEVKKDLIIKLPKYSLFELENGRKRMLASAGELQKGNELALPSKYVNFLYLASHYEKLKGSPEDNEQKQLFVEQHKHYLDEIIEQISEFSKRVILADANLDKVLSAYNKHRDKPIREQAENIIHLFTLTNLGAPAAFKYFDTTIDRKRYTSTKEVLDATLIHQSITGLYETRIDLSQLGGDGGPAPGSSGGTLNIEDEYRLHETSKEPDVPLGSTWLSDFPQAWAETGGMGLAVRQAPLIIPLKATSTPVSIKQYPMSQEARLGIKPHIQRLLDQGILVPCQSPWNTPLLPVKKPGTNDYRPVQDLREVNKRVEDIHPTVPNPYNLLSGLPPSHQWYTVLDLKDAFFCLRLHPTSQPLFAFEWRDPEMGISGQLTWTRLPQGFKNSPTLFNEALHRDLADFRIQHPDLILLQYVDDLLLAATSEQDCQRGTRALLQTLGNLGYRASAKKAQICQKQVKYLGYLLKEGQRWLTEARKETVMGQPTPKTPRQLREFLGTAGFCRLWIPGFAEMAAPLYPLTKPGTLFNWGPDQQKAYQEIKQALLTAPALGLPDLTKPFELFVDEKQGYAKGVLTQKLGPWRRPVAYLSKKLDPVAAGWPPCLRMVAAIAVLTKDAGKLTMGQPLVILAPHAVEALVKQPPDRWLSNARMTHYQAMLLDTDRVQFGPVVALNPATLLPLPEKEAPHDCLEILAETHGTRPDLTDQPIPDADYTWYTDGSSFLQEGQRRAGAAVTTETEVIWARALPAGTSAQRAELIALTQALKMAEGKKLNVYTDSRYAFATAHVHGEIYRRRGWLTSEGREIKNKNEILALLKALFLPKRLSIIHCPGHQKGNSAEARGNRMADQAAREAAMKAVLETSTLLAGKRTADGSEFEKRTADGSEFESPKKKAKVE

SEQ ID NO: 991 - protein, 2095 aa, synthetic construct
MPAAKRVKLDGGDKKYSIGLDIGTNSVGWAVITDEYKVPSKKFKVLGNTDRHSIKKNLIGALLFDSGETAEATRLKRTARRRYTRRKNRICYLQEIFSNEMAKVDDSFFHRLEESFLVEEDKKHERHPIFGNIVDEVAYHEKYPTIYHLRKKLVDSTDKADLRLIYLALAHMIKFRGHFLIEGDLNPDNSDVDKLFIQLVQTYNQLFEENPINASGVDAKAILSARLSKSRRLENLIAQLPGEKKNGLFGNLIALSLGLTPNFKSNFDLAEDAKLQLSKDTYDDDLDNLLAQIGDQYADLFLAAKNLSDAILLSDILRVNTEITKAPLSASMIKRYDEHHQDLTLLKALVRQQLPEKYKEIFFDQSKNGYAGYIDGGASQEEFYKFIKPILEKMDGTEELLVKLNREDLLRKQRTFDNGSIPHQIHLGELHAILRRQEDFYPFLKDNREKIEKILTFRIPYYVGPLARGNSRFAWMTRKSEETITPWNFEEVVDKGASAQSFIERMTNFDKNLPNEKVLPKHSLLYEYFTVYNELTKVKYVTEGMRKPAFLSGEQKKAIVDLLFKTNRKVTVKQLKEDYFKKIECFDSVEISGVEDRFNASLGTYHDLLKIIKDKDFLDNEENEDILEDIVLTLTLFEDREMIEERLKTYAHLFDDKVMKQLKRRRYTGWGRLSRKLINGIRDKQSGKTILDFLKSDGFANRNFMQLIHDDSLTFKEDIQKAQVSGQGDSLHEHIANLAGSPAIKKGILQTVKVVDELVKVMGRHKPENIVIEMARENQTTQKGQKNSRERMKRIEEGIKELGSQILKEHPVENTQLQNEKLYLYYLQNGRDMYVDQELDINRLSDYDVDHIVPQSFLKDDSIDNKVLTRSDKARGKSDNVPSEEVVKKMKNYWRQLLNAKLITQRKFDNLTKAERGGLSELDKAGFIKRQLVETRQITKHVAQILDSRMNTKYDENDKLIREVKVITLKSKLVSDFRKDFQFYKVREINNYHHAHDAYLNAVVGTALIKKYPKLESEFVYGDYKVYDVRKMIAKSEQEIGKATAKYFFYSNIMNFFKTEITLANGEIRKRPLIETNGETGEIVWDKGRDFATVRKVLSMPQVNIVKKTEVQTGGFSKESILPKRNSDKLIARKKDWDPKKYGGFDSPTVAYSVLVVAKVEKGKSKKLKSVKELLGITIMERSSFEKNPIDFLEAKGYKEVKKDLIIKLPKYSLFELENGRKRMLASAGELQKGNELALPSKYVNFLYLASHYEKLKGSPEDNEQKQLFVEQHKHYLDEIIEQISEFSKRVILADANLDKVLSAYNKHRDKPIREQAENIIHLFTLTNLGAPAAFKYFDTTIDRKRYTSTKEVLDATLIHQSITGLYETRIDLSQLGGDGGEAAAKEAAAKGGTLNIEDEYRLHETSKEPDVPLGSTWLSDFPQAWAETGGMGLAVRQAPLIIPLKATSTPVSIKQYPMSQEARLGIKPHIQRLLDQGILVPCQSPWNTPLLPVKKPGTNDYRPVQDLREVNKRVEDIHPTVPNPYNLLSGLPPSHQWYTVLDLKDAFFCLRLHPTSQPLFAFEWRDPEMGISGQLTWTRLPQGFKNSPTLFNEALHRDLADFRIQHPDLILLQYVDDLLLAATSEQDCQRGTRALLQTLGNLGYRASAKKAQICQKQVKYLGYLLKEGQRWLTEARKETVMGQPTPKTPRQLREFLGTAGFCRLWIPGFAEMAAPLYPLTKPGTLFNWGPDQQKAYQEIKQALLTAPALGLPDLTKPFELFVDEKQGYAKGVLTQKLGPWRRPVAYLSKKLDPVAAGWPPCLRMVAAIAVLTKDAGKLTMGQPLVILAPHAVEALVKQPPDRWLSNARMTHYQAMLLDTDRVQFGPVVALNPATLLPLPEKEAPHDCLEILAETHGTRPDLTDQPIPDADYTWYTDGSSFLQEGQRRAGAAVTTETEVIWARALPAGTSAQRAELIALTQALKMAEGKKLNVYTDSRYAFATAHVHGEIYRRRGWLTSEGREIKNKNEILALLKALFLPKRLSIIHCPGHQKGNSAEARGNRMADQAAREAAMKAVLETSTLLAGKRTADGSEFEKRTADGSEFESPKKKAKVE

SEQ ID NO: 992 - protein, 2091 aa, synthetic construct
MPAAKRVKLDGGDKKYSIGLDIGTNSVGWAVITDEYKVPSKKFKVLGNTDRHSIKKNLIGALLFDSGETAEATRLKRTARRRYTRRKNRICYLQEIFSNEMAKVDDSFFHRLEESFLVEEDKKHERHPIFGNIVDEVAYHEKYPTIYHLRKKLVDSTDKADLRLIYLALAHMIKFRGHFLIEGDLNPDNSDVDKLFIQLVQTYNQLFEENPINASGVDAKAILSARLSKSRRLENLIAQLPGEKKNGLFGNLIALSLGLTPNFKSNFDLAEDAKLQLSKDTYDDDLDNLLAQIGDQYADLFLAAKNLSDAILLSDILRVNTEITKAPLSASMIKRYDEHHQDLTLLKALVRQQLPEKYKEIFFDQSKNGYAGYIDGGASQEEFYKFIKPILEKMDGTEELLVKLNREDLLRKQRTFDNGSIPHQIHLGELHAILRRQEDFYPFLKDNREKIEKILTFRIPYYVGPLARGNSRFAWMTRKSEETITPWNFEEVVDKGASAQSFIERMTNFDKNLPNEKVLPKHSLLYEYFTVYNELTKVKYVTEGMRKPAFLSGEQKKAIVDLLFKTNRKVTVKQLKEDYFKKIECFDSVEISGVEDRFNASLGTYHDLLKIIKDKDFLDNEENEDILEDIVLTLTLFEDREMIEERLKTYAHLFDDKVMKQLKRRRYTGWGRLSRKLINGIRDKQSGKTILDFLKSDGFANRNFMQLIHDDSLTFKEDIQKAQVSGQGDSLHEHIANLAGSPAIKKGILQTVKVVDELVKVMGRHKPENIVIEMARENQTTQKGQKNSRERMKRIEEGIKELGSQILKEHPVENTQLQNEKLYLYYLQNGRDMYVDQELDINRLSDYDVDHIVPQSFLKDDSIDNKVLTRSDKARGKSDNVPSEEVVKKMKNYWRQLLNAKLITQRKFDNLTKAERGGLSELDKAGFIKRQLVETRQITKHVAQILDSRMNTKYDENDKLIREVKVITLKSKLVSDFRKDFQFYKVREINNYHHAHDAYLNAVVGTALIKKYPKLESEFVYGDYKVYDVRKMIAKSEQEIGKATAKYFFYSNIMNFFKTEITLANGEIRKRPLIETNGETGEIVWDKGRDFATVRKVLSMPQVNIVKKTEVQTGGFSKESILPKRNSDKLIARKKDWDPKKYGGFDSPTVAYSVLVVAKVEKGKSKKLKSVKELLGITIMERSSFEKNPIDFLEAKGYKEVKKDLIIKLPKYSLFELENGRKRMLASAGELQKGNELALPSKYVNFLYLASHYEKLKGSPEDNEQKQLFVEQHKHYLDEIIEQISEFSKRVILADANLDKVLSAYNKHRDKPIREQAENIIHLFTLTNLGAPAAFKYFDTTIDRKRYTSTKEVLDATLIHQSITGLYETRIDLSQLGGDGGGSSGGGGGTLNIEDEYRLHETSKEPDVPLGSTWLSDFPQAWAETGGMGLAVRQAPLIIPLKATSTPVSIKQYPMSQEARLGIKPHIQRLLDQGILVPCQSPWNTPLLPVKKPGTNDYRPVQDLREVNKRVEDIHPTVPNPYNLLSGLPPSHQWYTVLDLKDAFFCLRLHPTSQPLFAFEWRDPEMGISGQLTWTRLPQGFKNSPTLFNEALHRDLADFRIQHPDLILLQYVDDLLLAATSEQDCQRGTRALLQTLGNLGYRASAKKAQICQKQVKYLGYLLKEGQRWLTEARKETVMGQPTPKTPRQLREFLGTAGFCRLWIPGFAEMAAPLYPLTKPGTLFNWGPDQQKAYQEIKQALLTAPALGLPDLTKPFELFVDEKQGYAKGVLTQKLGPWRRPVAYLSKKLDPVAAGWPPCLRMVAAIAVLTKDAGKLTMGQPLVILAPHAVEALVKQPPDRWLSNARMTHYQAMLLDTDRVQFGPVVALNPATLLPLPEKEAPHDCLEILAETHGTRPDLTDQPIPDADYTWYTDGSSFLQEGQRRAGAAVTTETEVIWARALPAGTSAQRAELIALTQALKMAEGKKLNVYTDSRYAFATAHVHGEIYRRRGWLTSEGREIKNKNEILALLKALFLPKRLSIIHCPGHQKGNSAEARGNRMADQAAREAAMKAVLETSTLLAGKRTADGSEFEKRTADGSEFESPKKKAKVE

SEQ ID NO: 993 - protein, 2093 aa, synthetic construct
MPAAKRVKLDGGDKKYSIGLDIGTNSVGWAVITDEYKVPSKKFKVLGNTDRHSIKKNLIGALLFDSGETAEATRLKRTARRRYTRRKNRICYLQEIFSNEMAKVDDSFFHRLEESFLVEEDKKHERHPIFGNIVDEVAYHEKYPTIYHLRKKLVDSTDKADLRLIYLALAHMIKFRGHFLIEGDLNPDNSDVDKLFIQLVQTYNQLFEENPINASGVDAKAILSARLSKSRRLENLIAQLPGEKKNGLFGNLIALSLGLTPNFKSNFDLAEDAKLQLSKDTYDDDLDNLLAQIGDQYADLFLAAKNLSDAILLSDILRVNTEITKAPLSASMIKRYDEHHQDLTLLKALVRQQLPEKYKEIFFDQSKNGYAGYIDGGASQEEFYKFIKPILEKMDGTEELLVKLNREDLLRKQRTFDNGSIPHQIHLGELHAILRRQEDFYPFLKDNREKIEKILTFRIPYYVGPLARGNSRFAWMTRKSEETITPWNFEEVVDKGASAQSFIERMTNFDKNLPNEKVLPKHSLLYEYFTVYNELTKVKYVTEGMRKPAFLSGEQKKAIVDLLFKTNRKVTVKQLKEDYFKKIECFDSVEISGVEDRFNASLGTYHDLLKIIKDKDFLDNEENEDILEDIVLTLTLFEDREMIEERLKTYAHLFDDKVMKQLKRRRYTGWGRLSRKLINGIRDKQSGKTILDFLKSDGFANRNFMQLIHDDSLTFKEDIQKAQVSGQGDSLHEHIANLAGSPAIKKGILQTVKVVDELVKVMGRHKPENIVIEMARENQTTQKGQKNSRERMKRIEEGIKELGSQILKEHPVENTQLQNEKLYLYYLQNGRDMYVDQELDINRLSDYDVDHIVPQSFLKDDSIDNKVLTRSDKARGKSDNVPSEEVVKKMKNYWRQLLNAKLITQRKFDNLTKAERGGLSELDKAGFIKRQLVETRQITKHVAQILDSRMNTKYDENDKLIREVKVITLKSKLVSDFRKDFQFYKVREINNYHHAHDAYLNAVVGTALIKKYPKLESEFVYGDYKVYDVRKMIAKSEQEIGKATAKYFFYSNIMNFFKTEITLANGEIRKRPLIETNGETGEIVWDKGRDFATVRKVLSMPQVNIVKKTEVQTGGFSKESILPKRNSDKLIARKKDWDPKKYGGFDSPTVAYSVLVVAKVEKGKSKKLKSVKELLGITIMERSSFEKNPIDFLEAKGYKEVKKDLIIKLPKYSLFELENGRKRMLASAGELQKGNELALPSKYVNFLYLASHYEKLKGSPEDNEQKQLFVEQHKHYLDEIIEQISEFSKRVILADANLDKVLSAYNKHRDKPIREQAENIIHLFTLTNLGAPAAFKYFDTTIDRKRYTSTKEVLDATLIHQSITGLYETRIDLSQLGGDGGGGSEAAAKGGTLNIEDEYRLHETSKEPDVPLGSTWLSDFPQAWAETGGMGLAVRQAPLIIPLKATSTPVSIKQYPMSQEARLGIKPHIQRLLDQGILVPCQSPWNTPLLPVKKPGTNDYRPVQDLREVNKRVEDIHPTVPNPYNLLSGLPPSHQWYTVLDLKDAFFCLRLHPTSQPLFAFEWRDPEMGISGQLTWTRLPQGFKNSPTLFNEALHRDLADFRIQHPDLILLQYVDDLLLAATSEQDCQRGTRALLQTLGNLGYRASAKKAQICQKQVKYLGYLLKEGQRWLTEARKETVMGQPTPKTPRQLREFLGTAGFCRLWIPGFAEMAAPLYPLTKPGTLFNWGPDQQKAYQEIKQALLTAPALGLPDLTKPFELFVDEKQGYAKGVLTQKLGPWRRPVAYLSKKLDPVAAGWPPCLRMVAAIAVLTKDAGKLTMGQPLVILAPHAVEALVKQPPDRWLSNARMTHYQAMLLDTDRVQFGPVVALNPATLLPLPEKEAPHDCLEILAETHGTRPDLTDQPIPDADYTWYTDGSSFLQEGQRRAGAAVTTETEVIWARALPAGTSAQRAELIALTQALKMAEGKKLNVYTDSRYAFATAHVHGEIYRRRGWLTSEGREIKNKNEILALLKALFLPKRLSIIHCPGHQKGNSAEARGNRMADQAAREAAMKAVLETSTLLAGKRTADGSEFEKRTADGSEFESPKKKAKVE

SEQ ID NO: 994 - protein, 2100 aa, synthetic construct
MPAAKRVKLDGGDKKYSIGLDIGTNSVGWAVITDEYKVPSKKFKVLGNTDRHSIKKNLIGALLFDSGETAEATRLKRTARRRYTRRKNRICYLQEIFSNEMAKVDDSFFHRLEESFLVEEDKKHERHPIFGNIVDEVAYHEKYPTIYHLRKKLVDSTDKADLRLIYLALAHMIKFRGHFLIEGDLNPDNSDVDKLFIQLVQTYNQLFEENPINASGVDAKAILSARLSKSRRLENLIAQLPGEKKNGLFGNLIALSLGLTPNFKSNFDLAEDAKLQLSKDTYDDDLDNLLAQIGDQYADLFLAAKNLSDAILLSDILRVNTEITKAPLSASMIKRYDEHHQDLTLLKALVRQQLPEKYKEIFFDQSKNGYAGYIDGGASQEEFYKFIKPILEKMDGTEELLVKLNREDLLRKQRTFDNGSIPHQIHLGELHAILRRQEDFYPFLKDNREKIEKILTFRIPYYVGPLARGNSRFAWMTRKSEETITPWNFEEVVDKGASAQSFIERMTNFDKNLPNEKVLPKHSLLYEYFTVYNELTKVKYVTEGMRKPAFLSGEQKKAIVDLLFKTNRKVTVKQLKEDYFKKIECFDSVEISGVEDRFNASLGTYHDLLKIIKDKDFLDNEENEDILEDIVLTLTLFEDREMIEERLKTYAHLFDDKVMKQLKRRRYTGWGRLSRKLINGIRDKQSGKTILDFLKSDGFANRNFMQLIHDDSLTFKEDIQKAQVSGQGDSLHEHIANLAGSPAIKKGILQTVKVVDELVKVMGRHKPENIVIEMARENQTTQKGQKNSRERMKRIEEGIKELGSQILKEHPVENTQLQNEKLYLYYLQNGRDMYVDQELDINRLSDYDVDHIVPQSFLKDDSIDNKVLTRSDKARGKSDNVPSEEVVKKMKNYWRQLLNAKLITQRKFDNLTKAERGGLSELDKAGFIKRQLVETRQITKHVAQILDSRMNTKYDENDKLIREVKVITLKSKLVSDFRKDFQFYKVREINNYHHAHDAYLNAVVGTALIKKYPKLESEFVYGDYKVYDVRKMIAKSEQEIGKATAKYFFYSNIMNFFKTEITLANGEIRKRPLIETNGETGEIVWDKGRDFATVRKVLSMPQVNIVKKTEVQTGGFSKESILPKRNSDKLIARKKDWDPKKYGGFDSPTVAYSVLVVAKVEKGKSKKLKSVKELLGITIMERSSFEKNPIDFLEAKGYKEVKKDLIIKLPKYSLFELENGRKRMLASAGELQKGNELALPSKYVNFLYLASHYEKLKGSPEDNEQKQLFVEQHKHYLDEIIEQISEFSKRVILADANLDKVLSAYNKHRDKPIREQAENIIHLFTLTNLGAPAAFKYFDTTIDRKRYTSTKEVLDATLIHQSITGLYETRIDLSQLGGDGGGGSGGSGGSGGSGGSGGTLNIEDEYRLHETSKEPDVPLGSTWLSDFPQAWAETGGMGLAVRQAPLIIPLKATSTPVSIKQYPMSQEARLGIKPHIQRLLDQGILVPCQSPWNTPLLPVKKPGTNDYRPVQDLREVNKRVEDIHPTVPNPYNLLSGLPPSHQWYTVLDLKDAFFCLRLHPTSQPLFAFEWRDPEMGISGQLTWTRLPQGFKNSPTLFNEALHRDLADFRIQHPDLILLQYVDDLLLAATSEQDCQRGTRALLQTLGNLGYRASAKKAQICQKQVKYLGYLLKEGQRWLTEARKETVMGQPTPKTPRQLREFLGTAGFCRLWIPGFAEMAAPLYPLTKPGTLFNWGPDQQKAYQEIKQALLTAPALGLPDLTKPFELFVDEKQGYAKGVLTQKLGPWRRPVAYLSKKLDPVAAGWPPCLRMVAAIAVLTKDAGKLTMGQPLVILAPHAVEALVKQPPDRWLSNARMTHYQAMLLDTDRVQFGPVVALNPATLLPLPEKEAPHDCLEILAETHGTRPDLTDQPIPDADYTWYTDGSSFLQEGQRRAGAAVTTETEVIWARALPAGTSAQRAELIALTQALKMAEGKKLNVYTDSRYAFATAHVHGEIYRRRGWLTSEGREIKNKNEILALLKALFLPKRLSIIHCPGHQKGNSAEARGNRMADQAAREAAMKAVLETSTLLAGKRTADGSEFEKRTADGSEFESPKKKAKVE

SEQ ID NO: 995 - protein, 2094 aa, synthetic construct
MPAAKRVKLDGGDKKYSIGLDIGTNSVGWAVITDEYKVPSKKFKVLGNTDRHSIKKNLIGALLFDSGETAEATRLKRTARRRYTRRKNRICYLQEIFSNEMAKVDDSFFHRLEESFLVEEDKKHERHPIFGNIVDEVAYHEKYPTIYHLRKKLVDSTDKADLRLIYLALAHMIKFRGHFLIEGDLNPDNSDVDKLFIQLVQTYNQLFEENPINASGVDAKAILSARLSKSRRLENLIAQLPGEKKNGLFGNLIALSLGLTPNFKSNFDLAEDAKLQLSKDTYDDDLDNLLAQIGDQYADLFLAAKNLSDAILLSDILRVNTEITKAPLSASMIKRYDEHHQDLTLLKALVRQQLPEKYKEIFFDQSKNGYAGYIDGGASQEEFYKFIKPILEKMDGTEELLVKLNREDLLRKQRTFDNGSIPHQIHLGELHAILRRQEDFYPFLKDNREKIEKILTFRIPYYVGPLARGNSRFAWMTRKSEETITPWNFEEVVDKGASAQSFIERMTNFDKNLPNEKVLPKHSLLYEYFTVYNELTKVKYVTEGMRKPAFLSGEQKKAIVDLLFKTNRKVTVKQLKEDYFKKIECFDSVEISGVEDRFNASLGTYHDLLKIIKDKDFLDNEENEDILEDIVLTLTLFEDREMIEERLKTYAHLFDDKVMKQLKRRRYTGWGRLSRKLINGIRDKQSGKTILDFLKSDGFANRNFMQLIHDDSLTFKEDIQKAQVSGQGDSLHEHIANLAGSPAIKKGILQTVKVVDELVKVMGRHKPENIVIEMARENQTTQKGQKNSRERMKRIEEGIKELGSQILKEHPVENTQLQNEKLYLYYLQNGRDMYVDQELDINRLSDYDVDHIVPQSFLKDDSIDNKVLTRSDKARGKSDNVPSEEVVKKMKNYWRQLLNAKLITQRKFDNLTKAERGGLSELDKAGFIKRQLVETRQITKHVAQILDSRMNTKYDENDKLIREVKVITLKSKLVSDFRKDFQFYKVREINNYHHAHDAYLNAVVGTALIKKYPKLESEFVYGDYKVYDVRKMIAKSEQEIGKATAKYFFYSNIMNFFKTEITLANGEIRKRPLIETNGETGEIVWDKGRDFATVRKVLSMPQVNIVKKTEVQTGGFSKESILPKRNSDKLIARKKDWDPKKYGGFDSPTVAYSVLVVAKVEKGKSKKLKSVKELLGITIMERSSFEKNPIDFLEAKGYKEVKKDLIIKLPKYSLFELENGRKRMLASAGELQKGNELALPSKYVNFLYLASHYEKLKGSPEDNEQKQLFVEQHKHYLDEIIEQISEFSKRVILADANLDKVLSAYNKHRDKPIREQAENIIHLFTLTNLGAPAAFKYFDTTIDRKRYTSTKEVLDATLIHQSITGLYETRIDLSQLGGDGGGGSGSSGGGGGTLNIEDEYRLHETSKEPDVPLGSTWLSDFPQAWAETGGMGLAVRQAPLIIPLKATSTPVSIKQYPMSQEARLGIKPHIQRLLDQGILVPCQSPWNTPLLPVKKPGTNDYRPVQDLREVNKRVEDIHPTVPNPYNLLSGLPPSHQWYTVLDLKDAFFCLRLHPTSQPLFAFEWRDPEMGISGQLTWTRLPQGFKNSPTLFNEALHRDLADFRIQHPDLILLQYVDDLLLAATSEQDCQRGTRALLQTLGNLGYRASAKKAQICQKQVKYLGYLLKEGQRWLTEARKETVMGQPTPKTPRQLREFLGTAGFCRLWIPGFAEMAAPLYPLTKPGTLFNWGPDQQKAYQEIKQALLTAPALGLPDLTKPFELFVDEKQGYAKGVLTQKLGPWRRPVAYLSKKLDPVAAGWPPCLRMVAAIAVLTKDAGKLTMGQPLVILAPHAVEALVKQPPDRWLSNARMTHYQAMLLDTDRVQFGPVVALNPATLLPLPEKEAPHDCLEILAETHGTRPDLTDQPIPDADYTWYTDGSSFLQEGQRRAGAAVTTETEVIWARALPAGTSAQRAELIALTQALKMAEGKKLNVYTDSRYAFATAHVHGEIYRRRGWLTSEGREIKNKNEILALLKALFLPKRLSIIHCPGHQKGNSAEARGNRMADQAAREAAMKAVLETSTLLAGKRTADGSEFEKRTADGSEFESPKKKAKVE

SEQ ID NO: 996 - protein, 2100 aa, synthetic construct
MPAAKRVKLDGGDKKYSIGLDIGTNSVGWAVITDEYKVPSKKFKVLGNTDRHSIKKNLIGALLFDSGETAEATRLKRTARRRYTRRKNRICYLQEIFSNEMAKVDDSFFHRLEESFLVEEDKKHERHPIFGNIVDEVAYHEKYPTIYHLRKKLVDSTDKADLRLIYLALAHMIKFRGHFLIEGDLNPDNSDVDKLFIQLVQTYNQLFEENPINASGVDAKAILSARLSKSRRLENLIAQLPGEKKNGLFGNLIALSLGLTPNFKSNFDLAEDAKLQLSKDTYDDDLDNLLAQIGDQYADLFLAAKNLSDAILLSDILRVNTEITKAPLSASMIKRYDEHHQDLTLLKALVRQQLPEKYKEIFFDQSKNGYAGYIDGGASQEEFYKFIKPILEKMDGTEELLVKLNREDLLRKQRTFDNGSIPHQIHLGELHAILRRQEDFYPFLKDNREKIEKILTFRIPYYVGPLARGNSRFAWMTRKSEETITPWNFEEVVDKGASAQSFIERMTNFDKNLPNEKVLPKHSLLYEYFTVYNELTKVKYVTEGMRKPAFLSGEQKKAIVDLLFKTNRKVTVKQLKEDYFKKIECFDSVEISGVEDRFNASLGTYHDLLKIIKDKDFLDNEENEDILEDIVLTLTLFEDREMIEERLKTYAHLFDDKVMKQLKRRRYTGWGRLSRKLINGIRDKQSGKTILDFLKSDGFANRNFMQLIHDDSLTFKEDIQKAQVSGQGDSLHEHIANLAGSPAIKKGILQTVKVVDELVKVMGRHKPENIVIEMARENQTTQKGQKNSRERMKRIEEGIKELGSQILKEHPVENTQLQNEKLYLYYLQNGRDMYVDQELDINRLSDYDVDHIVPQSFLKDDSIDNKVLTRSDKARGKSDNVPSEEVVKKMKNYWRQLLNAKLITQRKFDNLTKAERGGLSELDKAGFIKRQLVETRQITKHVAQILDSRMNTKYDENDKLIREVKVITLKSKLVSDFRKDFQFYKVREINNYHHAHDAYLNAVVGTALIKKYPKLESEFVYGDYKVYDVRKMIAKSEQEIGKATAKYFFYSNIMNFFKTEITLANGEIRKRPLIETNGETGEIVWDKGRDFATVRKVLSMPQVNIVKKTEVQTGGFSKESILPKRNSDKLIARKKDWDPKKYGGFDSPTVAYSVLVVAKVEKGKSKKLKSVKELLGITIMERSSFEKNPIDFLEAKGYKEVKKDLIIKLPKYSLFELENGRKRMLASAGELQKGNELALPSKYVNFLYLASHYEKLKGSPEDNEQKQLFVEQHKHYLDEIIEQISEFSKRVILADANLDKVLSAYNKHRDKPIREQAENIIHLFTLTNLGAPAAFKYFDTTIDRKRYTSTKEVLDATLIHQSITGLYETRIDLSQLGGDGGEAAAKEAAAKEAAAKGGTLNIEDEYRLHETSKEPDVPLGSTWLSDFPQAWAETGGMGLAVRQAPLIIPLKATSTPVSIKQYPMSQEARLGIKPHIQRLLDQGILVPCQSPWNTPLLPVKKPGTNDYRPVQDLREVNKRVEDIHPTVPNPYNLLSGLPPSHQWYTVLDLKDAFFCLRLHPTSQPLFAFEWRDPEMGISGQLTWTRLPQGFKNSPTLFNEALHRDLADFRIQHPDLILLQYVDDLLLAATSEQDCQRGTRALLQTLGNLGYRASAKKAQICQKQVKYLGYLLKEGQRWLTEARKETVMGQPTPKTPRQLREFLGTAGFCRLWIPGFAEMAAPLYPLTKPGTLFNWGPDQQKAYQEIKQALLTAPALGLPDLTKPFELFVDEKQGYAKGVLTQKLGPWRRPVAYLSKKLDPVAAGWPPCLRMVAAIAVLTKDAGKLTMGQPLVILAPHAVEALVKQPPDRWLSNARMTHYQAMLLDTDRVQFGPVVALNPATLLPLPEKEAPHDCLEILAETHGTRPDLTDQPIPDADYTWYTDGSSFLQEGQRRAGAAVTTETEVIWARALPAGTSAQRAELIALTQALKMAEGKKLNVYTDSRYAFATAHVHGEIYRRRGWLTSEGREIKNKNEILALLKALFLPKRLSIIHCPGHQKGNSAEARGNRMADQAAREAAMKAVLETSTLLAGKRTADGSEFEKRTADGSEFESPKKKAKVE

SEQ ID NO: 997 - protein, 2088 aa, synthetic construct
MPAAKRVKLDGGDKKYSIGLDIGTNSVGWAVITDEYKVPSKKFKVLGNTDRHSIKKNLIGALLFDSGETAEATRLKRTARRRYTRRKNRICYLQEIFSNEMAKVDDSFFHRLEESFLVEEDKKHERHPIFGNIVDEVAYHEKYPTIYHLRKKLVDSTDKADLRLIYLALAHMIKFRGHFLIEGDLNPDNSDVDKLFIQLVQTYNQLFEENPINASGVDAKAILSARLSKSRRLENLIAQLPGEKKNGLFGNLIALSLGLTPNFKSNFDLAEDAKLQLSKDTYDDDLDNLLAQIGDQYADLFLAAKNLSDAILLSDILRVNTEITKAPLSASMIKRYDEHHQDLTLLKALVRQQLPEKYKEIFFDQSKNGYAGYIDGGASQEEFYKFIKPILEKMDGTEELLVKLNREDLLRKQRTFDNGSIPHQIHLGELHAILRRQEDFYPFLKDNREKIEKILTFRIPYYVGPLARGNSRFAWMTRKSEETITPWNFEEVVDKGASAQSFIERMTNFDKNLPNEKVLPKHSLLYEYFTVYNELTKVKYVTEGMRKPAFLSGEQKKAIVDLLFKTNRKVTVKQLKEDYFKKIECFDSVEISGVEDRFNASLGTYHDLLKIIKDKDFLDNEENEDILEDIVLTLTLFEDREMIEERLKTYAHLFDDKVMKQLKRRRYTGWGRLSRKLINGIRDKQSGKTILDFLKSDGFANRNFMQLIHDDSLTFKEDIQKAQVSGQGDSLHEHIANLAGSPAIKKGILQTVKVVDELVKVMGRHKPENIVIEMARENQTTQKGQKNSRERMKRIEEGIKELGSQILKEHPVENTQLQNEKLYLYYLQNGRDMYVDQELDINRLSDYDVDHIVPQSFLKDDSIDNKVLTRSDKARGKSDNVPSEEVVKKMKNYWRQLLNAKLITQRKFDNLTKAERGGLSELDKAGFIKRQLVETRQITKHVAQILDSRMNTKYDENDKLIREVKVITLKSKLVSDFRKDFQFYKVREINNYHHAHDAYLNAVVGTALIKKYPKLESEFVYGDYKVYDVRKMIAKSEQEIGKATAKYFFYSNIMNFFKTEITLANGEIRKRPLIETNGETGEIVWDKGRDFATVRKVLSMPQVNIVKKTEVQTGGFSKESILPKRNSDKLIARKKDWDPKKYGGFDSPTVAYSVLVVAKVEKGKSKKLKSVKELLGITIMERSSFEKNPIDFLEAKGYKEVKKDLIIKLPKYSLFELENGRKRMLASAGELQKGNELALPSKYVNFLYLASHYEKLKGSPEDNEQKQLFVEQHKHYLDEIIEQISEFSKRVILADANLDKVLSAYNKHRDKPIREQAENIIHLFTLTNLGAPAAFKYFDTTIDRKRYTSTKEVLDATLIHQSITGLYETRIDLSQLGGDGGGGGGGTLNIEDEYRLHETSKEPDVPLGSTWLSDFPQAWAETGGMGLAVRQAPLIIPLKATSTPVSIKQYPMSQEARLGIKPHIQRLLDQGILVPCQSPWNTPLLPVKKPGTNDYRPVQDLREVNKRVEDIHPTVPNPYNLLSGLPPSHQWYTVLDLKDAFFCLRLHPTSQPLFAFEWRDPEMGISGQLTWTRLPQGFKNSPTLFNEALHRDLADFRIQHPDLILLQYVDDLLLAATSEQDCQRGTRALLQTLGNLGYRASAKKAQICQKQVKYLGYLLKEGQRWLTEARKETVMGQPTPKTPRQLREFLGTAGFCRLWIPGFAEMAAPLYPLTKPGTLFNWGPDQQKAYQEIKQALLTAPALGLPDLTKPFELFVDEKQGYAKGVLTQKLGPWRRPVAYLSKKLDPVAAGWPPCLRMVAAIAVLTKDAGKLTMGQPLVILAPHAVEALVKQPPDRWLSNARMTHYQAMLLDTDRVQFGPVVALNPATLLPLPEKEAPHDCLEILAETHGTRPDLTDQPIPDADYTWYTDGSSFLQEGQRRAGAAVTTETEVIWARALPAGTSAQRAELIALTQALKMAEGKKLNVYTDSRYAFATAHVHGEIYRRRGWLTSEGREIKNKNEILALLKALFLPKRLSIIHCPGHQKGNSAEARGNRMADQAAREAAMKAVLETSTLLAGKRTADGSEFEKRTADGSEFESPKKKAKVE

SEQ ID NO: 998 - protein, 2090 aa, synthetic construct
MPAAKRVKLDGGDKKYSIGLDIGTNSVGWAVITDEYKVPSKKFKVLGNTDRHSIKKNLIGALLFDSGETAEATRLKRTARRRYTRRKNRICYLQEIFSNEMAKVDDSFFHRLEESFLVEEDKKHERHPIFGNIVDEVAYHEKYPTIYHLRKKLVDSTDKADLRLIYLALAHMIKFRGHFLIEGDLNPDNSDVDKLFIQLVQTYNQLFEENPINASGVDAKAILSARLSKSRRLENLIAQLPGEKKNGLFGNLIALSLGLTPNFKSNFDLAEDAKLQLSKDTYDDDLDNLLAQIGDQYADLFLAAKNLSDAILLSDILRVNTEITKAPLSASMIKRYDEHHQDLTLLKALVRQQLPEKYKEIFFDQSKNGYAGYIDGGASQEEFYKFIKPILEKMDGTEELLVKLNREDLLRKQRTFDNGSIPHQIHLGELHAILRRQEDFYPFLKDNREKIEKILTFRIPYYVGPLARGNSRFAWMTRKSEETITPWNFEEVVDKGASAQSFIERMTNFDKNLPNEKVLPKHSLLYEYFTVYNELTKVKYVTEGMRKPAFLSGEQKKAIVDLLFKTNRKVTVKQLKEDYFKKIECFDSVEISGVEDRFNASLGTYHDLLKIIKDKDFLDNEENEDILEDIVLTLTLFEDREMIEERLKTYAHLFDDKVMKQLKRRRYTGWGRLSRKLINGIRDKQSGKTILDFLKSDGFANRNFMQLIHDDSLTFKEDIQKAQVSGQGDSLHEHIANLAGSPAIKKGILQTVKVVDELVKVMGRHKPENIVIEMARENQTTQKGQKNSRERMKRIEEGIKELGSQILKEHPVENTQLQNEKLYLYYLQNGRDMYVDQELDINRLSDYDVDHIVPQSFLKDDSIDNKVLTRSDKARGKSDNVPSEEVVKKMKNYWRQLLNAKLITQRKFDNLTKAERGGLSELDKAGFIKRQLVETRQITKHVAQILDSRMNTKYDENDKLIREVKVITLKSKLVSDFRKDFQFYKVREINNYHHAHDAYLNAVVGTALIKKYPKLESEFVYGDYKVYDVRKMIAKSEQEIGKATAKYFFYSNIMNFFKTEITLANGEIRKRPLIETNGETGEIVWDKGRDFATVRKVLSMPQVNIVKKTEVQTGGFSKESILPKRNSDKLIARKKDWDPKKYGGFDSPTVAYSVLVVAKVEKGKSKKLKSVKELLGITIMERSSFEKNPIDFLEAKGYKEVKKDLIIKLPKYSLFELENGRKRMLASAGELQKGNELALPSKYVNFLYLASHYEKLKGSPEDNEQKQLFVEQHKHYLDEIIEQISEFSKRVILADANLDKVLSAYNKHRDKPIREQAENIIHLFTLTNLGAPAAFKYFDTTIDRKRYTSTKEVLDATLIHQSITGLYETRIDLSQLGGDGGGGGGSGGTLNIEDEYRLHETSKEPDVPLGSTWLSDFPQAWAETGGMGLAVRQAPLIIPLKATSTPVSIKQYPMSQEARLGIKPHIQRLLDQGILVPCQSPWNTPLLPVKKPGTNDYRPVQDLREVNKRVEDIHPTVPNPYNLLSGLPPSHQWYTVLDLKDAFFCLRLHPTSQPLFAFEWRDPEMGISGQLTWTRLPQGFKNSPTLFNEALHRDLADFRIQHPDLILLQYVDDLLLAATSEQDCQRGTRALLQTLGNLGYRASAKKAQICQKQVKYLGYLLKEGQRWLTEARKETVMGQPTPKTPRQLREFLGTAGFCRLWIPGFAEMAAPLYPLTKPGTLFNWGPDQQKAYQEIKQALLTAPALGLPDLTKPFELFVDEKQGYAKGVLTQKLGPWRRPVAYLSKKLDPVAAGWPPCLRMVAAIAVLTKDAGKLTMGQPLVILAPHAVEALVKQPPDRWLSNARMTHYQAMLLDTDRVQFGPVVALNPATLLPLPEKEAPHDCLEILAETHGTRPDLTDQPIPDADYTWYTDGSSFLQEGQRRAGAAVTTETEVIWARALPAGTSAQRAELIALTQALKMAEGKKLNVYTDSRYAFATAHVHGEIYRRRGWLTSEGREIKNKNEILALLKALFLPKRLSIIHCPGHQKGNSAEARGNRMADQAAREAAMKAVLETSTLLAGKRTADGSEFEKRTADGSEFESPKKKAKVE

SEQ ID NO: 999 - protein, 2094 aa, synthetic construct
MPAAKRVKLDGGDKKYSIGLDIGTNSVGWAVITDEYKVPSKKFKVLGNTDRHSIKKNLIGALLFDSGETAEATRLKRTARRRYTRRKNRICYLQEIFSNEMAKVDDSFFHRLEESFLVEEDKKHERHPIFGNIVDEVAYHEKYPTIYHLRKKLVDSTDKADLRLIYLALAHMIKFRGHFLIEGDLNPDNSDVDKLFIQLVQTYNQLFEENPINASGVDAKAILSARLSKSRRLENLIAQLPGEKKNGLFGNLIALSLGLTPNFKSNFDLAEDAKLQLSKDTYDDDLDNLLAQIGDQYADLFLAAKNLSDAILLSDILRVNTEITKAPLSASMIKRYDEHHQDLTLLKALVRQQLPEKYKEIFFDQSKNGYAGYIDGGASQEEFYKFIKPILEKMDGTEELLVKLNREDLLRKQRTFDNGSIPHQIHLGELHAILRRQEDFYPFLKDNREKIEKILTFRIPYYVGPLARGNSRFAWMTRKSEETITPWNFEEVVDKGASAQSFIERMTNFDKNLPNEKVLPKHSLLYEYFTVYNELTKVKYVTEGMRKPAFLSGEQKKAIVDLLFKTNRKVTVKQLKEDYFKKIECFDSVEISGVEDRFNASLGTYHDLLKIIKDKDFLDNEENEDILEDIVLTLTLFEDREMIEERLKTYAHLFDDKVMKQLKRRRYTGWGRLSRKLINGIRDKQSGKTILDFLKSDGFANRNFMQLIHDDSLTFKEDIQKAQVSGQGDSLHEHIANLAGSPAIKKGILQTVKVVDELVKVMGRHKPENIVIEMARENQTTQKGQKNSRERMKRIEEGIKELGSQILKEHPVENTQLQNEKLYLYYLQNGRDMYVDQELDINRLSDYDVDHIVPQSFLKDDSIDNKVLTRSDKARGKSDNVPSEEVVKKMKNYWRQLLNAKLITQRKFDNLTKAERGGLSELDKAGFIKRQLVETRQITKHVAQILDSRMNTKYDENDKLIREVKVITLKSKLVSDFRKDFQFYKVREINNYHHAHDAYLNAVVGTALIKKYPKLESEFVYGDYKVYDVRKMIAKSEQEIGKATAKYFFYSNIMNFFKTEITLANGEIRKRPLIETNGETGEIVWDKGRDFATVRKVLSMPQVNIVKKTEVQTGGFSKESILPKRNSDKLIARKKDWDPKKYGGFDSPTVAYSVLVVAKVEKGKSKKLKSVKELLGITIMERSSFEKNPIDFLEAKGYKEVKKDLIIKLPKYSLFELENGRKRMLASAGELQKGNELALPSKYVNFLYLASHYEKLKGSPEDNEQKQLFVEQHKHYLDEIIEQISEFSKRVILADANLDKVLSAYNKHRDKPIREQAENIIHLFTLTNLGAPAAFKYFDTTIDRKRYTSTKEVLDATLIHQSITGLYETRIDLSQLGGDGGGGGGGSPAPGGTLNIEDEYRLHETSKEPDVPLGSTWLSDFPQAWAETGGMGLAVRQAPLIIPLKATSTPVSIKQYPMSQEARLGIKPHIQRLLDQGILVPCQSPWNTPLLPVKKPGTNDYRPVQDLREVNKRVEDIHPTVPNPYNLLSGLPPSHQWYTVLDLKDAFFCLRLHPTSQPLFAFEWRDPEMGISGQLTWTRLPQGFKNSPTLFNEALHRDLADFRIQHPDLILLQYVDDLLLAATSEQDCQRGTRALLQTLGNLGYRASAKKAQICQKQVKYLGYLLKEGQRWLTEARKETVMGQPTPKTPRQLREFLGTAGFCRLWIPGFAEMAAPLYPLTKPGTLFNWGPDQQKAYQEIKQALLTAPALGLPDLTKPFELFVDEKQGYAKGVLTQKLGPWRRPVAYLSKKLDPVAAGWPPCLRMVAAIAVLTKDAGKLTMGQPLVILAPHAVEALVKQPPDRWLSNARMTHYQAMLLDTDRVQFGPVVALNPATLLPLPEKEAPHDCLEILAETHGTRPDLTDQPIPDADYTWYTDGSSFLQEGQRRAGAAVTTETEVIWARALPAGTSAQRAELIALTQALKMAEGKKLNVYTDSRYAFATAHVHGEIYRRRGWLTSEGREIKNKNEILALLKALFLPKRLSIIHCPGHQKGNSAEARGNRMADQAAREAAMKAVLETSTLLAGKRTADGSEFEKRTADGSEFESPKKKAKVE

SEQ ID NO: 1000 - protein, 2094 aa, synthetic construct
MPAAKRVKLDGGDKKYSIGLDIGTNSVGWAVITDEYKVPSKKFKVLGNTDRHSIKKNLIGALLFDSGETAEATRLKRTARRRYTRRKNRICYLQEIFSNEMAKVDDSFFHRLEESFLVEEDKKHERHPIFGNIVDEVAYHEKYPTIYHLRKKLVDSTDKADLRLIYLALAHMIKFRGHFLIEGDLNPDNSDVDKLFIQLVQTYNQLFEENPINASGVDAKAILSARLSKSRRLENLIAQLPGEKKNGLFGNLIALSLGLTPNFKSNFDLAEDAKLQLSKDTYDDDLDNLLAQIGDQYADLFLAAKNLSDAILLSDILRVNTEITKAPLSASMIKRYDEHHQDLTLLKALVRQQLPEKYKEIFFDQSKNGYAGYIDGGASQEEFYKFIKPILEKMDGTEELLVKLNREDLLRKQRTFDNGSIPHQIHLGELHAILRRQEDFYPFLKDNREKIEKILTFRIPYYVGPLARGNSRFAWMTRKSEETITPWNFEEVVDKGASAQSFIERMTNFDKNLPNEKVLPKHSLLYEYFTVYNELTKVKYVTEGMRKPAFLSGEQKKAIVDLLFKTNRKVTVKQLKEDYFKKIECFDSVEISGVEDRFNASLGTYHDLLKIIKDKDFLDNEENEDILEDIVLTLTLFEDREMIEERLKTYAHLFDDKVMKQLKRRRYTGWGRLSRKLINGIRDKQSGKTILDFLKSDGFANRNFMQLIHDDSLTFKEDIQKAQVSGQGDSLHEHIANLAGSPAIKKGILQTVKVVDELVKVMGRHKPENIVIEMARENQTTQKGQKNSRERMKRIEEGIKELGSQILKEHPVENTQLQNEKLYLYYLQNGRDMYVDQELDINRLSDYDVDHIVPQSFLKDDSIDNKVLTRSDKARGKSDNVPSEEVVKKMKNYWRQLLNAKLITQRKFDNLTKAERGGLSELDKAGFIKRQLVETRQITKHVAQILDSRMNTKYDENDKLIREVKVITLKSKLVSDFRKDFQFYKVREINNYHHAHDAYLNAVVGTALIKKYPKLESEFVYGDYKVYDVRKMIAKSEQEIGKATAKYFFYSNIMNFFKTEITLANGEIRKRPLIETNGETGEIVWDKGRDFATVRKVLSMPQVNIVKKTEVQTGGFSKESILPKRNSDKLIARKKDWDPKKYGGFDSPTVAYSVLVVAKVEKGKSKKLKSVKELLGITIMERSSFEKNPIDFLEAKGYKEVKKDLIIKLPKYSLFELENGRKRMLASAGELQKGNELALPSKYVNFLYLASHYEKLKGSPEDNEQKQLFVEQHKHYLDEIIEQISEFSKRVILADANLDKVLSAYNKHRDKPIREQAENIIHLFTLTNLGAPAAFKYFDTTIDRKRYTSTKEVLDATLIHQSITGLYETRIDLSQLGGDGGGSSPAPGGGGGTLNIEDEYRLHETSKEPDVPLGSTWLSDFPQAWAETGGMGLAVRQAPLIIPLKATSTPVSIKQYPMSQEARLGIKPHIQRLLDQGILVPCQSPWNTPLLPVKKPGTNDYRPVQDLREVNKRVEDIHPTVPNPYNLLSGLPPSHQWYTVLDLKDAFFCLRLHPTSQPLFAFEWRDPEMGISGQLTWTRLPQGFKNSPTLFNEALHRDLADFRIQHPDLILLQYVDDLLLAATSEQDCQRGTRALLQTLGNLGYRASAKKAQICQKQVKYLGYLLKEGQRWLTEARKETVMGQPTPKTPRQLREFLGTAGFCRLWIPGFAEMAAPLYPLTKPGTLFNWGPDQQKAYQEIKQALLTAPALGLPDLTKPFELFVDEKQGYAKGVLTQKLGPWRRPVAYLSKKLDPVAAGWPPCLRMVAAIAVLTKDAGKLTMGQPLVILAPHAVEALVKQPPDRWLSNARMTHYQAMLLDTDRVQFGPVVALNPATLLPLPEKEAPHDCLEILAETHGTRPDLTDQPIPDADYTWYTDGSSFLQEGQRRAGAAVTTETEVIWARALPAGTSAQRAELIALTQALKMAEGKKLNVYTDSRYAFATAHVHGEIYRRRGWLTSEGREIKNKNEILALLKALFLPKRLSIIHCPGHQKGNSAEARGNRMADQAAREAAMKAVLETSTLLAGKRTADGSEFEKRTADGSEFESPKKKAKVE

SEQ ID NO: 1001 - protein, 2094 aa, synthetic construct
MPAAKRVKLDGGDKKYSIGLDIGTNSVGWAVITDEYKVPSKKFKVLGNTDRHSIKKNLIGALLFDSGETAEATRLKRTARRRYTRRKNRICYLQEIFSNEMAKVDDSFFHRLEESFLVEEDKKHERHPIFGNIVDEVAYHEKYPTIYHLRKKLVDSTDKADLRLIYLALAHMIKFRGHFLIEGDLNPDNSDVDKLFIQLVQTYNQLFEENPINASGVDAKAILSARLSKSRRLENLIAQLPGEKKNGLFGNLIALSLGLTPNFKSNFDLAEDAKLQLSKDTYDDDLDNLLAQIGDQYADLFLAAKNLSDAILLSDILRVNTEITKAPLSASMIKRYDEHHQDLTLLKALVRQQLPEKYKEIFFDQSKNGYAGYIDGGASQEEFYKFIKPILEKMDGTEELLVKLNREDLLRKQRTFDNGSIPHQIHLGELHAILRRQEDFYPFLKDNREKIEKILTFRIPYYVGPLARGNSRFAWMTRKSEETITPWNFEEVVDKGASAQSFIERMTNFDKNLPNEKVLPKHSLLYEYFTVYNELTKVKYVTEGMRKPAFLSGEQKKAIVDLLFKTNRKVTVKQLKEDYFKKIECFDSVEISGVEDRFNASLGTYHDLLKIIKDKDFLDNEENEDILEDIVLTLTLFEDREMIEERLKTYAHLFDDKVMKQLKRRRYTGWGRLSRKLINGIRDKQSGKTILDFLKSDGFANRNFMQLIHDDSLTFKEDIQKAQVSGQGDSLHEHIANLAGSPAIKKGILQTVKVVDELVKVMGRHKPENIVIEMARENQTTQKGQKNSRERMKRIEEGIKELGSQILKEHPVENTQLQNEKLYLYYLQNGRDMYVDQELDINRLSDYDVDHIVPQSFLKDDSIDNKVLTRSDKARGKSDNVPSEEVVKKMKNYWRQLLNAKLITQRKFDNLTKAERGGLSELDKAGFIKRQLVETRQITKHVAQILDSRMNTKYDENDKLIREVKVITLKSKLVSDFRKDFQFYKVREINNYHHAHDAYLNAVVGTALIKKYPKLESEFVYGDYKVYDVRKMIAKSEQEIGKATAKYFFYSNIMNFFKTEITLANGEIRKRPLIETNGETGEIVWDKGRDFATVRKVLSMPQVNIVKKTEVQTGGFSKESILPKRNSDKLIARKKDWDPKKYGGFDSPTVAYSVLVVAKVEKGKSKKLKSVKELLGITIMERSSFEKNPIDFLEAKGYKEVKKDLIIKLPKYSLFELENGRKRMLASAGELQKGNELALPSKYVNFLYLASHYEKLKGSPEDNEQKQLFVEQHKHYLDEIIEQISEFSKRVILADANLDKVLSAYNKHRDKPIREQAENIIHLFTLTNLGAPAAFKYFDTTIDRKRYTSTKEVLDATLIHQSITGLYETRIDLSQLGGDGGGGSPAPGGGGGTLNIEDEYRLHETSKEPDVPLGSTWLSDFPQAWAETGGMGLAVRQAPLIIPLKATSTPVSIKQYPMSQEARLGIKPHIQRLLDQGILVPCQSPWNTPLLPVKKPGTNDYRPVQDLREVNKRVEDIHPTVPNPYNLLSGLPPSHQWYTVLDLKDAFFCLRLHPTSQPLFAFEWRDPEMGISGQLTWTRLPQGFKNSPTLFNEALHRDLADFRIQHPDLILLQYVDDLLLAATSEQDCQRGTRALLQTLGNLGYRASAKKAQICQKQVKYLGYLLKEGQRWLTEARKETVMGQPTPKTPRQLREFLGTAGFCRLWIPGFAEMAAPLYPLTKPGTLFNWGPDQQKAYQEIKQALLTAPALGLPDLTKPFELFVDEKQGYAKGVLTQKLGPWRRPVAYLSKKLDPVAAGWPPCLRMVAAIAVLTKDAGKLTMGQPLVILAPHAVEALVKQPPDRWLSNARMTHYQAMLLDTDRVQFGPVVALNPATLLPLPEKEAPHDCLEILAETHGTRPDLTDQPIPDADYTWYTDGSSFLQEGQRRAGAAVTTETEVIWARALPAGTSAQRAELIALTQALKMAEGKKLNVYTDSRYAFATAHVHGEIYRRRGWLTSEGREIKNKNEILALLKALFLPKRLSIIHCPGHQKGNSAEARGNRMADQAAREAAMKAVLETSTLLAGKRTADGSEFEKRTADGSEFESPKKKAKVE

SEQ ID NO: 1002 - protein, 2095 aa, synthetic construct
MPAAKRVKLDGGDKKYSIGLDIGTNSVGWAVITDEYKVPSKKFKVLGNTDRHSIKKNLIGALLFDSGETAEATRLKRTARRRYTRRKNRICYLQEIFSNEMAKVDDSFFHRLEESFLVEEDKKHERHPIFGNIVDEVAYHEKYPTIYHLRKKLVDSTDKADLRLIYLALAHMIKFRGHFLIEGDLNPDNSDVDKLFIQLVQTYNQLFEENPINASGVDAKAILSARLSKSRRLENLIAQLPGEKKNGLFGNLIALSLGLTPNFKSNFDLAEDAKLQLSKDTYDDDLDNLLAQIGDQYADLFLAAKNLSDAILLSDILRVNTEITKAPLSASMIKRYDEHHQDLTLLKALVRQQLPEKYKEIFFDQSKNGYAGYIDGGASQEEFYKFIKPILEKMDGTEELLVKLNREDLLRKQRTFDNGSIPHQIHLGELHAILRRQEDFYPFLKDNREKIEKILTFRIPYYVGPLARGNSRFAWMTRKSEETITPWNFEEVVDKGASAQSFIERMTNFDKNLPNEKVLPKHSLLYEYFTVYNELTKVKYVTEGMRKPAFLSGEQKKAIVDLLFKTNRKVTVKQLKEDYFKKIECFDSVEISGVEDRFNASLGTYHDLLKIIKDKDFLDNEENEDILEDIVLTLTLFEDREMIEERLKTYAHLFDDKVMKQLKRRRYTGWGRLSRKLINGIRDKQSGKTILDFLKSDGFANRNFMQLIHDDSLTFKEDIQKAQVSGQGDSLHEHIANLAGSPAIKKGILQTVKVVDELVKVMGRHKPENIVIEMARENQTTQKGQKNSRERMKRIEEGIKELGSQILKEHPVENTQLQNEKLYLYYLQNGRDMYVDQELDINRLSDYDVDHIVPQSFLKDDSIDNKVLTRSDKARGKSDNVPSEEVVKKMKNYWRQLLNAKLITQRKFDNLTKAERGGLSELDKAGFIKRQLVETRQITKHVAQILDSRMNTKYDENDKLIREVKVITLKSKLVSDFRKDFQFYKVREINNYHHAHDAYLNAVVGTALIKKYPKLESEFVYGDYKVYDVRKMIAKSEQEIGKATAKYFFYSNIMNFFKTEITLANGEIRKRPLIETNGETGEIVWDKGRDFATVRKVLSMPQVNIVKKTEVQTGGFSKESILPKRNSDKLIARKKDWDPKKYGGFDSPTVAYSVLVVAKVEKGKSKKLKSVKELLGITIMERSSFEKNPIDFLEAKGYKEVKKDLIIKLPKYSLFELENGRKRMLASAGELQKGNELALPSKYVNFLYLASHYEKLKGSPEDNEQKQLFVEQHKHYLDEIIEQISEFSKRVILADANLDKVLSAYNKHRDKPIREQAENIIHLFTLTNLGAPAAFKYFDTTIDRKRYTSTKEVLDATLIHQSITGLYETRIDLSQLGGDGGGGGGSGGGGSGGTLNIEDEYRLHETSKEPDVPLGSTWLSDFPQAWAETGGMGLAVRQAPLIIPLKATSTPVSIKQYPMSQEARLGIKPHIQRLLDQGILVPCQSPWNTPLLPVKKPGTNDYRPVQDLREVNKRVEDIHPTVPNPYNLLSGLPPSHQWYTVLDLKDAFFCLRLHPTSQPLFAFEWRDPEMGISGQLTWTRLPQGFKNSPTLFNEALHRDLADFRIQHPDLILLQYVDDLLLAATSEQDCQRGTRALLQTLGNLGYRASAKKAQICQKQVKYLGYLLKEGQRWLTEARKETVMGQPTPKTPRQLREFLGTAGFCRLWIPGFAEMAAPLYPLTKPGTLFNWGPDQQKAYQEIKQALLTAPALGLPDLTKPFELFVDEKQGYAKGVLTQKLGPWRRPVAYLSKKLDPVAAGWPPCLRMVAAIAVLTKDAGKLTMGQPLVILAPHAVEALVKQPPDRWLSNARMTHYQAMLLDTDRVQFGPVVALNPATLLPLPEKEAPHDCLEILAETHGTRPDLTDQPIPDADYTWYTDGSSFLQEGQRRAGAAVTTETEVIWARALPAGTSAQRAELIALTQALKMAEGKKLNVYTDSRYAFATAHVHGEIYRRRGWLTSEGREIKNKNEILALLKALFLPKRLSIIHCPGHQKGNSAEARGNRMADQAAREAAMKAVLETSTLLAGKRTADGSEFEKRTADGSEFESPKKKAKVE

SEQ ID NO: 1003 - protein, 2088 aa, synthetic construct
MPAAKRVKLDGGDKKYSIGLDIGTNSVGWAVITDEYKVPSKKFKVLGNTDRHSIKKNLIGALLFDSGETAEATRLKRTARRRYTRRKNRICYLQEIFSNEMAKVDDSFFHRLEESFLVEEDKKHERHPIFGNIVDEVAYHEKYPTIYHLRKKLVDSTDKADLRLIYLALAHMIKFRGHFLIEGDLNPDNSDVDKLFIQLVQTYNQLFEENPINASGVDAKAILSARLSKSRRLENLIAQLPGEKKNGLFGNLIALSLGLTPNFKSNFDLAEDAKLQLSKDTYDDDLDNLLAQIGDQYADLFLAAKNLSDAILLSDILRVNTEITKAPLSASMIKRYDEHHQDLTLLKALVRQQLPEKYKEIFFDQSKNGYAGYIDGGASQEEFYKFIKPILEKMDGTEELLVKLNREDLLRKQRTFDNGSIPHQIHLGELHAILRRQEDFYPFLKDNREKIEKILTFRIPYYVGPLARGNSRFAWMTRKSEETITPWNFEEVVDKGASAQSFIERMTNFDKNLPNEKVLPKHSLLYEYFTVYNELTKVKYVTEGMRKPAFLSGEQKKAIVDLLFKTNRKVTVKQLKEDYFKKIECFDSVEISGVEDRFNASLGTYHDLLKIIKDKDFLDNEENEDILEDIVLTLTLFEDREMIEERLKTYAHLFDDKVMKQLKRRRYTGWGRLSRKLINGIRDKQSGKTILDFLKSDGFANRNFMQLIHDDSLTFKEDIQKAQVSGQGDSLHEHIANLAGSPAIKKGILQTVKVVDELVKVMGRHKPENIVIEMARENQTTQKGQKNSRERMKRIEEGIKELGSQILKEHPVENTQLQNEKLYLYYLQNGRDMYVDQELDINRLSDYDVDHIVPQSFLKDDSIDNKVLTRSDKARGKSDNVPSEEVVKKMKNYWRQLLNAKLITQRKFDNLTKAERGGLSELDKAGFIKRQLVETRQITKHVAQILDSRMNTKYDENDKLIREVKVITLKSKLVSDFRKDFQFYKVREINNYHHAHDAYLNAVVGTALIKKYPKLESEFVYGDYKVYDVRKMIAKSEQEIGKATAKYFFYSNIMNFFKTEITLANGEIRKRPLIETNGETGEIVWDKGRDFATVRKVLSMPQVNIVKKTEVQTGGFSKESILPKRNSDKLIARKKDWDPKKYGGFDSPTVAYSVLVVAKVEKGKSKKLKSVKELLGITIMERSSFEKNPIDFLEAKGYKEVKKDLIIKLPKYSLFELENGRKRMLASAGELQKGNELALPSKYVNFLYLASHYEKLKGSPEDNEQKQLFVEQHKHYLDEIIEQISEFSKRVILADANLDKVLSAYNKHRDKPIREQAENIIHLFTLTNLGAPAAFKYFDTTIDRKRYTSTKEVLDATLIHQSITGLYETRIDLSQLGGDGGGGSGGTLNIEDEYRLHETSKEPDVPLGSTWLSDFPQAWAETGGMGLAVRQAPLIIPLKATSTPVSIKQYPMSQEARLGIKPHIQRLLDQGILVPCQSPWNTPLLPVKKPGTNDYRPVQDLREVNKRVEDIHPTVPNPYNLLSGLPPSHQWYTVLDLKDAFFCLRLHPTSQPLFAFEWRDPEMGISGQLTWTRLPQGFKNSPTLFNEALHRDLADFRIQHPDLILLQYVDDLLLAATSEQDCQRGTRALLQTLGNLGYRASAKKAQICQKQVKYLGYLLKEGQRWLTEARKETVMGQPTPKTPRQLREFLGTAGFCRLWIPGFAEMAAPLYPLTKPGTLFNWGPDQQKAYQEIKQALLTAPALGLPDLTKPFELFVDEKQGYAKGVLTQKLGPWRRPVAYLSKKLDPVAAGWPPCLRMVAAIAVLTKDAGKLTMGQPLVILAPHAVEALVKQPPDRWLSNARMTHYQAMLLDTDRVQFGPVVALNPATLLPLPEKEAPHDCLEILAETHGTRPDLTDQPIPDADYTWYTDGSSFLQEGQRRAGAAVTTETEVIWARALPAGTSAQRAELIALTQALKMAEGKKLNVYTDSRYAFATAHVHGEIYRRRGWLTSEGREIKNKNEILALLKALFLPKRLSIIHCPGHQKGNSAEARGNRMADQAAREAAMKAVLETSTLLAGKRTADGSEFEKRTADGSEFESPKKKAKVE

SEQ ID NO: 1004 - protein, 2094 aa, synthetic construct
MPAAKRVKLDGGDKKYSIGLDIGTNSVGWAVITDEYKVPSKKFKVLGNTDRHSIKKNLIGALLFDSGETAEATRLKRTARRRYTRRKNRICYLQEIFSNEMAKVDDSFFHRLEESFLVEEDKKHERHPIFGNIVDEVAYHEKYPTIYHLRKKLVDSTDKADLRLIYLALAHMIKFRGHFLIEGDLNPDNSDVDKLFIQLVQTYNQLFEENPINASGVDAKAILSARLSKSRRLENLIAQLPGEKKNGLFGNLIALSLGLTPNFKSNFDLAEDAKLQLSKDTYDDDLDNLLAQIGDQYADLFLAAKNLSDAILLSDILRVNTEITKAPLSASMIKRYDEHHQDLTLLKALVRQQLPEKYKEIFFDQSKNGYAGYIDGGASQEEFYKFIKPILEKMDGTEELLVKLNREDLLRKQRTFDNGSIPHQIHLGELHAILRRQEDFYPFLKDNREKIEKILTFRIPYYVGPLARGNSRFAWMTRKSEETITPWNFEEVVDKGASAQSFIERMTNFDKNLPNEKVLPKHSLLYEYFTVYNELTKVKYVTEGMRKPAFLSGEQKKAIVDLLFKTNRKVTVKQLKEDYFKKIECFDSVEISGVEDRFNASLGTYHDLLKIIKDKDFLDNEENEDILEDIVLTLTLFEDREMIEERLKTYAHLFDDKVMKQLKRRRYTGWGRLSRKLINGIRDKQSGKTILDFLKSDGFANRNFMQLIHDDSLTFKEDIQKAQVSGQGDSLHEHIANLAGSPAIKKGILQTVKVVDELVKVMGRHKPENIVIEMARENQTTQKGQKNSRERMKRIEEGIKELGSQILKEHPVENTQLQNEKLYLYYLQNGRDMYVDQELDINRLSDYDVDHIVPQSFLKDDSIDNKVLTRSDKARGKSDNVPSEEVVKKMKNYWRQLLNAKLITQRKFDNLTKAERGGLSELDKAGFIKRQLVETRQITKHVAQILDSRMNTKYDENDKLIREVKVITLKSKLVSDFRKDFQFYKVREINNYHHAHDAYLNAVVGTALIKKYPKLESEFVYGDYKVYDVRKMIAKSEQEIGKATAKYFFYSNIMNFFKTEITLANGEIRKRPLIETNGETGEIVWDKGRDFATVRKVLSMPQVNIVKKTEVQTGGFSKESILPKRNSDKLIARKKDWDPKKYGGFDSPTVAYSVLVVAKVEKGKSKKLKSVKELLGITIMERSSFEKNPIDFLEAKGYKEVKKDLIIKLPKYSLFELENGRKRMLASAGELQKGNELALPSKYVNFLYLASHYEKLKGSPEDNEQKQLFVEQHKHYLDEIIEQISEFSKRVILADANLDKVLSAYNKHRDKPIREQAENIIHLFTLTNLGAPAAFKYFDTTIDRKRYTSTKEVLDATLIHQSITGLYETRIDLSQLGGDGGGSSGGSGGGGGTLNIEDEYRLHETSKEPDVPLGSTWLSDFPQAWAETGGMGLAVRQAPLIIPLKATSTPVSIKQYPMSQEARLGIKPHIQRLLDQGILVPCQSPWNTPLLPVKKPGTNDYRPVQDLREVNKRVEDIHPTVPNPYNLLSGLPPSHQWYTVLDLKDAFFCLRLHPTSQPLFAFEWRDPEMGISGQLTWTRLPQGFKNSPTLFNEALHRDLADFRIQHPDLILLQYVDDLLLAATSEQDCQRGTRALLQTLGNLGYRASAKKAQICQKQVKYLGYLLKEGQRWLTEARKETVMGQPTPKTPRQLREFLGTAGFCRLWIPGFAEMAAPLYPLTKPGTLFNWGPDQQKAYQEIKQALLTAPALGLPDLTKPFELFVDEKQGYAKGVLTQKLGPWRRPVAYLSKKLDPVAAGWPPCLRMVAAIAVLTKDAGKLTMGQPLVILAPHAVEALVKQPPDRWLSNARMTHYQAMLLDTDRVQFGPVVALNPATLLPLPEKEAPHDCLEILAETHGTRPDLTDQPIPDADYTWYTDGSSFLQEGQRRAGAAVTTETEVIWARALPAGTSAQRAELIALTQALKMAEGKKLNVYTDSRYAFATAHVHGEIYRRRGWLTSEGREIKNKNEILALLKALFLPKRLSIIHCPGHQKGNSAEARGNRMADQAAREAAMKAVLETSTLLAGKRTADGSEFEKRTADGSEFESPKKKAKVE

SEQ ID NO: 1005 - protein, 2096 aa, synthetic construct
MPAAKRVKLDGGDKKYSIGLDIGTNSVGWAVITDEYKVPSKKFKVLGNTDRHSIKKNLIGALLFDSGETAEATRLKRTARRRYTRRKNRICYLQEIFSNEMAKVDDSFFHRLEESFLVEEDKKHERHPIFGNIVDEVAYHEKYPTIYHLRKKLVDSTDKADLRLIYLALAHMIKFRGHFLIEGDLNPDNSDVDKLFIQLVQTYNQLFEENPINASGVDAKAILSARLSKSRRLENLIAQLPGEKKNGLFGNLIALSLGLTPNFKSNFDLAEDAKLQLSKDTYDDDLDNLLAQIGDQYADLFLAAKNLSDAILLSDILRVNTEITKAPLSASMIKRYDEHHQDLTLLKALVRQQLPEKYKEIFFDQSKNGYAGYIDGGASQEEFYKFIKPILEKMDGTEELLVKLNREDLLRKQRTFDNGSIPHQIHLGELHAILRRQEDFYPFLKDNREKIEKILTFRIPYYVGPLARGNSRFAWMTRKSEETITPWNFEEVVDKGASAQSFIERMTNFDKNLPNEKVLPKHSLLYEYFTVYNELTKVKYVTEGMRKPAFLSGEQKKAIVDLLFKTNRKVTVKQLKEDYFKKIECFDSVEISGVEDRFNASLGTYHDLLKIIKDKDFLDNEENEDILEDIVLTLTLFEDREMIEERLKTYAHLFDDKVMKQLKRRRYTGWGRLSRKLINGIRDKQSGKTILDFLKSDGFANRNFMQLIHDDSLTFKEDIQKAQVSGQGDSLHEHIANLAGSPAIKKGILQTVKVVDELVKVMGRHKPENIVIEMARENQTTQKGQKNSRERMKRIEEGIKELGSQILKEHPVENTQLQNEKLYLYYLQNGRDMYVDQELDINRLSDYDVDHIVPQSFLKDDSIDNKVLTRSDKARGKSDNVPSEEVVKKMKNYWRQLLNAKLITQRKFDNLTKAERGGLSELDKAGFIKRQLVETRQITKHVAQILDSRMNTKYDENDKLIREVKVITLKSKLVSDFRKDFQFYKVREINNYHHAHDAYLNAVVGTALIKKYPKLESEFVYGDYKVYDVRKMIAKSEQEIGKATAKYFFYSNIMNFFKTEITLANGEIRKRPLIETNGETGEIVWDKGRDFATVRKVLSMPQVNIVKKTEVQTGGFSKESILPKRNSDKLIARKKDWDPKKYGGFDSPTVAYSVLVVAKVEKGKSKKLKSVKELLGITIMERSSFEKNPIDFLEAKGYKEVKKDLIIKLPKYSLFELENGRKRMLASAGELQKGNELALPSKYVNFLYLASHYEKLKGSPEDNEQKQLFVEQHKHYLDEIIEQISEFSKRVILADANLDKVLSAYNKHRDKPIREQAENIIHLFTLTNLGAPAAFKYFDTTIDRKRYTSTKEVLDATLIHQSITGLYETRIDLSQLGGDGGGGSGSSEAAAKGGTLNIEDEYRLHETSKEPDVPLGSTWLSDFPQAWAETGGMGLAVRQAPLIIPLKATSTPVSIKQYPMSQEARLGIKPHIQRLLDQGILVPCQSPWNTPLLPVKKPGTNDYRPVQDLREVNKRVEDIHPTVPNPYNLLSGLPPSHQWYTVLDLKDAFFCLRLHPTSQPLFAFEWRDPEMGISGQLTWTRLPQGFKNSPTLFNEALHRDLADFRIQHPDLILLQYVDDLLLAATSEQDCQRGTRALLQTLGNLGYRASAKKAQICQKQVKYLGYLLKEGQRWLTEARKETVMGQPTPKTPRQLREFLGTAGFCRLWIPGFAEMAAPLYPLTKPGTLFNWGPDQQKAYQEIKQALLTAPALGLPDLTKPFELFVDEKQGYAKGVLTQKLGPWRRPVAYLSKKLDPVAAGWPPCLRMVAAIAVLTKDAGKLTMGQPLVILAPHAVEALVKQPPDRWLSNARMTHYQAMLLDTDRVQFGPVVALNPATLLPLPEKEAPHDCLEILAETHGTRPDLTDQPIPDADYTWYTDGSSFLQEGQRRAGAAVTTETEVIWARALPAGTSAQRAELIALTQALKMAEGKKLNVYTDSRYAFATAHVHGEIYRRRGWLTSEGREIKNKNEILALLKALFLPKRLSIIHCPGHQKGNSAEARGNRMADQAAREAAMKAVLETSTLLAGKRTADGSEFEKRTADGSEFESPKKKAKVE

SEQ ID NO: 1006 - protein, 2131 aa, synthetic construct
MPAAKRVKLDGGDKKYSIGLDIGTNSVGWAVITDEYKVPSKKFKVLGNTDRHSIKKNLIGALLFDSGETAEATRLKRTARRRYTRRKNRICYLQEIFSNEMAKVDDSFFHRLEESFLVEEDKKHERHPIFGNIVDEVAYHEKYPTIYHLRKKLVDSTDKADLRLIYLALAHMIKFRGHFLIEGDLNPDNSDVDKLFIQLVQTYNQLFEENPINASGVDAKAILSARLSKSRRLENLIAQLPGEKKNGLFGNLIALSLGLTPNFKSNFDLAEDAKLQLSKDTYDDDLDNLLAQIGDQYADLFLAAKNLSDAILLSDILRVNTEITKAPLSASMIKRYDEHHQDLTLLKALVRQQLPEKYKEIFFDQSKNGYAGYIDGGASQEEFYKFIKPILEKMDGTEELLVKLNREDLLRKQRTFDNGSIPHQIHLGELHAILRRQEDFYPFLKDNREKIEKILTFRIPYYVGPLARGNSRFAWMTRKSEETITPWNFEEVVDKGASAQSFIERMTNFDKNLPNEKVLPKHSLLYEYFTVYNELTKVKYVTEGMRKPAFLSGEQKKAIVDLLFKTNRKVTVKQLKEDYFKKIECFDSVEISGVEDRFNASLGTYHDLLKIIKDKDFLDNEENEDILEDIVLTLTLFEDREMIEERLKTYAHLFDDKVMKQLKRRRYTGWGRLSRKLINGIRDKQSGKTILDFLKSDGFANRNFMQLIHDDSLTFKEDIQKAQVSGQGDSLHEHIANLAGSPAIKKGILQTVKVVDELVKVMGRHKPENIVIEMARENQTTQKGQKNSRERMKRIEEGIKELGSQILKEHPVENTQLQNEKLYLYYLQNGRDMYVDQELDINRLSDYDVDHIVPQSFLKDDSIDNKVLTRSDKARGKSDNVPSEEVVKKMKNYWRQLLNAKLITQRKFDNLTKAERGGLSELDKAGFIKRQLVETRQITKHVAQILDSRMNTKYDENDKLIREVKVITLKSKLVSDFRKDFQFYKVREINNYHHAHDAYLNAVVGTALIKKYPKLESEFVYGDYKVYDVRKMIAKSEQEIGKATAKYFFYSNIMNFFKTEITLANGEIRKRPLIETNGETGEIVWDKGRDFATVRKVLSMPQVNIVKKTEVQTGGFSKESILPKRNSDKLIARKKDWDPKKYGGFDSPTVAYSVLVVAKVEKGKSKKLKSVKELLGITIMERSSFEKNPIDFLEAKGYKEVKKDLIIKLPKYSLFELENGRKRMLASAGELQKGNELALPSKYVNFLYLASHYEKLKGSPEDNEQKQLFVEQHKHYLDEIIEQISEFSKRVILADANLDKVLSAYNKHRDKPIREQAENIIHLFTLTNLGAPAAFKYFDTTIDRKRYTSTKEVLDATLIHQSITGLYETRIDLSQLGGDGGAEAAAKEAAAKEAAAKEAAAKALEAEAAAKEAAAKEAAAKEAAAKAGGTLNIEDEYRLHETSKEPDVPLGSTWLSDFPQAWAETGGMGLAVRQAPLIIPLKATSTPVSIKQYPMSQEARLGIKPHIQRLLDQGILVPCQSPWNTPLLPVKKPGTNDYRPVQDLREVNKRVEDIHPTVPNPYNLLSGLPPSHQWYTVLDLKDAFFCLRLHPTSQPLFAFEWRDPEMGISGQLTWTRLPQGFKNSPTLFNEALHRDLADFRIQHPDLILLQYVDDLLLAATSEQDCQRGTRALLQTLGNLGYRASAKKAQICQKQVKYLGYLLKEGQRWLTEARKETVMGQPTPKTPRQLREFLGKAGFCRLFIPGFAEMAAPLYPLTKPGTLFNWGPDQQKAYQEIKQALLTAPALGLPDLTKPFELFVDEKQGYAKGVLTQKLGPWRRPVAYLSKKLDPVAAGWPPCLRMVAAIAVLTKDAGKLTMGQPLVILAPHAVEALVKQPPDRWLSNARMTHYQAMLLDTDRVQFGPVVALNPATLLPLPEKEAPHDCLEILAETHGTRPDLTDQPIPDADYTWYTDGSSFLQEGQRRAGAAVTTETEVIWARALPAGTSAQRAELIALTQALKMAEGKKLNVYTDSRYAFATAHVHGEIYRRRGWLTSEGREIKNKNEILALLKALFLPKRLSIIHCPGHQKGNSAEARGNRMADQAAREAAMKAVLETSTLLAGKRTADGSEFEKRTADGSEFESPKKKAKVE

SEQ ID NO: 1007 - protein, 2096 aa, synthetic construct
MPAAKRVKLDGGDKKYSIGLDIGTNSVGWAVITDEYKVPSKKFKVLGNTDRHSIKKNLIGALLFDSGETAEATRLKRTARRRYTRRKNRICYLQEIFSNEMAKVDDSFFHRLEESFLVEEDKKHERHPIFGNIVDEVAYHEKYPTIYHLRKKLVDSTDKADLRLIYLALAHMIKFRGHFLIEGDLNPDNSDVDKLFIQLVQTYNQLFEENPINASGVDAKAILSARLSKSRRLENLIAQLPGEKKNGLFGNLIALSLGLTPNFKSNFDLAEDAKLQLSKDTYDDDLDNLLAQIGDQYADLFLAAKNLSDAILLSDILRVNTEITKAPLSASMIKRYDEHHQDLTLLKALVRQQLPEKYKEIFFDQSKNGYAGYIDGGASQEEFYKFIKPILEKMDGTEELLVKLNREDLLRKQRTFDNGSIPHQIHLGELHAILRRQEDFYPFLKDNREKIEKILTFRIPYYVGPLARGNSRFAWMTRKSEETITPWNFEEVVDKGASAQSFIERMTNFDKNLPNEKVLPKHSLLYEYFTVYNELTKVKYVTEGMRKPAFLSGEQKKAIVDLLFKTNRKVTVKQLKEDYFKKIECFDSVEISGVEDRFNASLGTYHDLLKIIKDKDFLDNEENEDILEDIVLTLTLFEDREMIEERLKTYAHLFDDKVMKQLKRRRYTGWGRLSRKLINGIRDKQSGKTILDFLKSDGFANRNFMQLIHDDSLTFKEDIQKAQVSGQGDSLHEHIANLAGSPAIKKGILQTVKVVDELVKVMGRHKPENIVIEMARENQTTQKGQKNSRERMKRIEEGIKELGSQILKEHPVENTQLQNEKLYLYYLQNGRDMYVDQELDINRLSDYDVDHIVPQSFLKDDSIDNKVLTRSDKARGKSDNVPSEEVVKKMKNYWRQLLNAKLITQRKFDNLTKAERGGLSELDKAGFIKRQLVETRQITKHVAQILDSRMNTKYDENDKLIREVKVITLKSKLVSDFRKDFQFYKVREINNYHHAHDAYLNAVVGTALIKKYPKLESEFVYGDYKVYDVRKMIAKSEQEIGKATAKYFFYSNIMNFFKTEITLANGEIRKRPLIETNGETGEIVWDKGRDFATVRKVLSMPQVNIVKKTEVQTGGFSKESILPKRNSDKLIARKKDWDPKKYGGFDSPTVAYSVLVVAKVEKGKSKKLKSVKELLGITIMERSSFEKNPIDFLEAKGYKEVKKDLIIKLPKYSLFELENGRKRMLASAGELQKGNELALPSKYVNFLYLASHYEKLKGSPEDNEQKQLFVEQHKHYLDEIIEQISEFSKRVILADANLDKVLSAYNKHRDKPIREQAENIIHLFTLTNLGAPAAFKYFDTTIDRKRYTSTKEVLDATLIHQSITGLYETRIDLSQLGGDGGPAPEAAAKGSSGGTLNIEDEYRLHETSKEPDVPLGSTWLSDFPQAWAETGGMGLAVRQAPLIIPLKATSTPVSIKQYPMSQEARLGIKPHIQRLLDQGILVPCQSPWNTPLLPVKKPGTNDYRPVQDLREVNKRVEDIHPTVPNPYNLLSGLPPSHQWYTVLDLKDAFFCLRLHPTSQPLFAFEWRDPEMGISGQLTWTRLPQGFKNSPTLFNEALHRDLADFRIQHPDLILLQYVDDLLLAATSEQDCQRGTRALLQTLGNLGYRASAKKAQICQKQVKYLGYLLKEGQRWLTEARKETVMGQPTPKTPRQLREFLGKAGFCRLFIPGFAEMAAPLYPLTKPGTLFNWGPDQQKAYQEIKQALLTAPALGLPDLTKPFELFVDEKQGYAKGVLTQKLGPWRRPVAYLSKKLDPVAAGWPPCLRMVAAIAVLTKDAGKLTMGQPLVILAPHAVEALVKQPPDRWLSNARMTHYQAMLLDTDRVQFGPVVALNPATLLPLPEKEAPHDCLEILAETHGTRPDLTDQPIPDADYTWYTDGSSFLQEGQRRAGAAVTTETEVIWARALPAGTSAQRAELIALTQALKMAEGKKLNVYTDSRYAFATAHVHGEIYRRRGWLTSEGREIKNKNEILALLKALFLPKRLSIIHCPGHQKGNSAEARGNRMADQAAREAAMKAVLETSTLLAGKRTADGSEFEKRTADGSEFESPKKKAKVE

SEQ ID NO: 1008 - protein, 2105 aa, synthetic construct
MPAAKRVKLDGGDKKYSIGLDIGTNSVGWAVITDEYKVPSKKFKVLGNTDRHSIKKNLIGALLFDSGETAEATRLKRTARRRYTRRKNRICYLQEIFSNEMAKVDDSFFHRLEESFLVEEDKKHERHPIFGNIVDEVAYHEKYPTIYHLRKKLVDSTDKADLRLIYLALAHMIKFRGHFLIEGDLNPDNSDVDKLFIQLVQTYNQLFEENPINASGVDAKAILSARLSKSRRLENLIAQLPGEKKNGLFGNLIALSLGLTPNFKSNFDLAEDAKLQLSKDTYDDDLDNLLAQIGDQYADLFLAAKNLSDAILLSDILRVNTEITKAPLSASMIKRYDEHHQDLTLLKALVRQQLPEKYKEIFFDQSKNGYAGYIDGGASQEEFYKFIKPILEKMDGTEELLVKLNREDLLRKQRTFDNGSIPHQIHLGELHAILRRQEDFYPFLKDNREKIEKILTFRIPYYVGPLARGNSRFAWMTRKSEETITPWNFEEVVDKGASAQSFIERMTNFDKNLPNEKVLPKHSLLYEYFTVYNELTKVKYVTEGMRKPAFLSGEQKKAIVDLLFKTNRKVTVKQLKEDYFKKIECFDSVEISGVEDRFNASLGTYHDLLKIIKDKDFLDNEENEDILEDIVLTLTLFEDREMIEERLKTYAHLFDDKVMKQLKRRRYTGWGRLSRKLINGIRDKQSGKTILDFLKSDGFANRNFMQLIHDDSLTFKEDIQKAQVSGQGDSLHEHIANLAGSPAIKKGILQTVKVVDELVKVMGRHKPENIVIEMARENQTTQKGQKNSRERMKRIEEGIKELGSQILKEHPVENTQLQNEKLYLYYLQNGRDMYVDQELDINRLSDYDVDHIVPQSFLKDDSIDNKVLTRSDKARGKSDNVPSEEVVKKMKNYWRQLLNAKLITQRKFDNLTKAERGGLSELDKAGFIKRQLVETRQITKHVAQILDSRMNTKYDENDKLIREVKVITLKSKLVSDFRKDFQFYKVREINNYHHAHDAYLNAVVGTALIKKYPKLESEFVYGDYKVYDVRKMIAKSEQEIGKATAKYFFYSNIMNFFKTEITLANGEIRKRPLIETNGETGEIVWDKGRDFATVRKVLSMPQVNIVKKTEVQTGGFSKESILPKRNSDKLIARKKDWDPKKYGGFDSPTVAYSVLVVAKVEKGKSKKLKSVKELLGITIMERSSFEKNPIDFLEAKGYKEVKKDLIIKLPKYSLFELENGRKRMLASAGELQKGNELALPSKYVNFLYLASHYEKLKGSPEDNEQKQLFVEQHKHYLDEIIEQISEFSKRVILADANLDKVLSAYNKHRDKPIREQAENIIHLFTLTNLGAPAAFKYFDTTIDRKRYTSTKEVLDATLIHQSITGLYETRIDLSQLGGDGGEAAAKEAAAKEAAAKEAAAKGGTLNIEDEYRLHETSKEPDVPLGSTWLSDFPQAWAETGGMGLAVRQAPLIIPLKATSTPVSIKQYPMSQEARLGIKPHIQRLLDQGILVPCQSPWNTPLLPVKKPGTNDYRPVQDLREVNKRVEDIHPTVPNPYNLLSGLPPSHQWYTVLDLKDAFFCLRLHPTSQPLFAFEWRDPEMGISGQLTWTRLPQGFKNSPTLFNEALHRDLADFRIQHPDLILLQYVDDLLLAATSEQDCQRGTRALLQTLGNLGYRASAKKAQICQKQVKYLGYLLKEGQRWLTEARKETVMGQPTPKTPRQLREFLGKAGFCRLFIPGFAEMAAPLYPLTKPGTLFNWGPDQQKAYQEIKQALLTAPALGLPDLTKPFELFVDEKQGYAKGVLTQKLGPWRRPVAYLSKKLDPVAAGWPPCLRMVAAIAVLTKDAGKLTMGQPLVILAPHAVEALVKQPPDRWLSNARMTHYQAMLLDTDRVQFGPVVALNPATLLPLPEKEAPHDCLEILAETHGTRPDLTDQPIPDADYTWYTDGSSFLQEGQRRAGAAVTTETEVIWARALPAGTSAQRAELIALTQALKMAEGKKLNVYTDSRYAFATAHVHGEIYRRRGWLTSEGREIKNKNEILALLKALFLPKRLSIIHCPGHQKGNSAEARGNRMADQAAREAAMKAVLETSTLLAGKRTADGSEFEKRTADGSEFESPKKKAKVE

SEQ ID NO: 1009 - protein, 2090 aa, synthetic construct
MPAAKRVKLDGGDKKYSIGLDIGTNSVGWAVITDEYKVPSKKFKVLGNTDRHSIKKNLIGALLFDSGETAEATRLKRTARRRYTRRKNRICYLQEIFSNEMAKVDDSFFHRLEESFLVEEDKKHERHPIFGNIVDEVAYHEKYPTIYHLRKKLVDSTDKADLRLIYLALAHMIKFRGHFLIEGDLNPDNSDVDKLFIQLVQTYNQLFEENPINASGVDAKAILSARLSKSRRLENLIAQLPGEKKNGLFGNLIALSLGLTPNFKSNFDLAEDAKLQLSKDTYDDDLDNLLAQIGDQYADLFLAAKNLSDAILLSDILRVNTEITKAPLSASMIKRYDEHHQDLTLLKALVRQQLPEKYKEIFFDQSKNGYAGYIDGGASQEEFYKFIKPILEKMDGTEELLVKLNREDLLRKQRTFDNGSIPHQIHLGELHAILRRQEDFYPFLKDNREKIEKILTFRIPYYVGPLARGNSRFAWMTRKSEETITPWNFEEVVDKGASAQSFIERMTNFDKNLPNEKVLPKHSLLYEYFTVYNELTKVKYVTEGMRKPAFLSGEQKKAIVDLLFKTNRKVTVKQLKEDYFKKIECFDSVEISGVEDRFNASLGTYHDLLKIIKDKDFLDNEENEDILEDIVLTLTLFEDREMIEERLKTYAHLFDDKVMKQLKRRRYTGWGRLSRKLINGIRDKQSGKTILDFLKSDGFANRNFMQLIHDDSLTFKEDIQKAQVSGQGDSLHEHIANLAGSPAIKKGILQTVKVVDELVKVMGRHKPENIVIEMARENQTTQKGQKNSRERMKRIEEGIKELGSQILKEHPVENTQLQNEKLYLYYLQNGRDMYVDQELDINRLSDYDVDHIVPQSFLKDDSIDNKVLTRSDKARGKSDNVPSEEVVKKMKNYWRQLLNAKLITQRKFDNLTKAERGGLSELDKAGFIKRQLVETRQITKHVAQILDSRMNTKYDENDKLIREVKVITLKSKLVSDFRKDFQFYKVREINNYHHAHDAYLNAVVGTALIKKYPKLESEFVYGDYKVYDVRKMIAKSEQEIGKATAKYFFYSNIMNFFKTEITLANGEIRKRPLIETNGETGEIVWDKGRDFATVRKVLSMPQVNIVKKTEVQTGGFSKESILPKRNSDKLIARKKDWDPKKYGGFDSPTVAYSVLVVAKVEKGKSKKLKSVKELLGITIMERSSFEKNPIDFLEAKGYKEVKKDLIIKLPKYSLFELENGRKRMLASAGELQKGNELALPSKYVNFLYLASHYEKLKGSPEDNEQKQLFVEQHKHYLDEIIEQISEFSKRVILADANLDKVLSAYNKHRDKPIREQAENIIHLFTLTNLGAPAAFKYFDTTIDRKRYTSTKEVLDATLIHQSITGLYETRIDLSQLGGDGGEAAAKGGTLNIEDEYRLHETSKEPDVPLGSTWLSDFPQAWAETGGMGLAVRQAPLIIPLKATSTPVSIKQYPMSQEARLGIKPHIQRLLDQGILVPCQSPWNTPLLPVKKPGTNDYRPVQDLREVNKRVEDIHPTVPNPYNLLSGLPPSHQWYTVLDLKDAFFCLRLHPTSQPLFAFEWRDPEMGISGQLTWTRLPQGFKNSPTLFNEALHRDLADFRIQHPDLILLQYVDDLLLAATSEQDCQRGTRALLQTLGNLGYRASAKKAQICQKQVKYLGYLLKEGQRWLTEARKETVMGQPTPKTPRQLREFLGKAGFCRLFIPGFAEMAAPLYPLTKPGTLFNWGPDQQKAYQEIKQALLTAPALGLPDLTKPFELFVDEKQGYAKGVLTQKLGPWRRPVAYLSKKLDPVAAGWPPCLRMVAAIAVLTKDAGKLTMGQPLVILAPHAVEALVKQPPDRWLSNARMTHYQAMLLDTDRVQFGPVVALNPATLLPLPEKEAPHDCLEILAETHGTRPDLTDQPIPDADYTWYTDGSSFLQEGQRRAGAAVTTETEVIWARALPAGTSAQRAELIALTQALKMAEGKKLNVYTDSRYAFATAHVHGEIYRRRGWLTSEGREIKNKNEILALLKALFLPKRLSIIHCPGHQKGNSAEARGNRMADQAAREAAMKAVLETSTLLAGKRTADGSEFEKRTADGSEFESPKKKAKVE

SEQ ID NO: 1010 - protein, 2096 aa, synthetic construct
MPAAKRVKLDGGDKKYSIGLDIGTNSVGWAVITDEYKVPSKKFKVLGNTDRHSIKKNLIGALLFDSGETAEATRLKRTARRRYTRRKNRICYLQEIFSNEMAKVDDSFFHRLEESFLVEEDKKHERHPIFGNIVDEVAYHEKYPTIYHLRKKLVDSTDKADLRLIYLALAHMIKFRGHFLIEGDLNPDNSDVDKLFIQLVQTYNQLFEENPINASGVDAKAILSARLSKSRRLENLIAQLPGEKKNGLFGNLIALSLGLTPNFKSNFDLAEDAKLQLSKDTYDDDLDNLLAQIGDQYADLFLAAKNLSDAILLSDILRVNTEITKAPLSASMIKRYDEHHQDLTLLKALVRQQLPEKYKEIFFDQSKNGYAGYIDGGASQEEFYKFIKPILEKMDGTEELLVKLNREDLLRKQRTFDNGSIPHQIHLGELHAILRRQEDFYPFLKDNREKIEKILTFRIPYYVGPLARGNSRFAWMTRKSEETITPWNFEEVVDKGASAQSFIERMTNFDKNLPNEKVLPKHSLLYEYFTVYNELTKVKYVTEGMRKPAFLSGEQKKAIVDLLFKTNRKVTVKQLKEDYFKKIECFDSVEISGVEDRFNASLGTYHDLLKIIKDKDFLDNEENEDILEDIVLTLTLFEDREMIEERLKTYAHLFDDKVMKQLKRRRYTGWGRLSRKLINGIRDKQSGKTILDFLKSDGFANRNFMQLIHDDSLTFKEDIQKAQVSGQGDSLHEHIANLAGSPAIKKGILQTVKVVDELVKVMGRHKPENIVIEMARENQTTQKGQKNSRERMKRIEEGIKELGSQILKEHPVENTQLQNEKLYLYYLQNGRDMYVDQELDINRLSDYDVDHIVPQSFLKDDSIDNKVLTRSDKARGKSDNVPSEEVVKKMKNYWRQLLNAKLITQRKFDNLTKAERGGLSELDKAGFIKRQLVETRQITKHVAQILDSRMNTKYDENDKLIREVKVITLKSKLVSDFRKDFQFYKVREINNYHHAHDAYLNAVVGTALIKKYPKLESEFVYGDYKVYDVRKMIAKSEQEIGKATAKYFFYSNIMNFFKTEITLANGEIRKRPLIETNGETGEIVWDKGRDFATVRKVLSMPQVNIVKKTEVQTGGFSKESILPKRNSDKLIARKKDWDPKKYGGFDSPTVAYSVLVVAKVEKGKSKKLKSVKELLGITIMERSSFEKNPIDFLEAKGYKEVKKDLIIKLPKYSLFELENGRKRMLASAGELQKGNELALPSKYVNFLYLASHYEKLKGSPEDNEQKQLFVEQHKHYLDEIIEQISEFSKRVILADANLDKVLSAYNKHRDKPIREQAENIIHLFTLTNLGAPAAFKYFDTTIDRKRYTSTKEVLDATLIHQSITGLYETRIDLSQLGGDGGGSSPAPEAAAKGGTLNIEDEYRLHETSKEPDVPLGSTWLSDFPQAWAETGGMGLAVRQAPLIIPLKATSTPVSIKQYPMSQEARLGIKPHIQRLLDQGILVPCQSPWNTPLLPVKKPGTNDYRPVQDLREVNKRVEDIHPTVPNPYNLLSGLPPSHQWYTVLDLKDAFFCLRLHPTSQPLFAFEWRDPEMGISGQLTWTRLPQGFKNSPTLFNEALHRDLADFRIQHPDLILLQYVDDLLLAATSEQDCQRGTRALLQTLGNLGYRASAKKAQICQKQVKYLGYLLKEGQRWLTEARKETVMGQPTPKTPRQLREFLGKAGFCRLFIPGFAEMAAPLYPLTKPGTLFNWGPDQQKAYQEIKQALLTAPALGLPDLTKPFELFVDEKQGYAKGVLTQKLGPWRRPVAYLSKKLDPVAAGWPPCLRMVAAIAVLTKDAGKLTMGQPLVILAPHAVEALVKQPPDRWLSNARMTHYQAMLLDTDRVQFGPVVALNPATLLPLPEKEAPHDCLEILAETHGTRPDLTDQPIPDADYTWYTDGSSFLQEGQRRAGAAVTTETEVIWARALPAGTSAQRAELIALTQALKMAEGKKLNVYTDSRYAFATAHVHGEIYRRRGWLTSEGREIKNKNEILALLKALFLPKRLSIIHCPGHQKGNSAEARGNRMADQAAREAAMKAVLETSTLLAGKRTADGSEFEKRTADGSEFESPKKKAKVE

SEQ ID NO: 1011 - protein, 2088 aa, synthetic construct
MPAAKRVKLDGGDKKYSIGLDIGTNSVGWAVITDEYKVPSKKFKVLGNTDRHSIKKNLIGALLFDSGETAEATRLKRTARRRYTRRKNRICYLQEIFSNEMAKVDDSFFHRLEESFLVEEDKKHERHPIFGNIVDEVAYHEKYPTIYHLRKKLVDSTDKADLRLIYLALAHMIKFRGHFLIEGDLNPDNSDVDKLFIQLVQTYNQLFEENPINASGVDAKAILSARLSKSRRLENLIAQLPGEKKNGLFGNLIALSLGLTPNFKSNFDLAEDAKLQLSKDTYDDDLDNLLAQIGDQYADLFLAAKNLSDAILLSDILRVNTEITKAPLSASMIKRYDEHHQDLTLLKALVRQQLPEKYKEIFFDQSKNGYAGYIDGGASQEEFYKFIKPILEKMDGTEELLVKLNREDLLRKQRTFDNGSIPHQIHLGELHAILRRQEDFYPFLKDNREKIEKILTFRIPYYVGPLARGNSRFAWMTRKSEETITPWNFEEVVDKGASAQSFIERMTNFDKNLPNEKVLPKHSLLYEYFTVYNELTKVKYVTEGMRKPAFLSGEQKKAIVDLLFKTNRKVTVKQLKEDYFKKIECFDSVEISGVEDRFNASLGTYHDLLKIIKDKDFLDNEENEDILEDIVLTLTLFEDREMIEERLKTYAHLFDDKVMKQLKRRRYTGWGRLSRKLINGIRDKQSGKTILDFLKSDGFANRNFMQLIHDDSLTFKEDIQKAQVSGQGDSLHEHIANLAGSPAIKKGILQTVKVVDELVKVMGRHKPENIVIEMARENQTTQKGQKNSRERMKRIEEGIKELGSQILKEHPVENTQLQNEKLYLYYLQNGRDMYVDQELDINRLSDYDVDHIVPQSFLKDDSIDNKVLTRSDKARGKSDNVPSEEVVKKMKNYWRQLLNAKLITQRKFDNLTKAERGGLSELDKAGFIKRQLVETRQITKHVAQILDSRMNTKYDENDKLIREVKVITLKSKLVSDFRKDFQFYKVREINNYHHAHDAYLNAVVGTALIKKYPKLESEFVYGDYKVYDVRKMIAKSEQEIGKATAKYFFYSNIMNFFKTEITLANGEIRKRPLIETNGETGEIVWDKGRDFATVRKVLSMPQVNIVKKTEVQTGGFSKESILPKRNSDKLIARKKDWDPKKYGGFDSPTVAYSVLVVAKVEKGKSKKLKSVKELLGITIMERSSFEKNPIDFLEAKGYKEVKKDLIIKLPKYSLFELENGRKRMLASAGELQKGNELALPSKYVNFLYLASHYEKLKGSPEDNEQKQLFVEQHKHYLDEIIEQISEFSKRVILADANLDKVLSAYNKHRDKPIREQAENIIHLFTLTNLGAPAAFKYFDTTIDRKRYTSTKEVLDATLIHQSITGLYETRIDLSQLGGDGGGSSGGTLNIEDEYRLHETSKEPDVPLGSTWLSDFPQAWAETGGMGLAVRQAPLIIPLKATSTPVSIKQYPMSQEARLGIKPHIQRLLDQGILVPCQSPWNTPLLPVKKPGTNDYRPVQDLREVNKRVEDIHPTVPNPYNLLSGLPPSHQWYTVLDLKDAFFCLRLHPTSQPLFAFEWRDPEMGISGQLTWTRLPQGFKNSPTLFNEALHRDLADFRIQHPDLILLQYVDDLLLAATSEQDCQRGTRALLQTLGNLGYRASAKKAQICQKQVKYLGYLLKEGQRWLTEARKETVMGQPTPKTPRQLREFLGKAGFCRLFIPGFAEMAAPLYPLTKPGTLFNWGPDQQKAYQEIKQALLTAPALGLPDLTKPFELFVDEKQGYAKGVLTQKLGPWRRPVAYLSKKLDPVAAGWPPCLRMVAAIAVLTKDAGKLTMGQPLVILAPHAVEALVKQPPDRWLSNARMTHYQAMLLDTDRVQFGPVVALNPATLLPLPEKEAPHDCLEILAETHGTRPDLTDQPIPDADYTWYTDGSSFLQEGQRRAGAAVTTETEVIWARALPAGTSAQRAELIALTQALKMAEGKKLNVYTDSRYAFATAHVHGEIYRRRGWLTSEGREIKNKNEILALLKALFLPKRLSIIHCPGHQKGNSAEARGNRMADQAAREAAMKAVLETSTLLAGKRTADGSEFEKRTADGSEFESPKKKAKVE

SEQ ID NO: 1012 - protein, 2096 aa, synthetic construct
MPAAKRVKLDGGDKKYSIGLDIGTNSVGWAVITDEYKVPSKKFKVLGNTDRHSIKKNLIGALLFDSGETAEATRLKRTARRRYTRRKNRICYLQEIFSNEMAKVDDSFFHRLEESFLVEEDKKHERHPIFGNIVDEVAYHEKYPTIYHLRKKLVDSTDKADLRLIYLALAHMIKFRGHFLIEGDLNPDNSDVDKLFIQLVQTYNQLFEENPINASGVDAKAILSARLSKSRRLENLIAQLPGEKKNGLFGNLIALSLGLTPNFKSNFDLAEDAKLQLSKDTYDDDLDNLLAQIGDQYADLFLAAKNLSDAILLSDILRVNTEITKAPLSASMIKRYDEHHQDLTLLKALVRQQLPEKYKEIFFDQSKNGYAGYIDGGASQEEFYKFIKPILEKMDGTEELLVKLNREDLLRKQRTFDNGSIPHQIHLGELHAILRRQEDFYPFLKDNREKIEKILTFRIPYYVGPLARGNSRFAWMTRKSEETITPWNFEEVVDKGASAQSFIERMTNFDKNLPNEKVLPKHSLLYEYFTVYNELTKVKYVTEGMRKPAFLSGEQKKAIVDLLFKTNRKVTVKQLKEDYFKKIECFDSVEISGVEDRFNASLGTYHDLLKIIKDKDFLDNEENEDILEDIVLTLTLFEDREMIEERLKTYAHLFDDKVMKQLKRRRYTGWGRLSRKLINGIRDKQSGKTILDFLKSDGFANRNFMQLIHDDSLTFKEDIQKAQVSGQGDSLHEHIANLAGSPAIKKGILQTVKVVDELVKVMGRHKPENIVIEMARENQTTQKGQKNSRERMKRIEEGIKELGSQILKEHPVENTQLQNEKLYLYYLQNGRDMYVDQELDINRLSDYDVDHIVPQSFLKDDSIDNKVLTRSDKARGKSDNVPSEEVVKKMKNYWRQLLNAKLITQRKFDNLTKAERGGLSELDKAGFIKRQLVETRQITKHVAQILDSRMNTKYDENDKLIREVKVITLKSKLVSDFRKDFQFYKVREINNYHHAHDAYLNAVVGTALIKKYPKLESEFVYGDYKVYDVRKMIAKSEQEIGKATAKYFFYSNIMNFFKTEITLANGEIRKRPLIETNGETGEIVWDKGRDFATVRKVLSMPQVNIVKKTEVQTGGFSKESILPKRNSDKLIARKKDWDPKKYGGFDSPTVAYSVLVVAKVEKGKSKKLKSVKELLGITIMERSSFEKNPIDFLEAKGYKEVKKDLIIKLPKYSLFELENGRKRMLASAGELQKGNELALPSKYVNFLYLASHYEKLKGSPEDNEQKQLFVEQHKHYLDEIIEQISEFSKRVILADANLDKVLSAYNKHRDKPIREQAENIIHLFTLTNLGAPAAFKYFDTTIDRKRYTSTKEVLDATLIHQSITGLYETRIDLSQLGGDGGEAAAKGSSGGGGGTLNIEDEYRLHETSKEPDVPLGSTWLSDFPQAWAETGGMGLAVRQAPLIIPLKATSTPVSIKQYPMSQEARLGIKPHIQRLLDQGILVPCQSPWNTPLLPVKKPGTNDYRPVQDLREVNKRVEDIHPTVPNPYNLLSGLPPSHQWYTVLDLKDAFFCLRLHPTSQPLFAFEWRDPEMGISGQLTWTRLPQGFKNSPTLFNEALHRDLADFRIQHPDLILLQYVDDLLLAATSEQDCQRGTRALLQTLGNLGYRASAKKAQICQKQVKYLGYLLKEGQRWLTEARKETVMGQPTPKTPRQLREFLGKAGFCRLFIPGFAEMAAPLYPLTKPGTLFNWGPDQQKAYQEIKQALLTAPALGLPDLTKPFELFVDEKQGYAKGVLTQKLGPWRRPVAYLSKKLDPVAAGWPPCLRMVAAIAVLTKDAGKLTMGQPLVILAPHAVEALVKQPPDRWLSNARMTHYQAMLLDTDRVQFGPVVALNPATLLPLPEKEAPHDCLEILAETHGTRPDLTDQPIPDADYTWYTDGSSFLQEGQRRAGAAVTTETEVIWARALPAGTSAQRAELIALTQALKMAEGKKLNVYTDSRYAFATAHVHGEIYRRRGWLTSEGREIKNKNEILALLKALFLPKRLSIIHCPGHQKGNSAEARGNRMADQAAREAAMKAVLETSTLLAGKRTADGSEFEKRTADGSEFESPKKKAKVE

SEQ ID NO: 1013 - protein, 2094 aa, synthetic construct
MPAAKRVKLDGGDKKYSIGLDIGTNSVGWAVITDEYKVPSKKFKVLGNTDRHSIKKNLIGALLFDSGETAEATRLKRTARRRYTRRKNRICYLQEIFSNEMAKVDDSFFHRLEESFLVEEDKKHERHPIFGNIVDEVAYHEKYPTIYHLRKKLVDSTDKADLRLIYLALAHMIKFRGHFLIEGDLNPDNSDVDKLFIQLVQTYNQLFEENPINASGVDAKAILSARLSKSRRLENLIAQLPGEKKNGLFGNLIALSLGLTPNFKSNFDLAEDAKLQLSKDTYDDDLDNLLAQIGDQYADLFLAAKNLSDAILLSDILRVNTEITKAPLSASMIKRYDEHHQDLTLLKALVRQQLPEKYKEIFFDQSKNGYAGYIDGGASQEEFYKFIKPILEKMDGTEELLVKLNREDLLRKQRTFDNGSIPHQIHLGELHAILRRQEDFYPFLKDNREKIEKILTFRIPYYVGPLARGNSRFAWMTRKSEETITPWNFEEVVDKGASAQSFIERMTNFDKNLPNEKVLPKHSLLYEYFTVYNELTKVKYVTEGMRKPAFLSGEQKKAIVDLLFKTNRKVTVKQLKEDYFKKIECFDSVEISGVEDRFNASLGTYHDLLKIIKDKDFLDNEENEDILEDIVLTLTLFEDREMIEERLKTYAHLFDDKVMKQLKRRRYTGWGRLSRKLINGIRDKQSGKTILDFLKSDGFANRNFMQLIHDDSLTFKEDIQKAQVSGQGDSLHEHIANLAGSPAIKKGILQTVKVVDELVKVMGRHKPENIVIEMARENQTTQKGQKNSRERMKRIEEGIKELGSQILKEHPVENTQLQNEKLYLYYLQNGRDMYVDQELDINRLSDYDVDHIVPQSFLKDDSIDNKVLTRSDKARGKSDNVPSEEVVKKMKNYWRQLLNAKLITQRKFDNLTKAERGGLSELDKAGFIKRQLVETRQITKHVAQILDSRMNTKYDENDKLIREVKVITLKSKLVSDFRKDFQFYKVREINNYHHAHDAYLNAVVGTALIKKYPKLESEFVYGDYKVYDVRKMIAKSEQEIGKATAKYFFYSNIMNFFKTEITLANGEIRKRPLIETNGETGEIVWDKGRDFATVRKVLSMPQVNIVKKTEVQTGGFSKESILPKRNSDKLIARKKDWDPKKYGGFDSPTVAYSVLVVAKVEKGKSKKLKSVKELLGITIMERSSFEKNPIDFLEAKGYKEVKKDLIIKLPKYSLFELENGRKRMLASAGELQKGNELALPSKYVNFLYLASHYEKLKGSPEDNEQKQLFVEQHKHYLDEIIEQISEFSKRVILADANLDKVLSAYNKHRDKPIREQAENIIHLFTLTNLGAPAAFKYFDTTIDRKRYTSTKEVLDATLIHQSITGLYETRIDLSQLGGDGGGGGPAPGSSGGTLNIEDEYRLHETSKEPDVPLGSTWLSDFPQAWAETGGMGLAVRQAPLIIPLKATSTPVSIKQYPMSQEARLGIKPHIQRLLDQGILVPCQSPWNTPLLPVKKPGTNDYRPVQDLREVNKRVEDIHPTVPNPYNLLSGLPPSHQWYTVLDLKDAFFCLRLHPTSQPLFAFEWRDPEMGISGQLTWTRLPQGFKNSPTLFNEALHRDLADFRIQHPDLILLQYVDDLLLAATSEQDCQRGTRALLQTLGNLGYRASAKKAQICQKQVKYLGYLLKEGQRWLTEARKETVMGQPTPKTPRQLREFLGKAGFCRLFIPGFAEMAAPLYPLTKPGTLFNWGPDQQKAYQEIKQALLTAPALGLPDLTKPFELFVDEKQGYAKGVLTQKLGPWRRPVAYLSKKLDPVAAGWPPCLRMVAAIAVLTKDAGKLTMGQPLVILAPHAVEALVKQPPDRWLSNARMTHYQAMLLDTDRVQFGPVVALNPATLLPLPEKEAPHDCLEILAETHGTRPDLTDQPIPDADYTWYTDGSSFLQEGQRRAGAAVTTETEVIWARALPAGTSAQRAELIALTQALKMAEGKKLNVYTDSRYAFATAHVHGEIYRRRGWLTSEGREIKNKNEILALLKALFLPKRLSIIHCPGHQKGNSAEARGNRMADQAAREAAMKAVLETSTLLAGKRTADGSEFEKRTADGSEFESPKKKAKVE

SEQ ID NO: 1014 - protein, 2094 aa, synthetic construct
MPAAKRVKLDGGDKKYSIGLDIGTNSVGWAVITDEYKVPSKKFKVLGNTDRHSIKKNLIGALLFDSGETAEATRLKRTARRRYTRRKNRICYLQEIFSNEMAKVDDSFFHRLEESFLVEEDKKHERHPIFGNIVDEVAYHEKYPTIYHLRKKLVDSTDKADLRLIYLALAHMIKFRGHFLIEGDLNPDNSDVDKLFIQLVQTYNQLFEENPINASGVDAKAILSARLSKSRRLENLIAQLPGEKKNGLFGNLIALSLGLTPNFKSNFDLAEDAKLQLSKDTYDDDLDNLLAQIGDQYADLFLAAKNLSDAILLSDILRVNTEITKAPLSASMIKRYDEHHQDLTLLKALVRQQLPEKYKEIFFDQSKNGYAGYIDGGASQEEFYKFIKPILEKMDGTEELLVKLNREDLLRKQRTFDNGSIPHQIHLGELHAILRRQEDFYPFLKDNREKIEKILTFRIPYYVGPLARGNSRFAWMTRKSEETITPWNFEEVVDKGASAQSFIERMTNFDKNLPNEKVLPKHSLLYEYFTVYNELTKVKYVTEGMRKPAFLSGEQKKAIVDLLFKTNRKVTVKQLKEDYFKKIECFDSVEISGVEDRFNASLGTYHDLLKIIKDKDFLDNEENEDILEDIVLTLTLFEDREMIEERLKTYAHLFDDKVMKQLKRRRYTGWGRLSRKLINGIRDKQSGKTILDFLKSDGFANRNFMQLIHDDSLTFKEDIQKAQVSGQGDSLHEHIANLAGSPAIKKGILQTVKVVDELVKVMGRHKPENIVIEMARENQTTQKGQKNSRERMKRIEEGIKELGSQILKEHPVENTQLQNEKLYLYYLQNGRDMYVDQELDINRLSDYDVDHIVPQSFLKDDSIDNKVLTRSDKARGKSDNVPSEEVVKKMKNYWRQLLNAKLITQRKFDNLTKAERGGLSELDKAGFIKRQLVETRQITKHVAQILDSRMNTKYDENDKLIREVKVITLKSKLVSDFRKDFQFYKVREINNYHHAHDAYLNAVVGTALIKKYPKLESEFVYGDYKVYDVRKMIAKSEQEIGKATAKYFFYSNIMNFFKTEITLANGEIRKRPLIETNGETGEIVWDKGRDFATVRKVLSMPQVNIVKKTEVQTGGFSKESILPKRNSDKLIARKKDWDPKKYGGFDSPTVAYSVLVVAKVEKGKSKKLKSVKELLGITIMERSSFEKNPIDFLEAKGYKEVKKDLIIKLPKYSLFELENGRKRMLASAGELQKGNELALPSKYVNFLYLASHYEKLKGSPEDNEQKQLFVEQHKHYLDEIIEQISEFSKRVILADANLDKVLSAYNKHRDKPIREQAENIIHLFTLTNLGAPAAFKYFDTTIDRKRYTSTKEVLDATLIHQSITGLYETRIDLSQLGGDGGGSSPAPGGSGGTLNIEDEYRLHETSKEPDVPLGSTWLSDFPQAWAETGGMGLAVRQAPLIIPLKATSTPVSIKQYPMSQEARLGIKPHIQRLLDQGILVPCQSPWNTPLLPVKKPGTNDYRPVQDLREVNKRVEDIHPTVPNPYNLLSGLPPSHQWYTVLDLKDAFFCLRLHPTSQPLFAFEWRDPEMGISGQLTWTRLPQGFKNSPTLFNEALHRDLADFRIQHPDLILLQYVDDLLLAATSEQDCQRGTRALLQTLGNLGYRASAKKAQICQKQVKYLGYLLKEGQRWLTEARKETVMGQPTPKTPRQLREFLGKAGFCRLFIPGFAEMAAPLYPLTKPGTLFNWGPDQQKAYQEIKQALLTAPALGLPDLTKPFELFVDEKQGYAKGVLTQKLGPWRRPVAYLSKKLDPVAAGWPPCLRMVAAIAVLTKDAGKLTMGQPLVILAPHAVEALVKQPPDRWLSNARMTHYQAMLLDTDRVQFGPVVALNPATLLPLPEKEAPHDCLEILAETHGTRPDLTDQPIPDADYTWYTDGSSFLQEGQRRAGAAVTTETEVIWARALPAGTSAQRAELIALTQALKMAEGKKLNVYTDSRYAFATAHVHGEIYRRRGWLTSEGREIKNKNEILALLKALFLPKRLSIIHCPGHQKGNSAEARGNRMADQAAREAAMKAVLETSTLLAGKRTADGSEFEKRTADGSEFESPKKKAKVE

SEQ ID NO: 1015 - protein, 2094 aa, synthetic construct
MPAAKRVKLDGGDKKYSIGLDIGTNSVGWAVITDEYKVPSKKFKVLGNTDRHSIKKNLIGALLFDSGETAEATRLKRTARRRYTRRKNRICYLQEIFSNEMAKVDDSFFHRLEESFLVEEDKKHERHPIFGNIVDEVAYHEKYPTIYHLRKKLVDSTDKADLRLIYLALAHMIKFRGHFLIEGDLNPDNSDVDKLFIQLVQTYNQLFEENPINASGVDAKAILSARLSKSRRLENLIAQLPGEKKNGLFGNLIALSLGLTPNFKSNFDLAEDAKLQLSKDTYDDDLDNLLAQIGDQYADLFLAAKNLSDAILLSDILRVNTEITKAPLSASMIKRYDEHHQDLTLLKALVRQQLPEKYKEIFFDQSKNGYAGYIDGGASQEEFYKFIKPILEKMDGTEELLVKLNREDLLRKQRTFDNGSIPHQIHLGELHAILRRQEDFYPFLKDNREKIEKILTFRIPYYVGPLARGNSRFAWMTRKSEETITPWNFEEVVDKGASAQSFIERMTNFDKNLPNEKVLPKHSLLYEYFTVYNELTKVKYVTEGMRKPAFLSGEQKKAIVDLLFKTNRKVTVKQLKEDYFKKIECFDSVEISGVEDRFNASLGTYHDLLKIIKDKDFLDNEENEDILEDIVLTLTLFEDREMIEERLKTYAHLFDDKVMKQLKRRRYTGWGRLSRKLINGIRDKQSGKTILDFLKSDGFANRNFMQLIHDDSLTFKEDIQKAQVSGQGDSLHEHIANLAGSPAIKKGILQTVKVVDELVKVMGRHKPENIVIEMARENQTTQKGQKNSRERMKRIEEGIKELGSQILKEHPVENTQLQNEKLYLYYLQNGRDMYVDQELDINRLSDYDVDHIVPQSFLKDDSIDNKVLTRSDKARGKSDNVPSEEVVKKMKNYWRQLLNAKLITQRKFDNLTKAERGGLSELDKAGFIKRQLVETRQITKHVAQILDSRMNTKYDENDKLIREVKVITLKSKLVSDFRKDFQFYKVREINNYHHAHDAYLNAVVGTALIKKYPKLESEFVYGDYKVYDVRKMIAKSEQEIGKATAKYFFYSNIMNFFKTEITLANGEIRKRPLIETNGETGEIVWDKGRDFATVRKVLSMPQVNIVKKTEVQTGGFSKESILPKRNSDKLIARKKDWDPKKYGGFDSPTVAYSVLVVAKVEKGKSKKLKSVKELLGITIMERSSFEKNPIDFLEAKGYKEVKKDLIIKLPKYSLFELENGRKRMLASAGELQKGNELALPSKYVNFLYLASHYEKLKGSPEDNEQKQLFVEQHKHYLDEIIEQISEFSKRVILADANLDKVLSAYNKHRDKPIREQAENIIHLFTLTNLGAPAAFKYFDTTIDRKRYTSTKEVLDATLIHQSITGLYETRIDLSQLGGDGGGGGGGSPAPGGTLNIEDEYRLHETSKEPDVPLGSTWLSDFPQAWAETGGMGLAVRQAPLIIPLKATSTPVSIKQYPMSQEARLGIKPHIQRLLDQGILVPCQSPWNTPLLPVKKPGTNDYRPVQDLREVNKRVEDIHPTVPNPYNLLSGLPPSHQWYTVLDLKDAFFCLRLHPTSQPLFAFEWRDPEMGISGQLTWTRLPQGFKNSPTLFNEALHRDLADFRIQHPDLILLQYVDDLLLAATSEQDCQRGTRALLQTLGNLGYRASAKKAQICQKQVKYLGYLLKEGQRWLTEARKETVMGQPTPKTPRQLREFLGKAGFCRLFIPGFAEMAAPLYPLTKPGTLFNWGPDQQKAYQEIKQALLTAPALGLPDLTKPFELFVDEKQGYAKGVLTQKLGPWRRPVAYLSKKLDPVAAGWPPCLRMVAAIAVLTKDAGKLTMGQPLVILAPHAVEALVKQPPDRWLSNARMTHYQAMLLDTDRVQFGPVVALNPATLLPLPEKEAPHDCLEILAETHGTRPDLTDQPIPDADYTWYTDGSSFLQEGQRRAGAAVTTETEVIWARALPAGTSAQRAELIALTQALKMAEGKKLNVYTDSRYAFATAHVHGEIYRRRGWLTSEGREIKNKNEILALLKALFLPKRLSIIHCPGHQKGNSAEARGNRMADQAAREAAMKAVLETSTLLAGKRTADGSEFEKRTADGSEFESPKKKAKVE

SEQ ID NO: 1016 - protein, 2091 aa, synthetic construct
MPAAKRVKLDGGDKKYSIGLDIGTNSVGWAVITDEYKVPSKKFKVLGNTDRHSIKKNLIGALLFDSGETAEATRLKRTARRRYTRRKNRICYLQEIFSNEMAKVDDSFFHRLEESFLVEEDKKHERHPIFGNIVDEVAYHEKYPTIYHLRKKLVDSTDKADLRLIYLALAHMIKFRGHFLIEGDLNPDNSDVDKLFIQLVQTYNQLFEENPINASGVDAKAILSARLSKSRRLENLIAQLPGEKKNGLFGNLIALSLGLTPNFKSNFDLAEDAKLQLSKDTYDDDLDNLLAQIGDQYADLFLAAKNLSDAILLSDILRVNTEITKAPLSASMIKRYDEHHQDLTLLKALVRQQLPEKYKEIFFDQSKNGYAGYIDGGASQEEFYKFIKPILEKMDGTEELLVKLNREDLLRKQRTFDNGSIPHQIHLGELHAILRRQEDFYPFLKDNREKIEKILTFRIPYYVGPLARGNSRFAWMTRKSEETITPWNFEEVVDKGASAQSFIERMTNFDKNLPNEKVLPKHSLLYEYFTVYNELTKVKYVTEGMRKPAFLSGEQKKAIVDLLFKTNRKVTVKQLKEDYFKKIECFDSVEISGVEDRFNASLGTYHDLLKIIKDKDFLDNEENEDILEDIVLTLTLFEDREMIEERLKTYAHLFDDKVMKQLKRRRYTGWGRLSRKLINGIRDKQSGKTILDFLKSDGFANRNFMQLIHDDSLTFKEDIQKAQVSGQGDSLHEHIANLAGSPAIKKGILQTVKVVDELVKVMGRHKPENIVIEMARENQTTQKGQKNSRERMKRIEEGIKELGSQILKEHPVENTQLQNEKLYLYYLQNGRDMYVDQELDINRLSDYDVDHIVPQSFLKDDSIDNKVLTRSDKARGKSDNVPSEEVVKKMKNYWRQLLNAKLITQRKFDNLTKAERGGLSELDKAGFIKRQLVETRQITKHVAQILDSRMNTKYDENDKLIREVKVITLKSKLVSDFRKDFQFYKVREINNYHHAHDAYLNAVVGTALIKKYPKLESEFVYGDYKVYDVRKMIAKSEQEIGKATAKYFFYSNIMNFFKTEITLANGEIRKRPLIETNGETGEIVWDKGRDFATVRKVLSMPQVNIVKKTEVQTGGFSKESILPKRNSDKLIARKKDWDPKKYGGFDSPTVAYSVLVVAKVEKGKSKKLKSVKELLGITIMERSSFEKNPIDFLEAKGYKEVKKDLIIKLPKYSLFELENGRKRMLASAGELQKGNELALPSKYVNFLYLASHYEKLKGSPEDNEQKQLFVEQHKHYLDEIIEQISEFSKRVILADANLDKVLSAYNKHRDKPIREQAENIIHLFTLTNLGAPAAFKYFDTTIDRKRYTSTKEVLDATLIHQSITGLYETRIDLSQLGGDGGGGSGSSGGTLNIEDEYRLHETSKEPDVPLGSTWLSDFPQAWAETGGMGLAVRQAPLIIPLKATSTPVSIKQYPMSQEARLGIKPHIQRLLDQGILVPCQSPWNTPLLPVKKPGTNDYRPVQDLREVNKRVEDIHPTVPNPYNLLSGLPPSHQWYTVLDLKDAFFCLRLHPTSQPLFAFEWRDPEMGISGQLTWTRLPQGFKNSPTLFNEALHRDLADFRIQHPDLILLQYVDDLLLAATSEQDCQRGTRALLQTLGNLGYRASAKKAQICQKQVKYLGYLLKEGQRWLTEARKETVMGQPTPKTPRQLREFLGKAGFCRLFIPGFAEMAAPLYPLTKPGTLFNWGPDQQKAYQEIKQALLTAPALGLPDLTKPFELFVDEKQGYAKGVLTQKLGPWRRPVAYLSKKLDPVAAGWPPCLRMVAAIAVLTKDAGKLTMGQPLVILAPHAVEALVKQPPDRWLSNARMTHYQAMLLDTDRVQFGPVVALNPATLLPLPEKEAPHDCLEILAETHGTRPDLTDQPIPDADYTWYTDGSSFLQEGQRRAGAAVTTETEVIWARALPAGTSAQRAELIALTQALKMAEGKKLNVYTDSRYAFATAHVHGEIYRRRGWLTSEGREIKNKNEILALLKALFLPKRLSIIHCPGHQKGNSAEARGNRMADQAAREAAMKAVLETSTLLAGKRTADGSEFEKRTADGSEFESPKKKAKVE

SEQ ID NO: 1017 - protein, 2091 aa, synthetic construct
MPAAKRVKLDGGDKKYSIGLDIGTNSVGWAVITDEYKVPSKKFKVLGNTDRHSIKKNLIGALLFDSGETAEATRLKRTARRRYTRRKNRICYLQEIFSNEMAKVDDSFFHRLEESFLVEEDKKHERHPIFGNIVDEVAYHEKYPTIYHLRKKLVDSTDKADLRLIYLALAHMIKFRGHFLIEGDLNPDNSDVDKLFIQLVQTYNQLFEENPINASGVDAKAILSARLSKSRRLENLIAQLPGEKKNGLFGNLIALSLGLTPNFKSNFDLAEDAKLQLSKDTYDDDLDNLLAQIGDQYADLFLAAKNLSDAILLSDILRVNTEITKAPLSASMIKRYDEHHQDLTLLKALVRQQLPEKYKEIFFDQSKNGYAGYIDGGASQEEFYKFIKPILEKMDGTEELLVKLNREDLLRKQRTFDNGSIPHQIHLGELHAILRRQEDFYPFLKDNREKIEKILTFRIPYYVGPLARGNSRFAWMTRKSEETITPWNFEEVVDKGASAQSFIERMTNFDKNLPNEKVLPKHSLLYEYFTVYNELTKVKYVTEGMRKPAFLSGEQKKAIVDLLFKTNRKVTVKQLKEDYFKKIECFDSVEISGVEDRFNASLGTYHDLLKIIKDKDFLDNEENEDILEDIVLTLTLFEDREMIEERLKTYAHLFDDKVMKQLKRRRYTGWGRLSRKLINGIRDKQSGKTILDFLKSDGFANRNFMQLIHDDSLTFKEDIQKAQVSGQGDSLHEHIANLAGSPAIKKGILQTVKVVDELVKVMGRHKPENIVIEMARENQTTQKGQKNSRERMKRIEEGIKELGSQILKEHPVENTQLQNEKLYLYYLQNGRDMYVDQELDINRLSDYDVDHIVPQSFLKDDSIDNKVLTRSDKARGKSDNVPSEEVVKKMKNYWRQLLNAKLITQRKFDNLTKAERGGLSELDKAGFIKRQLVETRQITKHVAQILDSRMNTKYDENDKLIREVKVITLKSKLVSDFRKDFQFYKVREINNYHHAHDAYLNAVVGTALIKKYPKLESEFVYGDYKVYDVRKMIAKSEQEIGKATAKYFFYSNIMNFFKTEITLANGEIRKRPLIETNGETGEIVWDKGRDFATVRKVLSMPQVNIVKKTEVQTGGFSKESILPKRNSDKLIARKKDWDPKKYGGFDSPTVAYSVLVVAKVEKGKSKKLKSVKELLGITIMERSSFEKNPIDFLEAKGYKEVKKDLIIKLPKYSLFELENGRKRMLASAGELQKGNELALPSKYVNFLYLASHYEKLKGSPEDNEQKQLFVEQHKHYLDEIIEQISEFSKRVILADANLDKVLSAYNKHRDKPIREQAENIIHLFTLTNLGAPAAFKYFDTTIDRKRYTSTKEVLDATLIHQSITGLYETRIDLSQLGGDGGGGSPAPGGTLNIEDEYRLHETSKEPDVPLGSTWLSDFPQAWAETGGMGLAVRQAPLIIPLKATSTPVSIKQYPMSQEARLGIKPHIQRLLDQGILVPCQSPWNTPLLPVKKPGTNDYRPVQDLREVNKRVEDIHPTVPNPYNLLSGLPPSHQWYTVLDLKDAFFCLRLHPTSQPLFAFEWRDPEMGISGQLTWTRLPQGFKNSPTLFNEALHRDLADFRIQHPDLILLQYVDDLLLAATSEQDCQRGTRALLQTLGNLGYRASAKKAQICQKQVKYLGYLLKEGQRWLTEARKETVMGQPTPKTPRQLREFLGKAGFCRLFIPGFAEMAAPLYPLTKPGTLFNWGPDQQKAYQEIKQALLTAPALGLPDLTKPFELFVDEKQGYAKGVLTQKLGPWRRPVAYLSKKLDPVAAGWPPCLRMVAAIAVLTKDAGKLTMGQPLVILAPHAVEALVKQPPDRWLSNARMTHYQAMLLDTDRVQFGPVVALNPATLLPLPEKEAPHDCLEILAETHGTRPDLTDQPIPDADYTWYTDGSSFLQEGQRRAGAAVTTETEVIWARALPAGTSAQRAELIALTQALKMAEGKKLNVYTDSRYAFATAHVHGEIYRRRGWLTSEGREIKNKNEILALLKALFLPKRLSIIHCPGHQKGNSAEARGNRMADQAAREAAMKAVLETSTLLAGKRTADGSEFEKRTADGSEFESPKKKAKVE

SEQ ID NO: 1018 - protein, 2096 aa, synthetic construct
MPAAKRVKLDGGDKKYSIGLDIGTNSVGWAVITDEYKVPSKKFKVLGNTDRHSIKKNLIGALLFDSGETAEATRLKRTARRRYTRRKNRICYLQEIFSNEMAKVDDSFFHRLEESFLVEEDKKHERHPIFGNIVDEVAYHEKYPTIYHLRKKLVDSTDKADLRLIYLALAHMIKFRGHFLIEGDLNPDNSDVDKLFIQLVQTYNQLFEENPINASGVDAKAILSARLSKSRRLENLIAQLPGEKKNGLFGNLIALSLGLTPNFKSNFDLAEDAKLQLSKDTYDDDLDNLLAQIGDQYADLFLAAKNLSDAILLSDILRVNTEITKAPLSASMIKRYDEHHQDLTLLKALVRQQLPEKYKEIFFDQSKNGYAGYIDGGASQEEFYKFIKPILEKMDGTEELLVKLNREDLLRKQRTFDNGSIPHQIHLGELHAILRRQEDFYPFLKDNREKIEKILTFRIPYYVGPLARGNSRFAWMTRKSEETITPWNFEEVVDKGASAQSFIERMTNFDKNLPNEKVLPKHSLLYEYFTVYNELTKVKYVTEGMRKPAFLSGEQKKAIVDLLFKTNRKVTVKQLKEDYFKKIECFDSVEISGVEDRFNASLGTYHDLLKIIKDKDFLDNEENEDILEDIVLTLTLFEDREMIEERLKTYAHLFDDKVMKQLKRRRYTGWGRLSRKLINGIRDKQSGKTILDFLKSDGFANRNFMQLIHDDSLTFKEDIQKAQVSGQGDSLHEHIANLAGSPAIKKGILQTVKVVDELVKVMGRHKPENIVIEMARENQTTQKGQKNSRERMKRIEEGIKELGSQILKEHPVENTQLQNEKLYLYYLQNGRDMYVDQELDINRLSDYDVDHIVPQSFLKDDSIDNKVLTRSDKARGKSDNVPSEEVVKKMKNYWRQLLNAKLITQRKFDNLTKAERGGLSELDKAGFIKRQLVETRQITKHVAQILDSRMNTKYDENDKLIREVKVITLKSKLVSDFRKDFQFYKVREINNYHHAHDAYLNAVVGTALIKKYPKLESEFVYGDYKVYDVRKMIAKSEQEIGKATAKYFFYSNIMNFFKTEITLANGEIRKRPLIETNGETGEIVWDKGRDFATVRKVLSMPQVNIVKKTEVQTGGFSKESILPKRNSDKLIARKKDWDPKKYGGFDSPTVAYSVLVVAKVEKGKSKKLKSVKELLGITIMERSSFEKNPIDFLEAKGYKEVKKDLIIKLPKYSLFELENGRKRMLASAGELQKGNELALPSKYVNFLYLASHYEKLKGSPEDNEQKQLFVEQHKHYLDEIIEQISEFSKRVILADANLDKVLSAYNKHRDKPIREQAENIIHLFTLTNLGAPAAFKYFDTTIDRKRYTSTKEVLDATLIHQSITGLYETRIDLSQLGGDGGGGGEAAAKGGSGGTLNIEDEYRLHETSKEPDVPLGSTWLSDFPQAWAETGGMGLAVRQAPLIIPLKATSTPVSIKQYPMSQEARLGIKPHIQRLLDQGILVPCQSPWNTPLLPVKKPGTNDYRPVQDLREVNKRVEDIHPTVPNPYNLLSGLPPSHQWYTVLDLKDAFFCLRLHPTSQPLFAFEWRDPEMGISGQLTWTRLPQGFKNSPTLFNEALHRDLADFRIQHPDLILLQYVDDLLLAATSEQDCQRGTRALLQTLGNLGYRASAKKAQICQKQVKYLGYLLKEGQRWLTEARKETVMGQPTPKTPRQLREFLGKAGFCRLFIPGFAEMAAPLYPLTKPGTLFNWGPDQQKAYQEIKQALLTAPALGLPDLTKPFELFVDEKQGYAKGVLTQKLGPWRRPVAYLSKKLDPVAAGWPPCLRMVAAIAVLTKDAGKLTMGQPLVILAPHAVEALVKQPPDRWLSNARMTHYQAMLLDTDRVQFGPVVALNPATLLPLPEKEAPHDCLEILAETHGTRPDLTDQPIPDADYTWYTDGSSFLQEGQRRAGAAVTTETEVIWARALPAGTSAQRAELIALTQALKMAEGKKLNVYTDSRYAFATAHVHGEIYRRRGWLTSEGREIKNKNEILALLKALFLPKRLSIIHCPGHQKGNSAEARGNRMADQAAREAAMKAVLETSTLLAGKRTADGSEFEKRTADGSEFESPKKKAKVE

SEQ ID NO: 1019 - protein, 2097 aa, synthetic construct
MPAAKRVKLDGGDKKYSIGLDIGTNSVGWAVITDEYKVPSKKFKVLGNTDRHSIKKNLIGALLFDSGETAEATRLKRTARRRYTRRKNRICYLQEIFSNEMAKVDDSFFHRLEESFLVEEDKKHERHPIFGNIVDEVAYHEKYPTIYHLRKKLVDSTDKADLRLIYLALAHMIKFRGHFLIEGDLNPDNSDVDKLFIQLVQTYNQLFEENPINASGVDAKAILSARLSKSRRLENLIAQLPGEKKNGLFGNLIALSLGLTPNFKSNFDLAEDAKLQLSKDTYDDDLDNLLAQIGDQYADLFLAAKNLSDAILLSDILRVNTEITKAPLSASMIKRYDEHHQDLTLLKALVRQQLPEKYKEIFFDQSKNGYAGYIDGGASQEEFYKFIKPILEKMDGTEELLVKLNREDLLRKQRTFDNGSIPHQIHLGELHAILRRQEDFYPFLKDNREKIEKILTFRIPYYVGPLARGNSRFAWMTRKSEETITPWNFEEVVDKGASAQSFIERMTNFDKNLPNEKVLPKHSLLYEYFTVYNELTKVKYVTEGMRKPAFLSGEQKKAIVDLLFKTNRKVTVKQLKEDYFKKIECFDSVEISGVEDRFNASLGTYHDLLKIIKDKDFLDNEENEDILEDIVLTLTLFEDREMIEERLKTYAHLFDDKVMKQLKRRRYTGWGRLSRKLINGIRDKQSGKTILDFLKSDGFANRNFMQLIHDDSLTFKEDIQKAQVSGQGDSLHEHIANLAGSPAIKKGILQTVKVVDELVKVMGRHKPENIVIEMARENQTTQKGQKNSRERMKRIEEGIKELGSQILKEHPVENTQLQNEKLYLYYLQNGRDMYVDQELDINRLSDYDVDHIVPQSFLKDDSIDNKVLTRSDKARGKSDNVPSEEVVKKMKNYWRQLLNAKLITQRKFDNLTKAERGGLSELDKAGFIKRQLVETRQITKHVAQILDSRMNTKYDENDKLIREVKVITLKSKLVSDFRKDFQFYKVREINNYHHAHDAYLNAVVGTALIKKYPKLESEFVYGDYKVYDVRKMIAKSEQEIGKATAKYFFYSNIMNFFKTEITLANGEIRKRPLIETNGETGEIVWDKGRDFATVRKVLSMPQVNIVKKTEVQTGGFSKESILPKRNSDKLIARKKDWDPKKYGGFDSPTVAYSVLVVAKVEKGKSKKLKSVKELLGITIMERSSFEKNPIDFLEAKGYKEVKKDLIIKLPKYSLFELENGRKRMLASAGELQKGNELALPSKYVNFLYLASHYEKLKGSPEDNEQKQLFVEQHKHYLDEIIEQISEFSKRVILADANLDKVLSAYNKHRDKPIREQAENIIHLFTLTNLGAPAAFKYFDTTIDRKRYTSTKEVLDATLIHQSITGLYETRIDLSQLGGDGGGGSGGSGGSGGSGGTLNIEDEYRLHETSKEPDVPLGSTWLSDFPQAWAETGGMGLAVRQAPLIIPLKATSTPVSIKQYPMSQEARLGIKPHIQRLLDQGILVPCQSPWNTPLLPVKKPGTNDYRPVQDLREVNKRVEDIHPTVPNPYNLLSGLPPSHQWYTVLDLKDAFFCLRLHPTSQPLFAFEWRDPEMGISGQLTWTRLPQGFKNSPTLFNEALHRDLADFRIQHPDLILLQYVDDLLLAATSEQDCQRGTRALLQTLGNLGYRASAKKAQICQKQVKYLGYLLKEGQRWLTEARKETVMGQPTPKTPRQLREFLGKAGFCRLFIPGFAEMAAPLYPLTKPGTLFNWGPDQQKAYQEIKQALLTAPALGLPDLTKPFELFVDEKQGYAKGVLTQKLGPWRRPVAYLSKKLDPVAAGWPPCLRMVAAIAVLTKDAGKLTMGQPLVILAPHAVEALVKQPPDRWLSNARMTHYQAMLLDTDRVQFGPVVALNPATLLPLPEKEAPHDCLEILAETHGTRPDLTDQPIPDADYTWYTDGSSFLQEGQRRAGAAVTTETEVIWARALPAGTSAQRAELIALTQALKMAEGKKLNVYTDSRYAFATAHVHGEIYRRRGWLTSEGREIKNKNEILALLKALFLPKRLSIIHCPGHQKGNSAEARGNRMADQAAREAAMKAVLETSTLLAGKRTADGSEFEKRTADGSEFESPKKKAKVE

SEQ ID NO: 1020 - protein, 2098 aa, synthetic construct
MPAAKRVKLDGGDKKYSIGLDIGTNSVGWAVITDEYKVPSKKFKVLGNTDRHSIKKNLIGALLFDSGETAEATRLKRTARRRYTRRKNRICYLQEIFSNEMAKVDDSFFHRLEESFLVEEDKKHERHPIFGNIVDEVAYHEKYPTIYHLRKKLVDSTDKADLRLIYLALAHMIKFRGHFLIEGDLNPDNSDVDKLFIQLVQTYNQLFEENPINASGVDAKAILSARLSKSRRLENLIAQLPGEKKNGLFGNLIALSLGLTPNFKSNFDLAEDAKLQLSKDTYDDDLDNLLAQIGDQYADLFLAAKNLSDAILLSDILRVNTEITKAPLSASMIKRYDEHHQDLTLLKALVRQQLPEKYKEIFFDQSKNGYAGYIDGGASQEEFYKFIKPILEKMDGTEELLVKLNREDLLRKQRTFDNGSIPHQIHLGELHAILRRQEDFYPFLKDNREKIEKILTFRIPYYVGPLARGNSRFAWMTRKSEETITPWNFEEVVDKGASAQSFIERMTNFDKNLPNEKVLPKHSLLYEYFTVYNELTKVKYVTEGMRKPAFLSGEQKKAIVDLLFKTNRKVTVKQLKEDYFKKIECFDSVEISGVEDRFNASLGTYHDLLKIIKDKDFLDNEENEDILEDIVLTLTLFEDREMIEERLKTYAHLFDDKVMKQLKRRRYTGWGRLSRKLINGIRDKQSGKTILDFLKSDGFANRNFMQLIHDDSLTFKEDIQKAQVSGQGDSLHEHIANLAGSPAIKKGILQTVKVVDELVKVMGRHKPENIVIEMARENQTTQKGQKNSRERMKRIEEGIKELGSQILKEHPVENTQLQNEKLYLYYLQNGRDMYVDQELDINRLSDYDVDHIVPQSFLKDDSIDNKVLTRSDKARGKSDNVPSEEVVKKMKNYWRQLLNAKLITQRKFDNLTKAERGGLSELDKAGFIKRQLVETRQITKHVAQILDSRMNTKYDENDKLIREVKVITLKSKLVSDFRKDFQFYKVREINNYHHAHDAYLNAVVGTALIKKYPKLESEFVYGDYKVYDVRKMIAKSEQEIGKATAKYFFYSNIMNFFKTEITLANGEIRKRPLIETNGETGEIVWDKGRDFATVRKVLSMPQVNIVKKTEVQTGGFSKESILPKRNSDKLIARKKDWDPKKYGGFDSPTVAYSVLVVAKVEKGKSKKLKSVKELLGITIMERSSFEKNPIDFLEAKGYKEVKKDLIIKLPKYSLFELENGRKRMLASAGELQKGNELALPSKYVNFLYLASHYEKLKGSPEDNEQKQLFVEQHKHYLDEIIEQISEFSKRVILADANLDKVLSAYNKHRDKPIREQAENIIHLFTLTNLGAPAAFKYFDTTIDRKRYTSTKEVLDATLIHQSITGLYETRIDLSQLGGDGGPAPAPAPAPAPAPGGTLNIEDEYRLHETSKEPDVPLGSTWLSDFPQAWAETGGMGLAVRQAPLIIPLKATSTPVSIKQYPMSQEARLGIKPHIQRLLDQGILVPCQSPWNTPLLPVKKPGTNDYRPVQDLREVNKRVEDIHPTVPNPYNLLSGLPPSHQWYTVLDLKDAFFCLRLHPTSQPLFAFEWRDPEMGISGQLTWTRLPQGFKNSPTLFNEALHRDLADFRIQHPDLILLQYVDDLLLAATSEQDCQRGTRALLQTLGNLGYRASAKKAQICQKQVKYLGYLLKEGQRWLTEARKETVMGQPTPKTPRQLREFLGKAGFCRLFIPGFAEMAAPLYPLTKPGTLFNWGPDQQKAYQEIKQALLTAPALGLPDLTKPFELFVDEKQGYAKGVLTQKLGPWRRPVAYLSKKLDPVAAGWPPCLRMVAAIAVLTKDAGKLTMGQPLVILAPHAVEALVKQPPDRWLSNARMTHYQAMLLDTDRVQFGPVVALNPATLLPLPEKEAPHDCLEILAETHGTRPDLTDQPIPDADYTWYTDGSSFLQEGQRRAGAAVTTETEVIWARALPAGTSAQRAELIALTQALKMAEGKKLNVYTDSRYAFATAHVHGEIYRRRGWLTSEGREIKNKNEILALLKALFLPKRLSIIHCPGHQKGNSAEARGNRMADQAAREAAMKAVLETSTLLAGKRTADGSEFEKRTADGSEFESPKKKAKVE

SEQ ID NO: 1021 - protein, 2115 aa, synthetic construct
MPAAKRVKLDGGDKKYSIGLDIGTNSVGWAVITDEYKVPSKKFKVLGNTDRHSIKKNLIGALLFDSGETAEATRLKRTARRRYTRRKNRICYLQEIFSNEMAKVDDSFFHRLEESFLVEEDKKHERHPIFGNIVDEVAYHEKYPTIYHLRKKLVDSTDKADLRLIYLALAHMIKFRGHFLIEGDLNPDNSDVDKLFIQLVQTYNQLFEENPINASGVDAKAILSARLSKSRRLENLIAQLPGEKKNGLFGNLIALSLGLTPNFKSNFDLAEDAKLQLSKDTYDDDLDNLLAQIGDQYADLFLAAKNLSDAILLSDILRVNTEITKAPLSASMIKRYDEHHQDLTLLKALVRQQLPEKYKEIFFDQSKNGYAGYIDGGASQEEFYKFIKPILEKMDGTEELLVKLNREDLLRKQRTFDNGSIPHQIHLGELHAILRRQEDFYPFLKDNREKIEKILTFRIPYYVGPLARGNSRFAWMTRKSEETITPWNFEEVVDKGASAQSFIERMTNFDKNLPNEKVLPKHSLLYEYFTVYNELTKVKYVTEGMRKPAFLSGEQKKAIVDLLFKTNRKVTVKQLKEDYFKKIECFDSVEISGVEDRFNASLGTYHDLLKIIKDKDFLDNEENEDILEDIVLTLTLFEDREMIEERLKTYAHLFDDKVMKQLKRRRYTGWGRLSRKLINGIRDKQSGKTILDFLKSDGFANRNFMQLIHDDSLTFKEDIQKAQVSGQGDSLHEHIANLAGSPAIKKGILQTVKVVDELVKVMGRHKPENIVIEMARENQTTQKGQKNSRERMKRIEEGIKELGSQILKEHPVENTQLQNEKLYLYYLQNGRDMYVDQELDINRLSDYDVDHIVPQSFLKDDSIDNKVLTRSDKARGKSDNVPSEEVVKKMKNYWRQLLNAKLITQRKFDNLTKAERGGLSELDKAGFIKRQLVETRQITKHVAQILDSRMNTKYDENDKLIREVKVITLKSKLVSDFRKDFQFYKVREINNYHHAHDAYLNAVVGTALIKKYPKLESEFVYGDYKVYDVRKMIAKSEQEIGKATAKYFFYSNIMNFFKTEITLANGEIRKRPLIETNGETGEIVWDKGRDFATVRKVLSMPQVNIVKKTEVQTGGFSKESILPKRNSDKLIARKKDWDPKKYGGFDSPTVAYSVLVVAKVEKGKSKKLKSVKELLGITIMERSSFEKNPIDFLEAKGYKEVKKDLIIKLPKYSLFELENGRKRMLASAGELQKGNELALPSKYVNFLYLASHYEKLKGSPEDNEQKQLFVEQHKHYLDEIIEQISEFSKRVILADANLDKVLSAYNKHRDKPIREQAENIIHLFTLTNLGAPAAFKYFDTTIDRKRYTSTKEVLDATLIHQSITGLYETRIDLSQLGGDGGGGGGSGGGGSGGGGSGGGGSGGGGSGGGGSGGTLNIEDEYRLHETSKEPDVPLGSTWLSDFPQAWAETGGMGLAVRQAPLIIPLKATSTPVSIKQYPMSQEARLGIKPHIQRLLDQGILVPCQSPWNTPLLPVKKPGTNDYRPVQDLREVNKRVEDIHPTVPNPYNLLSGLPPSHQWYTVLDLKDAFFCLRLHPTSQPLFAFEWRDPEMGISGQLTWTRLPQGFKNSPTLFNEALHRDLADFRIQHPDLILLQYVDDLLLAATSEQDCQRGTRALLQTLGNLGYRASAKKAQICQKQVKYLGYLLKEGQRWLTEARKETVMGQPTPKTPRQLREFLGKAGFCRLFIPGFAEMAAPLYPLTKPGTLFNWGPDQQKAYQEIKQALLTAPALGLPDLTKPFELFVDEKQGYAKGVLTQKLGPWRRPVAYLSKKLDPVAAGWPPCLRMVAAIAVLTKDAGKLTMGQPLVILAPHAVEALVKQPPDRWLSNARMTHYQAMLLDTDRVQFGPVVALNPATLLPLPEKEAPHDCLEILAETHGTRPDLTDQPIPDADYTWYTDGSSFLQEGQRRAGAAVTTETEVIWARALPAGTSAQRAELIALTQALKMAEGKKLNVYTDSRYAFATAHVHGEIYRRRGWLTSEGREIKNKNEILALLKALFLPKRLSIIHCPGHQKGNSAEARGNRMADQAAREAAMKAVLETSTLLAGKRTADGSEFEKRTADGSEFESPKKKAKVE

SEQ ID NO: 1022 - protein, 2094 aa, synthetic construct
MPAAKRVKLDGGDKKYSIGLDIGTNSVGWAVITDEYKVPSKKFKVLGNTDRHSIKKNLIGALLFDSGETAEATRLKRTARRRYTRRKNRICYLQEIFSNEMAKVDDSFFHRLEESFLVEEDKKHERHPIFGNIVDEVAYHEKYPTIYHLRKKLVDSTDKADLRLIYLALAHMIKFRGHFLIEGDLNPDNSDVDKLFIQLVQTYNQLFEENPINASGVDAKAILSARLSKSRRLENLIAQLPGEKKNGLFGNLIALSLGLTPNFKSNFDLAEDAKLQLSKDTYDDDLDNLLAQIGDQYADLFLAAKNLSDAILLSDILRVNTEITKAPLSASMIKRYDEHHQDLTLLKALVRQQLPEKYKEIFFDQSKNGYAGYIDGGASQEEFYKFIKPILEKMDGTEELLVKLNREDLLRKQRTFDNGSIPHQIHLGELHAILRRQEDFYPFLKDNREKIEKILTFRIPYYVGPLARGNSRFAWMTRKSEETITPWNFEEVVDKGASAQSFIERMTNFDKNLPNEKVLPKHSLLYEYFTVYNELTKVKYVTEGMRKPAFLSGEQKKAIVDLLFKTNRKVTVKQLKEDYFKKIECFDSVEISGVEDRFNASLGTYHDLLKIIKDKDFLDNEENEDILEDIVLTLTLFEDREMIEERLKTYAHLFDDKVMKQLKRRRYTGWGRLSRKLINGIRDKQSGKTILDFLKSDGFANRNFMQLIHDDSLTFKEDIQKAQVSGQGDSLHEHIANLAGSPAIKKGILQTVKVVDELVKVMGRHKPENIVIEMARENQTTQKGQKNSRERMKRIEEGIKELGSQILKEHPVENTQLQNEKLYLYYLQNGRDMYVDQELDINRLSDYDVDHIVPQSFLKDDSIDNKVLTRSDKARGKSDNVPSEEVVKKMKNYWRQLLNAKLITQRKFDNLTKAERGGLSELDKAGFIKRQLVETRQITKHVAQILDSRMNTKYDENDKLIREVKVITLKSKLVSDFRKDFQFYKVREINNYHHAHDAYLNAVVGTALIKKYPKLESEFVYGDYKVYDVRKMIAKSEQEIGKATAKYFFYSNIMNFFKTEITLANGEIRKRPLIETNGETGEIVWDKGRDFATVRKVLSMPQVNIVKKTEVQTGGFSKESILPKRNSDKLIARKKDWDPKKYGGFDSPTVAYSVLVVAKVEKGKSKKLKSVKELLGITIMERSSFEKNPIDFLEAKGYKEVKKDLIIKLPKYSLFELENGRKRMLASAGELQKGNELALPSKYVNFLYLASHYEKLKGSPEDNEQKQLFVEQHKHYLDEIIEQISEFSKRVILADANLDKVLSAYNKHRDKPIREQAENIIHLFTLTNLGAPAAFKYFDTTIDRKRYTSTKEVLDATLIHQSITGLYETRIDLSQLGGDGGGGSGSSGGGGGTLNIEDEYRLHETSKEPDVPLGSTWLSDFPQAWAETGGMGLAVRQAPLIIPLKATSTPVSIKQYPMSQEARLGIKPHIQRLLDQGILVPCQSPWNTPLLPVKKPGTNDYRPVQDLREVNKRVEDIHPTVPNPYNLLSGLPPSHQWYTVLDLKDAFFCLRLHPTSQPLFAFEWRDPEMGISGQLTWTRLPQGFKNSPTLFNEALHRDLADFRIQHPDLILLQYVDDLLLAATSEQDCQRGTRALLQTLGNLGYRASAKKAQICQKQVKYLGYLLKEGQRWLTEARKETVMGQPTPKTPRQLREFLGKAGFCRLFIPGFAEMAAPLYPLTKPGTLFNWGPDQQKAYQEIKQALLTAPALGLPDLTKPFELFVDEKQGYAKGVLTQKLGPWRRPVAYLSKKLDPVAAGWPPCLRMVAAIAVLTKDAGKLTMGQPLVILAPHAVEALVKQPPDRWLSNARMTHYQAMLLDTDRVQFGPVVALNPATLLPLPEKEAPHDCLEILAETHGTRPDLTDQPIPDADYTWYTDGSSFLQEGQRRAGAAVTTETEVIWARALPAGTSAQRAELIALTQALKMAEGKKLNVYTDSRYAFATAHVHGEIYRRRGWLTSEGREIKNKNEILALLKALFLPKRLSIIHCPGHQKGNSAEARGNRMADQAAREAAMKAVLETSTLLAGKRTADGSEFEKRTADGSEFESPKKKAKVE

SEQ ID NO: 1023 - protein, 2093 aa, synthetic construct
MPAAKRVKLDGGDKKYSIGLDIGTNSVGWAVITDEYKVPSKKFKVLGNTDRHSIKKNLIGALLFDSGETAEATRLKRTARRRYTRRKNRICYLQEIFSNEMAKVDDSFFHRLEESFLVEEDKKHERHPIFGNIVDEVAYHEKYPTIYHLRKKLVDSTDKADLRLIYLALAHMIKFRGHFLIEGDLNPDNSDVDKLFIQLVQTYNQLFEENPINASGVDAKAILSARLSKSRRLENLIAQLPGEKKNGLFGNLIALSLGLTPNFKSNFDLAEDAKLQLSKDTYDDDLDNLLAQIGDQYADLFLAAKNLSDAILLSDILRVNTEITKAPLSASMIKRYDEHHQDLTLLKALVRQQLPEKYKEIFFDQSKNGYAGYIDGGASQEEFYKFIKPILEKMDGTEELLVKLNREDLLRKQRTFDNGSIPHQIHLGELHAILRRQEDFYPFLKDNREKIEKILTFRIPYYVGPLARGNSRFAWMTRKSEETITPWNFEEVVDKGASAQSFIERMTNFDKNLPNEKVLPKHSLLYEYFTVYNELTKVKYVTEGMRKPAFLSGEQKKAIVDLLFKTNRKVTVKQLKEDYFKKIECFDSVEISGVEDRFNASLGTYHDLLKIIKDKDFLDNEENEDILEDIVLTLTLFEDREMIEERLKTYAHLFDDKVMKQLKRRRYTGWGRLSRKLINGIRDKQSGKTILDFLKSDGFANRNFMQLIHDDSLTFKEDIQKAQVSGQGDSLHEHIANLAGSPAIKKGILQTVKVVDELVKVMGRHKPENIVIEMARENQTTQKGQKNSRERMKRIEEGIKELGSQILKEHPVENTQLQNEKLYLYYLQNGRDMYVDQELDINRLSDYDVDHIVPQSFLKDDSIDNKVLTRSDKARGKSDNVPSEEVVKKMKNYWRQLLNAKLITQRKFDNLTKAERGGLSELDKAGFIKRQLVETRQITKHVAQILDSRMNTKYDENDKLIREVKVITLKSKLVSDFRKDFQFYKVREINNYHHAHDAYLNAVVGTALIKKYPKLESEFVYGDYKVYDVRKMIAKSEQEIGKATAKYFFYSNIMNFFKTEITLANGEIRKRPLIETNGETGEIVWDKGRDFATVRKVLSMPQVNIVKKTEVQTGGFSKESILPKRNSDKLIARKKDWDPKKYGGFDSPTVAYSVLVVAKVEKGKSKKLKSVKELLGITIMERSSFEKNPIDFLEAKGYKEVKKDLIIKLPKYSLFELENGRKRMLASAGELQKGNELALPSKYVNFLYLASHYEKLKGSPEDNEQKQLFVEQHKHYLDEIIEQISEFSKRVILADANLDKVLSAYNKHRDKPIREQAENIIHLFTLTNLGAPAAFKYFDTTIDRKRYTSTKEVLDATLIHQSITGLYETRIDLSQLGGDGGEAAAKGGSGGTLNIEDEYRLHETSKEPDVPLGSTWLSDFPQAWAETGGMGLAVRQAPLIIPLKATSTPVSIKQYPMSQEARLGIKPHIQRLLDQGILVPCQSPWNTPLLPVKKPGTNDYRPVQDLREVNKRVEDIHPTVPNPYNLLSGLPPSHQWYTVLDLKDAFFCLRLHPTSQPLFAFEWRDPEMGISGQLTWTRLPQGFKNSPTLFNEALHRDLADFRIQHPDLILLQYVDDLLLAATSEQDCQRGTRALLQTLGNLGYRASAKKAQICQKQVKYLGYLLKEGQRWLTEARKETVMGQPTPKTPRQLREFLGKAGFCRLFIPGFAEMAAPLYPLTKPGTLFNWGPDQQKAYQEIKQALLTAPALGLPDLTKPFELFVDEKQGYAKGVLTQKLGPWRRPVAYLSKKLDPVAAGWPPCLRMVAAIAVLTKDAGKLTMGQPLVILAPHAVEALVKQPPDRWLSNARMTHYQAMLLDTDRVQFGPVVALNPATLLPLPEKEAPHDCLEILAETHGTRPDLTDQPIPDADYTWYTDGSSFLQEGQRRAGAAVTTETEVIWARALPAGTSAQRAELIALTQALKMAEGKKLNVYTDSRYAFATAHVHGEIYRRRGWLTSEGREIKNKNEILALLKALFLPKRLSIIHCPGHQKGNSAEARGNRMADQAAREAAMKAVLETSTLLAGKRTADGSEFEKRTADGSEFESPKKKAKVE

SEQ ID NO: 1024 - protein, 2094 aa, synthetic construct
MPAAKRVKLDGGDKKYSIGLDIGTNSVGWAVITDEYKVPSKKFKVLGNTDRHSIKKNLIGALLFDSGETAEATRLKRTARRRYTRRKNRICYLQEIFSNEMAKVDDSFFHRLEESFLVEEDKKHERHPIFGNIVDEVAYHEKYPTIYHLRKKLVDSTDKADLRLIYLALAHMIKFRGHFLIEGDLNPDNSDVDKLFIQLVQTYNQLFEENPINASGVDAKAILSARLSKSRRLENLIAQLPGEKKNGLFGNLIALSLGLTPNFKSNFDLAEDAKLQLSKDTYDDDLDNLLAQIGDQYADLFLAAKNLSDAILLSDILRVNTEITKAPLSASMIKRYDEHHQDLTLLKALVRQQLPEKYKEIFFDQSKNGYAGYIDGGASQEEFYKFIKPILEKMDGTEELLVKLNREDLLRKQRTFDNGSIPHQIHLGELHAILRRQEDFYPFLKDNREKIEKILTFRIPYYVGPLARGNSRFAWMTRKSEETITPWNFEEVVDKGASAQSFIERMTNFDKNLPNEKVLPKHSLLYEYFTVYNELTKVKYVTEGMRKPAFLSGEQKKAIVDLLFKTNRKVTVKQLKEDYFKKIECFDSVEISGVEDRFNASLGTYHDLLKIIKDKDFLDNEENEDILEDIVLTLTLFEDREMIEERLKTYAHLFDDKVMKQLKRRRYTGWGRLSRKLINGIRDKQSGKTILDFLKSDGFANRNFMQLIHDDSLTFKEDIQKAQVSGQGDSLHEHIANLAGSPAIKKGILQTVKVVDELVKVMGRHKPENIVIEMARENQTTQKGQKNSRERMKRIEEGIKELGSQILKEHPVENTQLQNEKLYLYYLQNGRDMYVDQELDINRLSDYDVDHIVPQSFLKDDSIDNKVLTRSDKARGKSDNVPSEEVVKKMKNYWRQLLNAKLITQRKFDNLTKAERGGLSELDKAGFIKRQLVETRQITKHVAQILDSRMNTKYDENDKLIREVKVITLKSKLVSDFRKDFQFYKVREINNYHHAHDAYLNAVVGTALIKKYPKLESEFVYGDYKVYDVRKMIAKSEQEIGKATAKYFFYSNIMNFFKTEITLANGEIRKRPLIETNGETGEIVWDKGRDFATVRKVLSMPQVNIVKKTEVQTGGFSKESILPKRNSDKLIARKKDWDPKKYGGFDSPTVAYSVLVVAKVEKGKSKKLKSVKELLGITIMERSSFEKNPIDFLEAKGYKEVKKDLIIKLPKYSLFELENGRKRMLASAGELQKGNELALPSKYVNFLYLASHYEKLKGSPEDNEQKQLFVEQHKHYLDEIIEQISEFSKRVILADANLDKVLSAYNKHRDKPIREQAENIIHLFTLTNLGAPAAFKYFDTTIDRKRYTSTKEVLDATLIHQSITGLYETRIDLSQLGGDGGGGGGGSGSSGGTLNIEDEYRLHETSKEPDVPLGSTWLSDFPQAWAETGGMGLAVRQAPLIIPLKATSTPVSIKQYPMSQEARLGIKPHIQRLLDQGILVPCQSPWNTPLLPVKKPGTNDYRPVQDLREVNKRVEDIHPTVPNPYNLLSGLPPSHQWYTVLDLKDAFFCLRLHPTSQPLFAFEWRDPEMGISGQLTWTRLPQGFKNSPTLFNEALHRDLADFRIQHPDLILLQYVDDLLLAATSEQDCQRGTRALLQTLGNLGYRASAKKAQICQKQVKYLGYLLKEGQRWLTEARKETVMGQPTPKTPRQLREFLGKAGFCRLFIPGFAEMAAPLYPLTKPGTLFNWGPDQQKAYQEIKQALLTAPALGLPDLTKPFELFVDEKQGYAKGVLTQKLGPWRRPVAYLSKKLDPVAAGWPPCLRMVAAIAVLTKDAGKLTMGQPLVILAPHAVEALVKQPPDRWLSNARMTHYQAMLLDTDRVQFGPVVALNPATLLPLPEKEAPHDCLEILAETHGTRPDLTDQPIPDADYTWYTDGSSFLQEGQRRAGAAVTTETEVIWARALPAGTSAQRAELIALTQALKMAEGKKLNVYTDSRYAFATAHVHGEIYRRRGWLTSEGREIKNKNEILALLKALFLPKRLSIIHCPGHQKGNSAEARGNRMADQAAREAAMKAVLETSTLLAGKRTADGSEFEKRTADGSEFESPKKKAKVE

SEQ ID NO: 1025 - protein, 2094 aa, synthetic construct
MPAAKRVKLDGGDKKYSIGLDIGTNSVGWAVITDEYKVPSKKFKVLGNTDRHSIKKNLIGALLFDSGETAEATRLKRTARRRYTRRKNRICYLQEIFSNEMAKVDDSFFHRLEESFLVEEDKKHERHPIFGNIVDEVAYHEKYPTIYHLRKKLVDSTDKADLRLIYLALAHMIKFRGHFLIEGDLNPDNSDVDKLFIQLVQTYNQLFEENPINASGVDAKAILSARLSKSRRLENLIAQLPGEKKNGLFGNLIALSLGLTPNFKSNFDLAEDAKLQLSKDTYDDDLDNLLAQIGDQYADLFLAAKNLSDAILLSDILRVNTEITKAPLSASMIKRYDEHHQDLTLLKALVRQQLPEKYKEIFFDQSKNGYAGYIDGGASQEEFYKFIKPILEKMDGTEELLVKLNREDLLRKQRTFDNGSIPHQIHLGELHAILRRQEDFYPFLKDNREKIEKILTFRIPYYVGPLARGNSRFAWMTRKSEETITPWNFEEVVDKGASAQSFIERMTNFDKNLPNEKVLPKHSLLYEYFTVYNELTKVKYVTEGMRKPAFLSGEQKKAIVDLLFKTNRKVTVKQLKEDYFKKIECFDSVEISGVEDRFNASLGTYHDLLKIIKDKDFLDNEENEDILEDIVLTLTLFEDREMIEERLKTYAHLFDDKVMKQLKRRRYTGWGRLSRKLINGIRDKQSGKTILDFLKSDGFANRNFMQLIHDDSLTFKEDIQKAQVSGQGDSLHEHIANLAGSPAIKKGILQTVKVVDELVKVMGRHKPENIVIEMARENQTTQKGQKNSRERMKRIEEGIKELGSQILKEHPVENTQLQNEKLYLYYLQNGRDMYVDQELDINRLSDYDVDHIVPQSFLKDDSIDNKVLTRSDKARGKSDNVPSEEVVKKMKNYWRQLLNAKLITQRKFDNLTKAERGGLSELDKAGFIKRQLVETRQITKHVAQILDSRMNTKYDENDKLIREVKVITLKSKLVSDFRKDFQFYKVREINNYHHAHDAYLNAVVGTALIKKYPKLESEFVYGDYKVYDVRKMIAKSEQEIGKATAKYFFYSNIMNFFKTEITLANGEIRKRPLIETNGETGEIVWDKGRDFATVRKVLSMPQVNIVKKTEVQTGGFSKESILPKRNSDKLIARKKDWDPKKYGGFDSPTVAYSVLVVAKVEKGKSKKLKSVKELLGITIMERSSFEKNPIDFLEAKGYKEVKKDLIIKLPKYSLFELENGRKRMLASAGELQKGNELALPSKYVNFLYLASHYEKLKGSPEDNEQKQLFVEQHKHYLDEIIEQISEFSKRVILADANLDKVLSAYNKHRDKPIREQAENIIHLFTLTNLGAPAAFKYFDTTIDRKRYTSTKEVLDATLIHQSITGLYETRIDLSQLGGDGGGGGPAPGGSGGTLNIEDEYRLHETSKEPDVPLGSTWLSDFPQAWAETGGMGLAVRQAPLIIPLKATSTPVSIKQYPMSQEARLGIKPHIQRLLDQGILVPCQSPWNTPLLPVKKPGTNDYRPVQDLREVNKRVEDIHPTVPNPYNLLSGLPPSHQWYTVLDLKDAFFCLRLHPTSQPLFAFEWRDPEMGISGQLTWTRLPQGFKNSPTLFNEALHRDLADFRIQHPDLILLQYVDDLLLAATSEQDCQRGTRALLQTLGNLGYRASAKKAQICQKQVKYLGYLLKEGQRWLTEARKETVMGQPTPKTPRQLREFLGKAGFCRLFIPGFAEMAAPLYPLTKPGTLFNWGPDQQKAYQEIKQALLTAPALGLPDLTKPFELFVDEKQGYAKGVLTQKLGPWRRPVAYLSKKLDPVAAGWPPCLRMVAAIAVLTKDAGKLTMGQPLVILAPHAVEALVKQPPDRWLSNARMTHYQAMLLDTDRVQFGPVVALNPATLLPLPEKEAPHDCLEILAETHGTRPDLTDQPIPDADYTWYTDGSSFLQEGQRRAGAAVTTETEVIWARALPAGTSAQRAELIALTQALKMAEGKKLNVYTDSRYAFATAHVHGEIYRRRGWLTSEGREIKNKNEILALLKALFLPKRLSIIHCPGHQKGNSAEARGNRMADQAAREAAMKAVLETSTLLAGKRTADGSEFEKRTADGSEFESPKKKAKVE

SEQ ID NO: 1026 - protein, 2110 aa, synthetic construct
MPAAKRVKLDGGDKKYSIGLDIGTNSVGWAVITDEYKVPSKKFKVLGNTDRHSIKKNLIGALLFDSGETAEATRLKRTARRRYTRRKNRICYLQEIFSNEMAKVDDSFFHRLEESFLVEEDKKHERHPIFGNIVDEVAYHEKYPTIYHLRKKLVDSTDKADLRLIYLALAHMIKFRGHFLIEGDLNPDNSDVDKLFIQLVQTYNQLFEENPINASGVDAKAILSARLSKSRRLENLIAQLPGEKKNGLFGNLIALSLGLTPNFKSNFDLAEDAKLQLSKDTYDDDLDNLLAQIGDQYADLFLAAKNLSDAILLSDILRVNTEITKAPLSASMIKRYDEHHQDLTLLKALVRQQLPEKYKEIFFDQSKNGYAGYIDGGASQEEFYKFIKPILEKMDGTEELLVKLNREDLLRKQRTFDNGSIPHQIHLGELHAILRRQEDFYPFLKDNREKIEKILTFRIPYYVGPLARGNSRFAWMTRKSEETITPWNFEEVVDKGASAQSFIERMTNFDKNLPNEKVLPKHSLLYEYFTVYNELTKVKYVTEGMRKPAFLSGEQKKAIVDLLFKTNRKVTVKQLKEDYFKKIECFDSVEISGVEDRFNASLGTYHDLLKIIKDKDFLDNEENEDILEDIVLTLTLFEDREMIEERLKTYAHLFDDKVMKQLKRRRYTGWGRLSRKLINGIRDKQSGKTILDFLKSDGFANRNFMQLIHDDSLTFKEDIQKAQVSGQGDSLHEHIANLAGSPAIKKGILQTVKVVDELVKVMGRHKPENIVIEMARENQTTQKGQKNSRERMKRIEEGIKELGSQILKEHPVENTQLQNEKLYLYYLQNGRDMYVDQELDINRLSDYDVDHIVPQSFLKDDSIDNKVLTRSDKARGKSDNVPSEEVVKKMKNYWRQLLNAKLITQRKFDNLTKAERGGLSELDKAGFIKRQLVETRQITKHVAQILDSRMNTKYDENDKLIREVKVITLKSKLVSDFRKDFQFYKVREINNYHHAHDAYLNAVVGTALIKKYPKLESEFVYGDYKVYDVRKMIAKSEQEIGKATAKYFFYSNIMNFFKTEITLANGEIRKRPLIETNGETGEIVWDKGRDFATVRKVLSMPQVNIVKKTEVQTGGFSKESILPKRNSDKLIARKKDWDPKKYGGFDSPTVAYSVLVVAKVEKGKSKKLKSVKELLGITIMERSSFEKNPIDFLEAKGYKEVKKDLIIKLPKYSLFELENGRKRMLASAGELQKGNELALPSKYVNFLYLASHYEKLKGSPEDNEQKQLFVEQHKHYLDEIIEQISEFSKRVILADANLDKVLSAYNKHRDKPIREQAENIIHLFTLTNLGAPAAFKYFDTTIDRKRYTSTKEVLDATLIHQSITGLYETRIDLSQLGGDGGGGGGSGGGGSGGGGSGGGGSGGGGSGGTLNIEDEYRLHETSKEPDVPLGSTWLSDFPQAWAETGGMGLAVRQAPLIIPLKATSTPVSIKQYPMSQEARLGIKPHIQRLLDQGILVPCQSPWNTPLLPVKKPGTNDYRPVQDLREVNKRVEDIHPTVPNPYNLLSGLPPSHQWYTVLDLKDAFFCLRLHPTSQPLFAFEWRDPEMGISGQLTWTRLPQGFKNSPTLFNEALHRDLADFRIQHPDLILLQYVDDLLLAATSEQDCQRGTRALLQTLGNLGYRASAKKAQICQKQVKYLGYLLKEGQRWLTEARKETVMGQPTPKTPRQLREFLGKAGFCRLFIPGFAEMAAPLYPLTKPGTLFNWGPDQQKAYQEIKQALLTAPALGLPDLTKPFELFVDEKQGYAKGVLTQKLGPWRRPVAYLSKKLDPVAAGWPPCLRMVAAIAVLTKDAGKLTMGQPLVILAPHAVEALVKQPPDRWLSNARMTHYQAMLLDTDRVQFGPVVALNPATLLPLPEKEAPHDCLEILAETHGTRPDLTDQPIPDADYTWYTDGSSFLQEGQRRAGAAVTTETEVIWARALPAGTSAQRAELIALTQALKMAEGKKLNVYTDSRYAFATAHVHGEIYRRRGWLTSEGREIKNKNEILALLKALFLPKRLSIIHCPGHQKGNSAEARGNRMADQAAREAAMKAVLETSTLLAGKRTADGSEFEKRTADGSEFESPKKKAKVE

SEQ ID NO: 1027 - protein, 2096 aa, synthetic construct
MPAAKRVKLDGGDKKYSIGLDIGTNSVGWAVITDEYKVPSKKFKVLGNTDRHSIKKNLIGALLFDSGETAEATRLKRTARRRYTRRKNRICYLQEIFSNEMAKVDDSFFHRLEESFLVEEDKKHERHPIFGNIVDEVAYHEKYPTIYHLRKKLVDSTDKADLRLIYLALAHMIKFRGHFLIEGDLNPDNSDVDKLFIQLVQTYNQLFEENPINASGVDAKAILSARLSKSRRLENLIAQLPGEKKNGLFGNLIALSLGLTPNFKSNFDLAEDAKLQLSKDTYDDDLDNLLAQIGDQYADLFLAAKNLSDAILLSDILRVNTEITKAPLSASMIKRYDEHHQDLTLLKALVRQQLPEKYKEIFFDQSKNGYAGYIDGGASQEEFYKFIKPILEKMDGTEELLVKLNREDLLRKQRTFDNGSIPHQIHLGELHAILRRQEDFYPFLKDNREKIEKILTFRIPYYVGPLARGNSRFAWMTRKSEETITPWNFEEVVDKGASAQSFIERMTNFDKNLPNEKVLPKHSLLYEYFTVYNELTKVKYVTEGMRKPAFLSGEQKKAIVDLLFKTNRKVTVKQLKEDYFKKIECFDSVEISGVEDRFNASLGTYHDLLKIIKDKDFLDNEENEDILEDIVLTLTLFEDREMIEERLKTYAHLFDDKVMKQLKRRRYTGWGRLSRKLINGIRDKQSGKTILDFLKSDGFANRNFMQLIHDDSLTFKEDIQKAQVSGQGDSLHEHIANLAGSPAIKKGILQTVKVVDELVKVMGRHKPENIVIEMARENQTTQKGQKNSRERMKRIEEGIKELGSQILKEHPVENTQLQNEKLYLYYLQNGRDMYVDQELDINRLSDYDVDHIVPQSFLKDDSIDNKVLTRSDKARGKSDNVPSEEVVKKMKNYWRQLLNAKLITQRKFDNLTKAERGGLSELDKAGFIKRQLVETRQITKHVAQILDSRMNTKYDENDKLIREVKVITLKSKLVSDFRKDFQFYKVREINNYHHAHDAYLNAVVGTALIKKYPKLESEFVYGDYKVYDVRKMIAKSEQEIGKATAKYFFYSNIMNFFKTEITLANGEIRKRPLIETNGETGEIVWDKGRDFATVRKVLSMPQVNIVKKTEVQTGGFSKESILPKRNSDKLIARKKDWDPKKYGGFDSPTVAYSVLVVAKVEKGKSKKLKSVKELLGITIMERSSFEKNPIDFLEAKGYKEVKKDLIIKLPKYSLFELENGRKRMLASAGELQKGNELALPSKYVNFLYLASHYEKLKGSPEDNEQKQLFVEQHKHYLDEIIEQISEFSKRVILADANLDKVLSAYNKHRDKPIREQAENIIHLFTLTNLGAPAAFKYFDTTIDRKRYTSTKEVLDATLIHQSITGLYETRIDLSQLGGDGGGSSEAAAKPAPGGTLNIEDEYRLHETSKEPDVPLGSTWLSDFPQAWAETGGMGLAVRQAPLIIPLKATSTPVSIKQYPMSQEARLGIKPHIQRLLDQGILVPCQSPWNTPLLPVKKPGTNDYRPVQDLREVNKRVEDIHPTVPNPYNLLSGLPPSHQWYTVLDLKDAFFCLRLHPTSQPLFAFEWRDPEMGISGQLTWTRLPQGFKNSPTLFNEALHRDLADFRIQHPDLILLQYVDDLLLAATSEQDCQRGTRALLQTLGNLGYRASAKKAQICQKQVKYLGYLLKEGQRWLTEARKETVMGQPTPKTPRQLREFLGKAGFCRLFIPGFAEMAAPLYPLTKPGTLFNWGPDQQKAYQEIKQALLTAPALGLPDLTKPFELFVDEKQGYAKGVLTQKLGPWRRPVAYLSKKLDPVAAGWPPCLRMVAAIAVLTKDAGKLTMGQPLVILAPHAVEALVKQPPDRWLSNARMTHYQAMLLDTDRVQFGPVVALNPATLLPLPEKEAPHDCLEILAETHGTRPDLTDQPIPDADYTWYTDGSSFLQEGQRRAGAAVTTETEVIWARALPAGTSAQRAELIALTQALKMAEGKKLNVYTDSRYAFATAHVHGEIYRRRGWLTSEGREIKNKNEILALLKALFLPKRLSIIHCPGHQKGNSAEARGNRMADQAAREAAMKAVLETSTLLAGKRTADGSEFEKRTADGSEFESPKKKAKVE

SEQ ID NO: 1028 - protein, 2101 aa, synthetic construct
MPAAKRVKLDGGDKKYSIGLDIGTNSVGWAVITDEYKVPSKKFKVLGNTDRHSIKKNLIGALLFDSGETAEATRLKRTARRRYTRRKNRICYLQEIFSNEMAKVDDSFFHRLEESFLVEEDKKHERHPIFGNIVDEVAYHEKYPTIYHLRKKLVDSTDKADLRLIYLALAHMIKFRGHFLIEGDLNPDNSDVDKLFIQLVQTYNQLFEENPINASGVDAKAILSARLSKSRRLENLIAQLPGEKKNGLFGNLIALSLGLTPNFKSNFDLAEDAKLQLSKDTYDDDLDNLLAQIGDQYADLFLAAKNLSDAILLSDILRVNTEITKAPLSASMIKRYDEHHQDLTLLKALVRQQLPEKYKEIFFDQSKNGYAGYIDGGASQEEFYKFIKPILEKMDGTEELLVKLNREDLLRKQRTFDNGSIPHQIHLGELHAILRRQEDFYPFLKDNREKIEKILTFRIPYYVGPLARGNSRFAWMTRKSEETITPWNFEEVVDKGASAQSFIERMTNFDKNLPNEKVLPKHSLLYEYFTVYNELTKVKYVTEGMRKPAFLSGEQKKAIVDLLFKTNRKVTVKQLKEDYFKKIECFDSVEISGVEDRFNASLGTYHDLLKIIKDKDFLDNEENEDILEDIVLTLTLFEDREMIEERLKTYAHLFDDKVMKQLKRRRYTGWGRLSRKLINGIRDKQSGKTILDFLKSDGFANRNFMQLIHDDSLTFKEDIQKAQVSGQGDSLHEHIANLAGSPAIKKGILQTVKVVDELVKVMGRHKPENIVIEMARENQTTQKGQKNSRERMKRIEEGIKELGSQILKEHPVENTQLQNEKLYLYYLQNGRDMYVDQELDINRLSDYDVDHIVPQSFLKDDSIDNKVLTRSDKARGKSDNVPSEEVVKKMKNYWRQLLNAKLITQRKFDNLTKAERGGLSELDKAGFIKRQLVETRQITKHVAQILDSRMNTKYDENDKLIREVKVITLKSKLVSDFRKDFQFYKVREINNYHHAHDAYLNAVVGTALIKKYPKLESEFVYGDYKVYDVRKMIAKSEQEIGKATAKYFFYSNIMNFFKTEITLANGEIRKRPLIETNGETGEIVWDKGRDFATVRKVLSMPQVNIVKKTEVQTGGFSKESILPKRNSDKLIARKKDWDPKKYGGFDSPTVAYSVLVVAKVEKGKSKKLKSVKELLGITIMERSSFEKNPIDFLEAKGYKEVKKDLIIKLPKYSLFELENGRKRMLASAGELQKGNELALPSKYVNFLYLASHYEKLKGSPEDNEQKQLFVEQHKHYLDEIIEQISEFSKRVILADANLDKVLSAYNKHRDKPIREQAENIIHLFTLTNLGAPAAFKYFDTTIDRKRYTSTKEVLDATLIHQSITGLYETRIDLSQLGGDGGSGSETPGTSESATPESGGTLNIEDEYRLHETSKEPDVPLGSTWLSDFPQAWAETGGMGLAVRQAPLIIPLKATSTPVSIKQYPMSQEARLGIKPHIQRLLDQGILVPCQSPWNTPLLPVKKPGTNDYRPVQDLREVNKRVEDIHPTVPNPYNLLSGLPPSHQWYTVLDLKDAFFCLRLHPTSQPLFAFEWRDPEMGISGQLTWTRLPQGFKNSPTLFNEALHRDLADFRIQHPDLILLQYVDDLLLAATSEQDCQRGTRALLQTLGNLGYRASAKKAQICQKQVKYLGYLLKEGQRWLTEARKETVMGQPTPKTPRQLREFLGKAGFCRLFIPGFAEMAAPLYPLTKPGTLFNWGPDQQKAYQEIKQALLTAPALGLPDLTKPFELFVDEKQGYAKGVLTQKLGPWRRPVAYLSKKLDPVAAGWPPCLRMVAAIAVLTKDAGKLTMGQPLVILAPHAVEALVKQPPDRWLSNARMTHYQAMLLDTDRVQFGPVVALNPATLLPLPEKEAPHDCLEILAETHGTRPDLTDQPIPDADYTWYTDGSSFLQEGQRRAGAAVTTETEVIWARALPAGTSAQRAELIALTQALKMAEGKKLNVYTDSRYAFATAHVHGEIYRRRGWLTSEGREIKNKNEILALLKALFLPKRLSIIHCPGHQKGNSAEARGNRMADQAAREAAMKAVLETSTLLAGKRTADGSEFEKRTADGSEFESPKKKAKVE

SEQ ID NO: 1029 - protein, 2110 aa, synthetic construct
MPAAKRVKLDGGDKKYSIGLDIGTNSVGWAVITDEYKVPSKKFKVLGNTDRHSIKKNLIGALLFDSGETAEATRLKRTARRRYTRRKNRICYLQEIFSNEMAKVDDSFFHRLEESFLVEEDKKHERHPIFGNIVDEVAYHEKYPTIYHLRKKLVDSTDKADLRLIYLALAHMIKFRGHFLIEGDLNPDNSDVDKLFIQLVQTYNQLFEENPINASGVDAKAILSARLSKSRRLENLIAQLPGEKKNGLFGNLIALSLGLTPNFKSNFDLAEDAKLQLSKDTYDDDLDNLLAQIGDQYADLFLAAKNLSDAILLSDILRVNTEITKAPLSASMIKRYDEHHQDLTLLKALVRQQLPEKYKEIFFDQSKNGYAGYIDGGASQEEFYKFIKPILEKMDGTEELLVKLNREDLLRKQRTFDNGSIPHQIHLGELHAILRRQEDFYPFLKDNREKIEKILTFRIPYYVGPLARGNSRFAWMTRKSEETITPWNFEEVVDKGASAQSFIERMTNFDKNLPNEKVLPKHSLLYEYFTVYNELTKVKYVTEGMRKPAFLSGEQKKAIVDLLFKTNRKVTVKQLKEDYFKKIECFDSVEISGVEDRFNASLGTYHDLLKIIKDKDFLDNEENEDILEDIVLTLTLFEDREMIEERLKTYAHLFDDKVMKQLKRRRYTGWGRLSRKLINGIRDKQSGKTILDFLKSDGFANRNFMQLIHDDSLTFKEDIQKAQVSGQGDSLHEHIANLAGSPAIKKGILQTVKVVDELVKVMGRHKPENIVIEMARENQTTQKGQKNSRERMKRIEEGIKELGSQILKEHPVENTQLQNEKLYLYYLQNGRDMYVDQELDINRLSDYDVDHIVPQSFLKDDSIDNKVLTRSDKARGKSDNVPSEEVVKKMKNYWRQLLNAKLITQRKFDNLTKAERGGLSELDKAGFIKRQLVETRQITKHVAQILDSRMNTKYDENDKLIREVKVITLKSKLVSDFRKDFQFYKVREINNYHHAHDAYLNAVVGTALIKKYPKLESEFVYGDYKVYDVRKMIAKSEQEIGKATAKYFFYSNIMNFFKTEITLANGEIRKRPLIETNGETGEIVWDKGRDFATVRKVLSMPQVNIVKKTEVQTGGFSKESILPKRNSDKLIARKKDWDPKKYGGFDSPTVAYSVLVVAKVEKGKSKKLKSVKELLGITIMERSSFEKNPIDFLEAKGYKEVKKDLIIKLPKYSLFELENGRKRMLASAGELQKGNELALPSKYVNFLYLASHYEKLKGSPEDNEQKQLFVEQHKHYLDEIIEQISEFSKRVILADANLDKVLSAYNKHRDKPIREQAENIIHLFTLTNLGAPAAFKYFDTTIDRKRYTSTKEVLDATLIHQSITGLYETRIDLSQLGGDGGEAAAKEAAAKEAAAKEAAAKEAAAKGGTLNIEDEYRLHETSKEPDVPLGSTWLSDFPQAWAETGGMGLAVRQAPLIIPLKATSTPVSIKQYPMSQEARLGIKPHIQRLLDQGILVPCQSPWNTPLLPVKKPGTNDYRPVQDLREVNKRVEDIHPTVPNPYNLLSGLPPSHQWYTVLDLKDAFFCLRLHPTSQPLFAFEWRDPEMGISGQLTWTRLPQGFKNSPTLFNEALHRDLADFRIQHPDLILLQYVDDLLLAATSEQDCQRGTRALLQTLGNLGYRASAKKAQICQKQVKYLGYLLKEGQRWLTEARKETVMGQPTPKTPRQLREFLGKAGFCRLFIPGFAEMAAPLYPLTKPGTLFNWGPDQQKAYQEIKQALLTAPALGLPDLTKPFELFVDEKQGYAKGVLTQKLGPWRRPVAYLSKKLDPVAAGWPPCLRMVAAIAVLTKDAGKLTMGQPLVILAPHAVEALVKQPPDRWLSNARMTHYQAMLLDTDRVQFGPVVALNPATLLPLPEKEAPHDCLEILAETHGTRPDLTDQPIPDADYTWYTDGSSFLQEGQRRAGAAVTTETEVIWARALPAGTSAQRAELIALTQALKMAEGKKLNVYTDSRYAFATAHVHGEIYRRRGWLTSEGREIKNKNEILALLKALFLPKRLSIIHCPGHQKGNSAEARGNRMADQAAREAAMKAVLETSTLLAGKRTADGSEFEKRTADGSEFESPKKKAKVE

SEQ ID NO: 1030 - protein, 2091 aa, synthetic construct
MPAAKRVKLDGGDKKYSIGLDIGTNSVGWAVITDEYKVPSKKFKVLGNTDRHSIKKNLIGALLFDSGETAEATRLKRTARRRYTRRKNRICYLQEIFSNEMAKVDDSFFHRLEESFLVEEDKKHERHPIFGNIVDEVAYHEKYPTIYHLRKKLVDSTDKADLRLIYLALAHMIKFRGHFLIEGDLNPDNSDVDKLFIQLVQTYNQLFEENPINASGVDAKAILSARLSKSRRLENLIAQLPGEKKNGLFGNLIALSLGLTPNFKSNFDLAEDAKLQLSKDTYDDDLDNLLAQIGDQYADLFLAAKNLSDAILLSDILRVNTEITKAPLSASMIKRYDEHHQDLTLLKALVRQQLPEKYKEIFFDQSKNGYAGYIDGGASQEEFYKFIKPILEKMDGTEELLVKLNREDLLRKQRTFDNGSIPHQIHLGELHAILRRQEDFYPFLKDNREKIEKILTFRIPYYVGPLARGNSRFAWMTRKSEETITPWNFEEVVDKGASAQSFIERMTNFDKNLPNEKVLPKHSLLYEYFTVYNELTKVKYVTEGMRKPAFLSGEQKKAIVDLLFKTNRKVTVKQLKEDYFKKIECFDSVEISGVEDRFNASLGTYHDLLKIIKDKDFLDNEENEDILEDIVLTLTLFEDREMIEERLKTYAHLFDDKVMKQLKRRRYTGWGRLSRKLINGIRDKQSGKTILDFLKSDGFANRNFMQLIHDDSLTFKEDIQKAQVSGQGDSLHEHIANLAGSPAIKKGILQTVKVVDELVKVMGRHKPENIVIEMARENQTTQKGQKNSRERMKRIEEGIKELGSQILKEHPVENTQLQNEKLYLYYLQNGRDMYVDQELDINRLSDYDVDHIVPQSFLKDDSIDNKVLTRSDKARGKSDNVPSEEVVKKMKNYWRQLLNAKLITQRKFDNLTKAERGGLSELDKAGFIKRQLVETRQITKHVAQILDSRMNTKYDENDKLIREVKVITLKSKLVSDFRKDFQFYKVREINNYHHAHDAYLNAVVGTALIKKYPKLESEFVYGDYKVYDVRKMIAKSEQEIGKATAKYFFYSNIMNFFKTEITLANGEIRKRPLIETNGETGEIVWDKGRDFATVRKVLSMPQVNIVKKTEVQTGGFSKESILPKRNSDKLIARKKDWDPKKYGGFDSPTVAYSVLVVAKVEKGKSKKLKSVKELLGITIMERSSFEKNPIDFLEAKGYKEVKKDLIIKLPKYSLFELENGRKRMLASAGELQKGNELALPSKYVNFLYLASHYEKLKGSPEDNEQKQLFVEQHKHYLDEIIEQISEFSKRVILADANLDKVLSAYNKHRDKPIREQAENIIHLFTLTNLGAPAAFKYFDTTIDRKRYTSTKEVLDATLIHQSITGLYETRIDLSQLGGDGGPAPGGSGGTLNIEDEYRLHETSKEPDVPLGSTWLSDFPQAWAETGGMGLAVRQAPLIIPLKATSTPVSIKQYPMSQEARLGIKPHIQRLLDQGILVPCQSPWNTPLLPVKKPGTNDYRPVQDLREVNKRVEDIHPTVPNPYNLLSGLPPSHQWYTVLDLKDAFFCLRLHPTSQPLFAFEWRDPEMGISGQLTWTRLPQGFKNSPTLFNEALHRDLADFRIQHPDLILLQYVDDLLLAATSEQDCQRGTRALLQTLGNLGYRASAKKAQICQKQVKYLGYLLKEGQRWLTEARKETVMGQPTPKTPRQLREFLGKAGFCRLFIPGFAEMAAPLYPLTKPGTLFNWGPDQQKAYQEIKQALLTAPALGLPDLTKPFELFVDEKQGYAKGVLTQKLGPWRRPVAYLSKKLDPVAAGWPPCLRMVAAIAVLTKDAGKLTMGQPLVILAPHAVEALVKQPPDRWLSNARMTHYQAMLLDTDRVQFGPVVALNPATLLPLPEKEAPHDCLEILAETHGTRPDLTDQPIPDADYTWYTDGSSFLQEGQRRAGAAVTTETEVIWARALPAGTSAQRAELIALTQALKMAEGKKLNVYTDSRYAFATAHVHGEIYRRRGWLTSEGREIKNKNEILALLKALFLPKRLSIIHCPGHQKGNSAEARGNRMADQAAREAAMKAVLETSTLLAGKRTADGSEFEKRTADGSEFESPKKKAKVE

SEQ ID NO: 1031 - protein, 2091 aa, synthetic construct
MPAAKRVKLDGGDKKYSIGLDIGTNSVGWAVITDEYKVPSKKFKVLGNTDRHSIKKNLIGALLFDSGETAEATRLKRTARRRYTRRKNRICYLQEIFSNEMAKVDDSFFHRLEESFLVEEDKKHERHPIFGNIVDEVAYHEKYPTIYHLRKKLVDSTDKADLRLIYLALAHMIKFRGHFLIEGDLNPDNSDVDKLFIQLVQTYNQLFEENPINASGVDAKAILSARLSKSRRLENLIAQLPGEKKNGLFGNLIALSLGLTPNFKSNFDLAEDAKLQLSKDTYDDDLDNLLAQIGDQYADLFLAAKNLSDAILLSDILRVNTEITKAPLSASMIKRYDEHHQDLTLLKALVRQQLPEKYKEIFFDQSKNGYAGYIDGGASQEEFYKFIKPILEKMDGTEELLVKLNREDLLRKQRTFDNGSIPHQIHLGELHAILRRQEDFYPFLKDNREKIEKILTFRIPYYVGPLARGNSRFAWMTRKSEETITPWNFEEVVDKGASAQSFIERMTNFDKNLPNEKVLPKHSLLYEYFTVYNELTKVKYVTEGMRKPAFLSGEQKKAIVDLLFKTNRKVTVKQLKEDYFKKIECFDSVEISGVEDRFNASLGTYHDLLKIIKDKDFLDNEENEDILEDIVLTLTLFEDREMIEERLKTYAHLFDDKVMKQLKRRRYTGWGRLSRKLINGIRDKQSGKTILDFLKSDGFANRNFMQLIHDDSLTFKEDIQKAQVSGQGDSLHEHIANLAGSPAIKKGILQTVKVVDELVKVMGRHKPENIVIEMARENQTTQKGQKNSRERMKRIEEGIKELGSQILKEHPVENTQLQNEKLYLYYLQNGRDMYVDQELDINRLSDYDVDHIVPQSFLKDDSIDNKVLTRSDKARGKSDNVPSEEVVKKMKNYWRQLLNAKLITQRKFDNLTKAERGGLSELDKAGFIKRQLVETRQITKHVAQILDSRMNTKYDENDKLIREVKVITLKSKLVSDFRKDFQFYKVREINNYHHAHDAYLNAVVGTALIKKYPKLESEFVYGDYKVYDVRKMIAKSEQEIGKATAKYFFYSNIMNFFKTEITLANGEIRKRPLIETNGETGEIVWDKGRDFATVRKVLSMPQVNIVKKTEVQTGGFSKESILPKRNSDKLIARKKDWDPKKYGGFDSPTVAYSVLVVAKVEKGKSKKLKSVKELLGITIMERSSFEKNPIDFLEAKGYKEVKKDLIIKLPKYSLFELENGRKRMLASAGELQKGNELALPSKYVNFLYLASHYEKLKGSPEDNEQKQLFVEQHKHYLDEIIEQISEFSKRVILADANLDKVLSAYNKHRDKPIREQAENIIHLFTLTNLGAPAAFKYFDTTIDRKRYTSTKEVLDATLIHQSITGLYETRIDLSQLGGDGGGGGGSSGGTLNIEDEYRLHETSKEPDVPLGSTWLSDFPQAWAETGGMGLAVRQAPLIIPLKATSTPVSIKQYPMSQEARLGIKPHIQRLLDQGILVPCQSPWNTPLLPVKKPGTNDYRPVQDLREVNKRVEDIHPTVPNPYNLLSGLPPSHQWYTVLDLKDAFFCLRLHPTSQPLFAFEWRDPEMGISGQLTWTRLPQGFKNSPTLFNEALHRDLADFRIQHPDLILLQYVDDLLLAATSEQDCQRGTRALLQTLGNLGYRASAKKAQICQKQVKYLGYLLKEGQRWLTEARKETVMGQPTPKTPRQLREFLGKAGFCRLFIPGFAEMAAPLYPLTKPGTLFNWGPDQQKAYQEIKQALLTAPALGLPDLTKPFELFVDEKQGYAKGVLTQKLGPWRRPVAYLSKKLDPVAAGWPPCLRMVAAIAVLTKDAGKLTMGQPLVILAPHAVEALVKQPPDRWLSNARMTHYQAMLLDTDRVQFGPVVALNPATLLPLPEKEAPHDCLEILAETHGTRPDLTDQPIPDADYTWYTDGSSFLQEGQRRAGAAVTTETEVIWARALPAGTSAQRAELIALTQALKMAEGKKLNVYTDSRYAFATAHVHGEIYRRRGWLTSEGREIKNKNEILALLKALFLPKRLSIIHCPGHQKGNSAEARGNRMADQAAREAAMKAVLETSTLLAGKRTADGSEFEKRTADGSEFESPKKKAKVE

SEQ ID NO: 1032 - protein, 2094 aa, synthetic construct
MPAAKRVKLDGGDKKYSIGLDIGTNSVGWAVITDEYKVPSKKFKVLGNTDRHSIKKNLIGALLFDSGETAEATRLKRTARRRYTRRKNRICYLQEIFSNEMAKVDDSFFHRLEESFLVEEDKKHERHPIFGNIVDEVAYHEKYPTIYHLRKKLVDSTDKADLRLIYLALAHMIKFRGHFLIEGDLNPDNSDVDKLFIQLVQTYNQLFEENPINASGVDAKAILSARLSKSRRLENLIAQLPGEKKNGLFGNLIALSLGLTPNFKSNFDLAEDAKLQLSKDTYDDDLDNLLAQIGDQYADLFLAAKNLSDAILLSDILRVNTEITKAPLSASMIKRYDEHHQDLTLLKALVRQQLPEKYKEIFFDQSKNGYAGYIDGGASQEEFYKFIKPILEKMDGTEELLVKLNREDLLRKQRTFDNGSIPHQIHLGELHAILRRQEDFYPFLKDNREKIEKILTFRIPYYVGPLARGNSRFAWMTRKSEETITPWNFEEVVDKGASAQSFIERMTNFDKNLPNEKVLPKHSLLYEYFTVYNELTKVKYVTEGMRKPAFLSGEQKKAIVDLLFKTNRKVTVKQLKEDYFKKIECFDSVEISGVEDRFNASLGTYHDLLKIIKDKDFLDNEENEDILEDIVLTLTLFEDREMIEERLKTYAHLFDDKVMKQLKRRRYTGWGRLSRKLINGIRDKQSGKTILDFLKSDGFANRNFMQLIHDDSLTFKEDIQKAQVSGQGDSLHEHIANLAGSPAIKKGILQTVKVVDELVKVMGRHKPENIVIEMARENQTTQKGQKNSRERMKRIEEGIKELGSQILKEHPVENTQLQNEKLYLYYLQNGRDMYVDQELDINRLSDYDVDHIVPQSFLKDDSIDNKVLTRSDKARGKSDNVPSEEVVKKMKNYWRQLLNAKLITQRKFDNLTKAERGGLSELDKAGFIKRQLVETRQITKHVAQILDSRMNTKYDENDKLIREVKVITLKSKLVSDFRKDFQFYKVREINNYHHAHDAYLNAVVGTALIKKYPKLESEFVYGDYKVYDVRKMIAKSEQEIGKATAKYFFYSNIMNFFKTEITLANGEIRKRPLIETNGETGEIVWDKGRDFATVRKVLSMPQVNIVKKTEVQTGGFSKESILPKRNSDKLIARKKDWDPKKYGGFDSPTVAYSVLVVAKVEKGKSKKLKSVKELLGITIMERSSFEKNPIDFLEAKGYKEVKKDLIIKLPKYSLFELENGRKRMLASAGELQKGNELALPSKYVNFLYLASHYEKLKGSPEDNEQKQLFVEQHKHYLDEIIEQISEFSKRVILADANLDKVLSAYNKHRDKPIREQAENIIHLFTLTNLGAPAAFKYFDTTIDRKRYTSTKEVLDATLIHQSITGLYETRIDLSQLGGDGGPAPAPAPAPGGTLNIEDEYRLHETSKEPDVPLGSTWLSDFPQAWAETGGMGLAVRQAPLIIPLKATSTPVSIKQYPMSQEARLGIKPHIQRLLDQGILVPCQSPWNTPLLPVKKPGTNDYRPVQDLREVNKRVEDIHPTVPNPYNLLSGLPPSHQWYTVLDLKDAFFCLRLHPTSQPLFAFEWRDPEMGISGQLTWTRLPQGFKNSPTLFNEALHRDLADFRIQHPDLILLQYVDDLLLAATSEQDCQRGTRALLQTLGNLGYRASAKKAQICQKQVKYLGYLLKEGQRWLTEARKETVMGQPTPKTPRQLREFLGKAGFCRLFIPGFAEMAAPLYPLTKPGTLFNWGPDQQKAYQEIKQALLTAPALGLPDLTKPFELFVDEKQGYAKGVLTQKLGPWRRPVAYLSKKLDPVAAGWPPCLRMVAAIAVLTKDAGKLTMGQPLVILAPHAVEALVKQPPDRWLSNARMTHYQAMLLDTDRVQFGPVVALNPATLLPLPEKEAPHDCLEILAETHGTRPDLTDQPIPDADYTWYTDGSSFLQEGQRRAGAAVTTETEVIWARALPAGTSAQRAELIALTQALKMAEGKKLNVYTDSRYAFATAHVHGEIYRRRGWLTSEGREIKNKNEILALLKALFLPKRLSIIHCPGHQKGNSAEARGNRMADQAAREAAMKAVLETSTLLAGKRTADGSEFEKRTADGSEFESPKKKAKVE

SEQ ID NO: 1033 - protein, 2094 aa, synthetic construct
MPAAKRVKLDGGDKKYSIGLDIGTNSVGWAVITDEYKVPSKKFKVLGNTDRHSIKKNLIGALLFDSGETAEATRLKRTARRRYTRRKNRICYLQEIFSNEMAKVDDSFFHRLEESFLVEEDKKHERHPIFGNIVDEVAYHEKYPTIYHLRKKLVDSTDKADLRLIYLALAHMIKFRGHFLIEGDLNPDNSDVDKLFIQLVQTYNQLFEENPINASGVDAKAILSARLSKSRRLENLIAQLPGEKKNGLFGNLIALSLGLTPNFKSNFDLAEDAKLQLSKDTYDDDLDNLLAQIGDQYADLFLAAKNLSDAILLSDILRVNTEITKAPLSASMIKRYDEHHQDLTLLKALVRQQLPEKYKEIFFDQSKNGYAGYIDGGASQEEFYKFIKPILEKMDGTEELLVKLNREDLLRKQRTFDNGSIPHQIHLGELHAILRRQEDFYPFLKDNREKIEKILTFRIPYYVGPLARGNSRFAWMTRKSEETITPWNFEEVVDKGASAQSFIERMTNFDKNLPNEKVLPKHSLLYEYFTVYNELTKVKYVTEGMRKPAFLSGEQKKAIVDLLFKTNRKVTVKQLKEDYFKKIECFDSVEISGVEDRFNASLGTYHDLLKIIKDKDFLDNEENEDILEDIVLTLTLFEDREMIEERLKTYAHLFDDKVMKQLKRRRYTGWGRLSRKLINGIRDKQSGKTILDFLKSDGFANRNFMQLIHDDSLTFKEDIQKAQVSGQGDSLHEHIANLAGSPAIKKGILQTVKVVDELVKVMGRHKPENIVIEMARENQTTQKGQKNSRERMKRIEEGIKELGSQILKEHPVENTQLQNEKLYLYYLQNGRDMYVDQELDINRLSDYDVDHIVPQSFLKDDSIDNKVLTRSDKARGKSDNVPSEEVVKKMKNYWRQLLNAKLITQRKFDNLTKAERGGLSELDKAGFIKRQLVETRQITKHVAQILDSRMNTKYDENDKLIREVKVITLKSKLVSDFRKDFQFYKVREINNYHHAHDAYLNAVVGTALIKKYPKLESEFVYGDYKVYDVRKMIAKSEQEIGKATAKYFFYSNIMNFFKTEITLANGEIRKRPLIETNGETGEIVWDKGRDFATVRKVLSMPQVNIVKKTEVQTGGFSKESILPKRNSDKLIARKKDWDPKKYGGFDSPTVAYSVLVVAKVEKGKSKKLKSVKELLGITIMERSSFEKNPIDFLEAKGYKEVKKDLIIKLPKYSLFELENGRKRMLASAGELQKGNELALPSKYVNFLYLASHYEKLKGSPEDNEQKQLFVEQHKHYLDEIIEQISEFSKRVILADANLDKVLSAYNKHRDKPIREQAENIIHLFTLTNLGAPAAFKYFDTTIDRKRYTSTKEVLDATLIHQSITGLYETRIDLSQLGGDGGPAPGSSGGGGGTLNIEDEYRLHETSKEPDVPLGSTWLSDFPQAWAETGGMGLAVRQAPLIIPLKATSTPVSIKQYPMSQEARLGIKPHIQRLLDQGILVPCQSPWNTPLLPVKKPGTNDYRPVQDLREVNKRVEDIHPTVPNPYNLLSGLPPSHQWYTVLDLKDAFFCLRLHPTSQPLFAFEWRDPEMGISGQLTWTRLPQGFKNSPTLFNEALHRDLADFRIQHPDLILLQYVDDLLLAATSEQDCQRGTRALLQTLGNLGYRASAKKAQICQKQVKYLGYLLKEGQRWLTEARKETVMGQPTPKTPRQLREFLGKAGFCRLFIPGFAEMAAPLYPLTKPGTLFNWGPDQQKAYQEIKQALLTAPALGLPDLTKPFELFVDEKQGYAKGVLTQKLGPWRRPVAYLSKKLDPVAAGWPPCLRMVAAIAVLTKDAGKLTMGQPLVILAPHAVEALVKQPPDRWLSNARMTHYQAMLLDTDRVQFGPVVALNPATLLPLPEKEAPHDCLEILAETHGTRPDLTDQPIPDADYTWYTDGSSFLQEGQRRAGAAVTTETEVIWARALPAGTSAQRAELIALTQALKMAEGKKLNVYTDSRYAFATAHVHGEIYRRRGWLTSEGREIKNKNEILALLKALFLPKRLSIIHCPGHQKGNSAEARGNRMADQAAREAAMKAVLETSTLLAGKRTADGSEFEKRTADGSEFESPKKKAKVE

SEQ ID NO: 1034 - protein, 2096 aa, synthetic construct
MPAAKRVKLDGGDKKYSIGLDIGTNSVGWAVITDEYKVPSKKFKVLGNTDRHSIKKNLIGALLFDSGETAEATRLKRTARRRYTRRKNRICYLQEIFSNEMAKVDDSFFHRLEESFLVEEDKKHERHPIFGNIVDEVAYHEKYPTIYHLRKKLVDSTDKADLRLIYLALAHMIKFRGHFLIEGDLNPDNSDVDKLFIQLVQTYNQLFEENPINASGVDAKAILSARLSKSRRLENLIAQLPGEKKNGLFGNLIALSLGLTPNFKSNFDLAEDAKLQLSKDTYDDDLDNLLAQIGDQYADLFLAAKNLSDAILLSDILRVNTEITKAPLSASMIKRYDEHHQDLTLLKALVRQQLPEKYKEIFFDQSKNGYAGYIDGGASQEEFYKFIKPILEKMDGTEELLVKLNREDLLRKQRTFDNGSIPHQIHLGELHAILRRQEDFYPFLKDNREKIEKILTFRIPYYVGPLARGNSRFAWMTRKSEETITPWNFEEVVDKGASAQSFIERMTNFDKNLPNEKVLPKHSLLYEYFTVYNELTKVKYVTEGMRKPAFLSGEQKKAIVDLLFKTNRKVTVKQLKEDYFKKIECFDSVEISGVEDRFNASLGTYHDLLKIIKDKDFLDNEENEDILEDIVLTLTLFEDREMIEERLKTYAHLFDDKVMKQLKRRRYTGWGRLSRKLINGIRDKQSGKTILDFLKSDGFANRNFMQLIHDDSLTFKEDIQKAQVSGQGDSLHEHIANLAGSPAIKKGILQTVKVVDELVKVMGRHKPENIVIEMARENQTTQKGQKNSRERMKRIEEGIKELGSQILKEHPVENTQLQNEKLYLYYLQNGRDMYVDQELDINRLSDYDVDHIVPQSFLKDDSIDNKVLTRSDKARGKSDNVPSEEVVKKMKNYWRQLLNAKLITQRKFDNLTKAERGGLSELDKAGFIKRQLVETRQITKHVAQILDSRMNTKYDENDKLIREVKVITLKSKLVSDFRKDFQFYKVREINNYHHAHDAYLNAVVGTALIKKYPKLESEFVYGDYKVYDVRKMIAKSEQEIGKATAKYFFYSNIMNFFKTEITLANGEIRKRPLIETNGETGEIVWDKGRDFATVRKVLSMPQVNIVKKTEVQTGGFSKESILPKRNSDKLIARKKDWDPKKYGGFDSPTVAYSVLVVAKVEKGKSKKLKSVKELLGITIMERSSFEKNPIDFLEAKGYKEVKKDLIIKLPKYSLFELENGRKRMLASAGELQKGNELALPSKYVNFLYLASHYEKLKGSPEDNEQKQLFVEQHKHYLDEIIEQISEFSKRVILADANLDKVLSAYNKHRDKPIREQAENIIHLFTLTNLGAPAAFKYFDTTIDRKRYTSTKEVLDATLIHQSITGLYETRIDLSQLGGDGGPAPGGSEAAAKGGTLNIEDEYRLHETSKEPDVPLGSTWLSDFPQAWAETGGMGLAVRQAPLIIPLKATSTPVSIKQYPMSQEARLGIKPHIQRLLDQGILVPCQSPWNTPLLPVKKPGTNDYRPVQDLREVNKRVEDIHPTVPNPYNLLSGLPPSHQWYTVLDLKDAFFCLRLHPTSQPLFAFEWRDPEMGISGQLTWTRLPQGFKNSPTLFNEALHRDLADFRIQHPDLILLQYVDDLLLAATSEQDCQRGTRALLQTLGNLGYRASAKKAQICQKQVKYLGYLLKEGQRWLTEARKETVMGQPTPKTPRQLREFLGKAGFCRLFIPGFAEMAAPLYPLTKPGTLFNWGPDQQKAYQEIKQALLTAPALGLPDLTKPFELFVDEKQGYAKGVLTQKLGPWRRPVAYLSKKLDPVAAGWPPCLRMVAAIAVLTKDAGKLTMGQPLVILAPHAVEALVKQPPDRWLSNARMTHYQAMLLDTDRVQFGPVVALNPATLLPLPEKEAPHDCLEILAETHGTRPDLTDQPIPDADYTWYTDGSSFLQEGQRRAGAAVTTETEVIWARALPAGTSAQRAELIALTQALKMAEGKKLNVYTDSRYAFATAHVHGEIYRRRGWLTSEGREIKNKNEILALLKALFLPKRLSIIHCPGHQKGNSAEARGNRMADQAAREAAMKAVLETSTLLAGKRTADGSEFEKRTADGSEFESPKKKAKVE

SEQ ID NO: 1035 - protein, 2096 aa, synthetic construct
MPAAKRVKLDGGDKKYSIGLDIGTNSVGWAVITDEYKVPSKKFKVLGNTDRHSIKKNLIGALLFDSGETAEATRLKRTARRRYTRRKNRICYLQEIFSNEMAKVDDSFFHRLEESFLVEEDKKHERHPIFGNIVDEVAYHEKYPTIYHLRKKLVDSTDKADLRLIYLALAHMIKFRGHFLIEGDLNPDNSDVDKLFIQLVQTYNQLFEENPINASGVDAKAILSARLSKSRRLENLIAQLPGEKKNGLFGNLIALSLGLTPNFKSNFDLAEDAKLQLSKDTYDDDLDNLLAQIGDQYADLFLAAKNLSDAILLSDILRVNTEITKAPLSASMIKRYDEHHQDLTLLKALVRQQLPEKYKEIFFDQSKNGYAGYIDGGASQEEFYKFIKPILEKMDGTEELLVKLNREDLLRKQRTFDNGSIPHQIHLGELHAILRRQEDFYPFLKDNREKIEKILTFRIPYYVGPLARGNSRFAWMTRKSEETITPWNFEEVVDKGASAQSFIERMTNFDKNLPNEKVLPKHSLLYEYFTVYNELTKVKYVTEGMRKPAFLSGEQKKAIVDLLFKTNRKVTVKQLKEDYFKKIECFDSVEISGVEDRFNASLGTYHDLLKIIKDKDFLDNEENEDILEDIVLTLTLFEDREMIEERLKTYAHLFDDKVMKQLKRRRYTGWGRLSRKLINGIRDKQSGKTILDFLKSDGFANRNFMQLIHDDSLTFKEDIQKAQVSGQGDSLHEHIANLAGSPAIKKGILQTVKVVDELVKVMGRHKPENIVIEMARENQTTQKGQKNSRERMKRIEEGIKELGSQILKEHPVENTQLQNEKLYLYYLQNGRDMYVDQELDINRLSDYDVDHIVPQSFLKDDSIDNKVLTRSDKARGKSDNVPSEEVVKKMKNYWRQLLNAKLITQRKFDNLTKAERGGLSELDKAGFIKRQLVETRQITKHVAQILDSRMNTKYDENDKLIREVKVITLKSKLVSDFRKDFQFYKVREINNYHHAHDAYLNAVVGTALIKKYPKLESEFVYGDYKVYDVRKMIAKSEQEIGKATAKYFFYSNIMNFFKTEITLANGEIRKRPLIETNGETGEIVWDKGRDFATVRKVLSMPQVNIVKKTEVQTGGFSKESILPKRNSDKLIARKKDWDPKKYGGFDSPTVAYSVLVVAKVEKGKSKKLKSVKELLGITIMERSSFEKNPIDFLEAKGYKEVKKDLIIKLPKYSLFELENGRKRMLASAGELQKGNELALPSKYVNFLYLASHYEKLKGSPEDNEQKQLFVEQHKHYLDEIIEQISEFSKRVILADANLDKVLSAYNKHRDKPIREQAENIIHLFTLTNLGAPAAFKYFDTTIDRKRYTSTKEVLDATLIHQSITGLYETRIDLSQLGGDGGGGSEAAAKPAPGGTLNIEDEYRLHETSKEPDVPLGSTWLSDFPQAWAETGGMGLAVRQAPLIIPLKATSTPVSIKQYPMSQEARLGIKPHIQRLLDQGILVPCQSPWNTPLLPVKKPGTNDYRPVQDLREVNKRVEDIHPTVPNPYNLLSGLPPSHQWYTVLDLKDAFFCLRLHPTSQPLFAFEWRDPEMGISGQLTWTRLPQGFKNSPTLFNEALHRDLADFRIQHPDLILLQYVDDLLLAATSEQDCQRGTRALLQTLGNLGYRASAKKAQICQKQVKYLGYLLKEGQRWLTEARKETVMGQPTPKTPRQLREFLGKAGFCRLFIPGFAEMAAPLYPLTKPGTLFNWGPDQQKAYQEIKQALLTAPALGLPDLTKPFELFVDEKQGYAKGVLTQKLGPWRRPVAYLSKKLDPVAAGWPPCLRMVAAIAVLTKDAGKLTMGQPLVILAPHAVEALVKQPPDRWLSNARMTHYQAMLLDTDRVQFGPVVALNPATLLPLPEKEAPHDCLEILAETHGTRPDLTDQPIPDADYTWYTDGSSFLQEGQRRAGAAVTTETEVIWARALPAGTSAQRAELIALTQALKMAEGKKLNVYTDSRYAFATAHVHGEIYRRRGWLTSEGREIKNKNEILALLKALFLPKRLSIIHCPGHQKGNSAEARGNRMADQAAREAAMKAVLETSTLLAGKRTADGSEFEKRTADGSEFESPKKKAKVE

SEQ ID NO: 1036 - protein, 2118 aa, synthetic construct
MPAAKRVKLDGGDKKYSIGLDIGTNSVGWAVITDEYKVPSKKFKVLGNTDRHSIKKNLIGALLFDSGETAEATRLKRTARRRYTRRKNRICYLQEIFSNEMAKVDDSFFHRLEESFLVEEDKKHERHPIFGNIVDEVAYHEKYPTIYHLRKKLVDSTDKADLRLIYLALAHMIKFRGHFLIEGDLNPDNSDVDKLFIQLVQTYNQLFEENPINASGVDAKAILSARLSKSRRLENLIAQLPGEKKNGLFGNLIALSLGLTPNFKSNFDLAEDAKLQLSKDTYDDDLDNLLAQIGDQYADLFLAAKNLSDAILLSDILRVNTEITKAPLSASMIKRYDEHHQDLTLLKALVRQQLPEKYKEIFFDQSKNGYAGYIDGGASQEEFYKFIKPILEKMDGTEELLVKLNREDLLRKQRTFDNGSIPHQIHLGELHAILRRQEDFYPFLKDNREKIEKILTFRIPYYVGPLARGNSRFAWMTRKSEETITPWNFEEVVDKGASAQSFIERMTNFDKNLPNEKVLPKHSLLYEYFTVYNELTKVKYVTEGMRKPAFLSGEQKKAIVDLLFKTNRKVTVKQLKEDYFKKIECFDSVEISGVEDRFNASLGTYHDLLKIIKDKDFLDNEENEDILEDIVLTLTLFEDREMIEERLKTYAHLFDDKVMKQLKRRRYTGWGRLSRKLINGIRDKQSGKTILDFLKSDGFANRNFMQLIHDDSLTFKEDIQKAQVSGQGDSLHEHIANLAGSPAIKKGILQTVKVVDELVKVMGRHKPENIVIEMARENQTTQKGQKNSRERMKRIEEGIKELGSQILKEHPVENTQLQNEKLYLYYLQNGRDMYVDQELDINRLSDYDVDHIVPQSFLKDDSIDNKVLTRSDKARGKSDNVPSEEVVKKMKNYWRQLLNAKLITQRKFDNLTKAERGGLSELDKAGFIKRQLVETRQITKHVAQILDSRMNTKYDENDKLIREVKVITLKSKLVSDFRKDFQFYKVREINNYHHAHDAYLNAVVGTALIKKYPKLESEFVYGDYKVYDVRKMIAKSEQEIGKATAKYFFYSNIMNFFKTEITLANGEIRKRPLIETNGETGEIVWDKGRDFATVRKVLSMPQVNIVKKTEVQTGGFSKESILPKRNSDKLIARKKDWDPKKYGGFDSPTVAYSVLVVAKVEKGKSKKLKSVKELLGITIMERSSFEKNPIDFLEAKGYKEVKKDLIIKLPKYSLFELENGRKRMLASAGELQKGNELALPSKYVNFLYLASHYEKLKGSPEDNEQKQLFVEQHKHYLDEIIEQISEFSKRVILADANLDKVLSAYNKHRDKPIREQAENIIHLFTLTNLGAPAAFKYFDTTIDRKRYTSTKEVLDATLIHQSITGLYETRIDLSQLGGDGGSGGSSGGSSGSETPGTSESATPESSGGSSGGSSGGTLNIEDEYRLHETSKEPDVPLGSTWLSDFPQAWAETGGMGLAVRQAPLIIPLKATSTPVSIKQYPMSQEARLGIKPHIQRLLDQGILVPCQSPWNTPLLPVKKPGTNDYRPVQDLREVNKRVEDIHPTVPNPYNLLSGLPPSHQWYTVLDLKDAFFCLRLHPTSQPLFAFEWRDPEMGISGQLTWTRLPQGFKNSPTLFNEALHRDLADFRIQHPDLILLQYVDDLLLAATSEQDCQRGTRALLQTLGNLGYRASAKKAQICQKQVKYLGYLLKEGQRWLTEARKETVMGQPTPKTPRQLREFLGKAGFCRLFIPGFAEMAAPLYPLTKPGTLFNWGPDQQKAYQEIKQALLTAPALGLPDLTKPFELFVDEKQGYAKGVLTQKLGPWRRPVAYLSKKLDPVAAGWPPCLRMVAAIAVLTKDAGKLTMGQPLVILAPHAVEALVKQPPDRWLSNARMTHYQAMLLDTDRVQFGPVVALNPATLLPLPEKEAPHDCLEILAETHGTRPDLTDQPIPDADYTWYTDGSSFLQEGQRRAGAAVTTETEVIWARALPAGTSAQRAELIALTQALKMAEGKKLNVYTDSRYAFATAHVHGEIYRRRGWLTSEGREIKNKNEILALLKALFLPKRLSIIHCPGHQKGNSAEARGNRMADQAAREAAMKAVLETSTLLAGKRTADGSEFEKRTADGSEFESPKKKAKVE

SEQ ID NO: 1037 - protein, 2100 aa, synthetic construct
MPAAKRVKLDGGDKKYSIGLDIGTNSVGWAVITDEYKVPSKKFKVLGNTDRHSIKKNLIGALLFDSGETAEATRLKRTARRRYTRRKNRICYLQEIFSNEMAKVDDSFFHRLEESFLVEEDKKHERHPIFGNIVDEVAYHEKYPTIYHLRKKLVDSTDKADLRLIYLALAHMIKFRGHFLIEGDLNPDNSDVDKLFIQLVQTYNQLFEENPINASGVDAKAILSARLSKSRRLENLIAQLPGEKKNGLFGNLIALSLGLTPNFKSNFDLAEDAKLQLSKDTYDDDLDNLLAQIGDQYADLFLAAKNLSDAILLSDILRVNTEITKAPLSASMIKRYDEHHQDLTLLKALVRQQLPEKYKEIFFDQSKNGYAGYIDGGASQEEFYKFIKPILEKMDGTEELLVKLNREDLLRKQRTFDNGSIPHQIHLGELHAILRRQEDFYPFLKDNREKIEKILTFRIPYYVGPLARGNSRFAWMTRKSEETITPWNFEEVVDKGASAQSFIERMTNFDKNLPNEKVLPKHSLLYEYFTVYNELTKVKYVTEGMRKPAFLSGEQKKAIVDLLFKTNRKVTVKQLKEDYFKKIECFDSVEISGVEDRFNASLGTYHDLLKIIKDKDFLDNEENEDILEDIVLTLTLFEDREMIEERLKTYAHLFDDKVMKQLKRRRYTGWGRLSRKLINGIRDKQSGKTILDFLKSDGFANRNFMQLIHDDSLTFKEDIQKAQVSGQGDSLHEHIANLAGSPAIKKGILQTVKVVDELVKVMGRHKPENIVIEMARENQTTQKGQKNSRERMKRIEEGIKELGSQILKEHPVENTQLQNEKLYLYYLQNGRDMYVDQELDINRLSDYDVDHIVPQSFLKDDSIDNKVLTRSDKARGKSDNVPSEEVVKKMKNYWRQLLNAKLITQRKFDNLTKAERGGLSELDKAGFIKRQLVETRQITKHVAQILDSRMNTKYDENDKLIREVKVITLKSKLVSDFRKDFQFYKVREINNYHHAHDAYLNAVVGTALIKKYPKLESEFVYGDYKVYDVRKMIAKSEQEIGKATAKYFFYSNIMNFFKTEITLANGEIRKRPLIETNGETGEIVWDKGRDFATVRKVLSMPQVNIVKKTEVQTGGFSKESILPKRNSDKLIARKKDWDPKKYGGFDSPTVAYSVLVVAKVEKGKSKKLKSVKELLGITIMERSSFEKNPIDFLEAKGYKEVKKDLIIKLPKYSLFELENGRKRMLASAGELQKGNELALPSKYVNFLYLASHYEKLKGSPEDNEQKQLFVEQHKHYLDEIIEQISEFSKRVILADANLDKVLSAYNKHRDKPIREQAENIIHLFTLTNLGAPAAFKYFDTTIDRKRYTSTKEVLDATLIHQSITGLYETRIDLSQLGGDGGEAAAKGGGGSEAAAKGGTLNIEDEYRLHETSKEPDVPLGSTWLSDFPQAWAETGGMGLAVRQAPLIIPLKATSTPVSIKQYPMSQEARLGIKPHIQRLLDQGILVPCQSPWNTPLLPVKKPGTNDYRPVQDLREVNKRVEDIHPTVPNPYNLLSGLPPSHQWYTVLDLKDAFFCLRLHPTSQPLFAFEWRDPEMGISGQLTWTRLPQGFKNSPTLFNEALHRDLADFRIQHPDLILLQYVDDLLLAATSEQDCQRGTRALLQTLGNLGYRASAKKAQICQKQVKYLGYLLKEGQRWLTEARKETVMGQPTPKTPRQLREFLGKAGFCRLFIPGFAEMAAPLYPLTKPGTLFNWGPDQQKAYQEIKQALLTAPALGLPDLTKPFELFVDEKQGYAKGVLTQKLGPWRRPVAYLSKKLDPVAAGWPPCLRMVAAIAVLTKDAGKLTMGQPLVILAPHAVEALVKQPPDRWLSNARMTHYQAMLLDTDRVQFGPVVALNPATLLPLPEKEAPHDCLEILAETHGTRPDLTDQPIPDADYTWYTDGSSFLQEGQRRAGAAVTTETEVIWARALPAGTSAQRAELIALTQALKMAEGKKLNVYTDSRYAFATAHVHGEIYRRRGWLTSEGREIKNKNEILALLKALFLPKRLSIIHCPGHQKGNSAEARGNRMADQAAREAAMKAVLETSTLLAGKRTADGSEFEKRTADGSEFESPKKKAKVE

SEQ ID NO: 1038 - protein, 2094 aa, synthetic construct
MPAAKRVKLDGGDKKYSIGLDIGTNSVGWAVITDEYKVPSKKFKVLGNTDRHSIKKNLIGALLFDSGETAEATRLKRTARRRYTRRKNRICYLQEIFSNEMAKVDDSFFHRLEESFLVEEDKKHERHPIFGNIVDEVAYHEKYPTIYHLRKKLVDSTDKADLRLIYLALAHMIKFRGHFLIEGDLNPDNSDVDKLFIQLVQTYNQLFEENPINASGVDAKAILSARLSKSRRLENLIAQLPGEKKNGLFGNLIALSLGLTPNFKSNFDLAEDAKLQLSKDTYDDDLDNLLAQIGDQYADLFLAAKNLSDAILLSDILRVNTEITKAPLSASMIKRYDEHHQDLTLLKALVRQQLPEKYKEIFFDQSKNGYAGYIDGGASQEEFYKFIKPILEKMDGTEELLVKLNREDLLRKQRTFDNGSIPHQIHLGELHAILRRQEDFYPFLKDNREKIEKILTFRIPYYVGPLARGNSRFAWMTRKSEETITPWNFEEVVDKGASAQSFIERMTNFDKNLPNEKVLPKHSLLYEYFTVYNELTKVKYVTEGMRKPAFLSGEQKKAIVDLLFKTNRKVTVKQLKEDYFKKIECFDSVEISGVEDRFNASLGTYHDLLKIIKDKDFLDNEENEDILEDIVLTLTLFEDREMIEERLKTYAHLFDDKVMKQLKRRRYTGWGRLSRKLINGIRDKQSGKTILDFLKSDGFANRNFMQLIHDDSLTFKEDIQKAQVSGQGDSLHEHIANLAGSPAIKKGILQTVKVVDELVKVMGRHKPENIVIEMARENQTTQKGQKNSRERMKRIEEGIKELGSQILKEHPVENTQLQNEKLYLYYLQNGRDMYVDQELDINRLSDYDVDHIVPQSFLKDDSIDNKVLTRSDKARGKSDNVPSEEVVKKMKNYWRQLLNAKLITQRKFDNLTKAERGGLSELDKAGFIKRQLVETRQITKHVAQILDSRMNTKYDENDKLIREVKVITLKSKLVSDFRKDFQFYKVREINNYHHAHDAYLNAVVGTALIKKYPKLESEFVYGDYKVYDVRKMIAKSEQEIGKATAKYFFYSNIMNFFKTEITLANGEIRKRPLIETNGETGEIVWDKGRDFATVRKVLSMPQVNIVKKTEVQTGGFSKESILPKRNSDKLIARKKDWDPKKYGGFDSPTVAYSVLVVAKVEKGKSKKLKSVKELLGITIMERSSFEKNPIDFLEAKGYKEVKKDLIIKLPKYSLFELENGRKRMLASAGELQKGNELALPSKYVNFLYLASHYEKLKGSPEDNEQKQLFVEQHKHYLDEIIEQISEFSKRVILADANLDKVLSAYNKHRDKPIREQAENIIHLFTLTNLGAPAAFKYFDTTIDRKRYTSTKEVLDATLIHQSITGLYETRIDLSQLGGDGGGSSPAPGGGGGTLNIEDEYRLHETSKEPDVPLGSTWLSDFPQAWAETGGMGLAVRQAPLIIPLKATSTPVSIKQYPMSQEARLGIKPHIQRLLDQGILVPCQSPWNTPLLPVKKPGTNDYRPVQDLREVNKRVEDIHPTVPNPYNLLSGLPPSHQWYTVLDLKDAFFCLRLHPTSQPLFAFEWRDPEMGISGQLTWTRLPQGFKNSPTLFNEALHRDLADFRIQHPDLILLQYVDDLLLAATSEQDCQRGTRALLQTLGNLGYRASAKKAQICQKQVKYLGYLLKEGQRWLTEARKETVMGQPTPKTPRQLREFLGKAGFCRLFIPGFAEMAAPLYPLTKPGTLFNWGPDQQKAYQEIKQALLTAPALGLPDLTKPFELFVDEKQGYAKGVLTQKLGPWRRPVAYLSKKLDPVAAGWPPCLRMVAAIAVLTKDAGKLTMGQPLVILAPHAVEALVKQPPDRWLSNARMTHYQAMLLDTDRVQFGPVVALNPATLLPLPEKEAPHDCLEILAETHGTRPDLTDQPIPDADYTWYTDGSSFLQEGQRRAGAAVTTETEVIWARALPAGTSAQRAELIALTQALKMAEGKKLNVYTDSRYAFATAHVHGEIYRRRGWLTSEGREIKNKNEILALLKALFLPKRLSIIHCPGHQKGNSAEARGNRMADQAAREAAMKAVLETSTLLAGKRTADGSEFEKRTADGSEFESPKKKAKVE

SEQ ID NO: 1039 - protein, 2096 aa, synthetic construct
MPAAKRVKLDGGDKKYSIGLDIGTNSVGWAVITDEYKVPSKKFKVLGNTDRHSIKKNLIGALLFDSGETAEATRLKRTARRRYTRRKNRICYLQEIFSNEMAKVDDSFFHRLEESFLVEEDKKHERHPIFGNIVDEVAYHEKYPTIYHLRKKLVDSTDKADLRLIYLALAHMIKFRGHFLIEGDLNPDNSDVDKLFIQLVQTYNQLFEENPINASGVDAKAILSARLSKSRRLENLIAQLPGEKKNGLFGNLIALSLGLTPNFKSNFDLAEDAKLQLSKDTYDDDLDNLLAQIGDQYADLFLAAKNLSDAILLSDILRVNTEITKAPLSASMIKRYDEHHQDLTLLKALVRQQLPEKYKEIFFDQSKNGYAGYIDGGASQEEFYKFIKPILEKMDGTEELLVKLNREDLLRKQRTFDNGSIPHQIHLGELHAILRRQEDFYPFLKDNREKIEKILTFRIPYYVGPLARGNSRFAWMTRKSEETITPWNFEEVVDKGASAQSFIERMTNFDKNLPNEKVLPKHSLLYEYFTVYNELTKVKYVTEGMRKPAFLSGEQKKAIVDLLFKTNRKVTVKQLKEDYFKKIECFDSVEISGVEDRFNASLGTYHDLLKIIKDKDFLDNEENEDILEDIVLTLTLFEDREMIEERLKTYAHLFDDKVMKQLKRRRYTGWGRLSRKLINGIRDKQSGKTILDFLKSDGFANRNFMQLIHDDSLTFKEDIQKAQVSGQGDSLHEHIANLAGSPAIKKGILQTVKVVDELVKVMGRHKPENIVIEMARENQTTQKGQKNSRERMKRIEEGIKELGSQILKEHPVENTQLQNEKLYLYYLQNGRDMYVDQELDINRLSDYDVDHIVPQSFLKDDSIDNKVLTRSDKARGKSDNVPSEEVVKKMKNYWRQLLNAKLITQRKFDNLTKAERGGLSELDKAGFIKRQLVETRQITKHVAQILDSRMNTKYDENDKLIREVKVITLKSKLVSDFRKDFQFYKVREINNYHHAHDAYLNAVVGTALIKKYPKLESEFVYGDYKVYDVRKMIAKSEQEIGKATAKYFFYSNIMNFFKTEITLANGEIRKRPLIETNGETGEIVWDKGRDFATVRKVLSMPQVNIVKKTEVQTGGFSKESILPKRNSDKLIARKKDWDPKKYGGFDSPTVAYSVLVVAKVEKGKSKKLKSVKELLGITIMERSSFEKNPIDFLEAKGYKEVKKDLIIKLPKYSLFELENGRKRMLASAGELQKGNELALPSKYVNFLYLASHYEKLKGSPEDNEQKQLFVEQHKHYLDEIIEQISEFSKRVILADANLDKVLSAYNKHRDKPIREQAENIIHLFTLTNLGAPAAFKYFDTTIDRKRYTSTKEVLDATLIHQSITGLYETRIDLSQLGGDGGEAAAKGSSPAPGGTLNIEDEYRLHETSKEPDVPLGSTWLSDFPQAWAETGGMGLAVRQAPLIIPLKATSTPVSIKQYPMSQEARLGIKPHIQRLLDQGILVPCQSPWNTPLLPVKKPGTNDYRPVQDLREVNKRVEDIHPTVPNPYNLLSGLPPSHQWYTVLDLKDAFFCLRLHPTSQPLFAFEWRDPEMGISGQLTWTRLPQGFKNSPTLFNEALHRDLADFRIQHPDLILLQYVDDLLLAATSEQDCQRGTRALLQTLGNLGYRASAKKAQICQKQVKYLGYLLKEGQRWLTEARKETVMGQPTPKTPRQLREFLGKAGFCRLFIPGFAEMAAPLYPLTKPGTLFNWGPDQQKAYQEIKQALLTAPALGLPDLTKPFELFVDEKQGYAKGVLTQKLGPWRRPVAYLSKKLDPVAAGWPPCLRMVAAIAVLTKDAGKLTMGQPLVILAPHAVEALVKQPPDRWLSNARMTHYQAMLLDTDRVQFGPVVALNPATLLPLPEKEAPHDCLEILAETHGTRPDLTDQPIPDADYTWYTDGSSFLQEGQRRAGAAVTTETEVIWARALPAGTSAQRAELIALTQALKMAEGKKLNVYTDSRYAFATAHVHGEIYRRRGWLTSEGREIKNKNEILALLKALFLPKRLSIIHCPGHQKGNSAEARGNRMADQAAREAAMKAVLETSTLLAGKRTADGSEFEKRTADGSEFESPKKKAKVE

SEQ ID NO: 1040 - protein, 2091 aa, synthetic construct
MPAAKRVKLDGGDKKYSIGLDIGTNSVGWAVITDEYKVPSKKFKVLGNTDRHSIKKNLIGALLFDSGETAEATRLKRTARRRYTRRKNRICYLQEIFSNEMAKVDDSFFHRLEESFLVEEDKKHERHPIFGNIVDEVAYHEKYPTIYHLRKKLVDSTDKADLRLIYLALAHMIKFRGHFLIEGDLNPDNSDVDKLFIQLVQTYNQLFEENPINASGVDAKAILSARLSKSRRLENLIAQLPGEKKNGLFGNLIALSLGLTPNFKSNFDLAEDAKLQLSKDTYDDDLDNLLAQIGDQYADLFLAAKNLSDAILLSDILRVNTEITKAPLSASMIKRYDEHHQDLTLLKALVRQQLPEKYKEIFFDQSKNGYAGYIDGGASQEEFYKFIKPILEKMDGTEELLVKLNREDLLRKQRTFDNGSIPHQIHLGELHAILRRQEDFYPFLKDNREKIEKILTFRIPYYVGPLARGNSRFAWMTRKSEETITPWNFEEVVDKGASAQSFIERMTNFDKNLPNEKVLPKHSLLYEYFTVYNELTKVKYVTEGMRKPAFLSGEQKKAIVDLLFKTNRKVTVKQLKEDYFKKIECFDSVEISGVEDRFNASLGTYHDLLKIIKDKDFLDNEENEDILEDIVLTLTLFEDREMIEERLKTYAHLFDDKVMKQLKRRRYTGWGRLSRKLINGIRDKQSGKTILDFLKSDGFANRNFMQLIHDDSLTFKEDIQKAQVSGQGDSLHEHIANLAGSPAIKKGILQTVKVVDELVKVMGRHKPENIVIEMARENQTTQKGQKNSRERMKRIEEGIKELGSQILKEHPVENTQLQNEKLYLYYLQNGRDMYVDQELDINRLSDYDVDHIVPQSFLKDDSIDNKVLTRSDKARGKSDNVPSEEVVKKMKNYWRQLLNAKLITQRKFDNLTKAERGGLSELDKAGFIKRQLVETRQITKHVAQILDSRMNTKYDENDKLIREVKVITLKSKLVSDFRKDFQFYKVREINNYHHAHDAYLNAVVGTALIKKYPKLESEFVYGDYKVYDVRKMIAKSEQEIGKATAKYFFYSNIMNFFKTEITLANGEIRKRPLIETNGETGEIVWDKGRDFATVRKVLSMPQVNIVKKTEVQTGGFSKESILPKRNSDKLIARKKDWDPKKYGGFDSPTVAYSVLVVAKVEKGKSKKLKSVKELLGITIMERSSFEKNPIDFLEAKGYKEVKKDLIIKLPKYSLFELENGRKRMLASAGELQKGNELALPSKYVNFLYLASHYEKLKGSPEDNEQKQLFVEQHKHYLDEIIEQISEFSKRVILADANLDKVLSAYNKHRDKPIREQAENIIHLFTLTNLGAPAAFKYFDTTIDRKRYTSTKEVLDATLIHQSITGLYETRIDLSQLGGDGGGGSGGSGGTLNIEDEYRLHETSKEPDVPLGSTWLSDFPQAWAETGGMGLAVRQAPLIIPLKATSTPVSIKQYPMSQEARLGIKPHIQRLLDQGILVPCQSPWNTPLLPVKKPGTNDYRPVQDLREVNKRVEDIHPTVPNPYNLLSGLPPSHQWYTVLDLKDAFFCLRLHPTSQPLFAFEWRDPEMGISGQLTWTRLPQGFKNSPTLFNEALHRDLADFRIQHPDLILLQYVDDLLLAATSEQDCQRGTRALLQTLGNLGYRASAKKAQICQKQVKYLGYLLKEGQRWLTEARKETVMGQPTPKTPRQLREFLGKAGFCRLFIPGFAEMAAPLYPLTKPGTLFNWGPDQQKAYQEIKQALLTAPALGLPDLTKPFELFVDEKQGYAKGVLTQKLGPWRRPVAYLSKKLDPVAAGWPPCLRMVAAIAVLTKDAGKLTMGQPLVILAPHAVEALVKQPPDRWLSNARMTHYQAMLLDTDRVQFGPVVALNPATLLPLPEKEAPHDCLEILAETHGTRPDLTDQPIPDADYTWYTDGSSFLQEGQRRAGAAVTTETEVIWARALPAGTSAQRAELIALTQALKMAEGKKLNVYTDSRYAFATAHVHGEIYRRRGWLTSEGREIKNKNEILALLKALFLPKRLSIIHCPGHQKGNSAEARGNRMADQAAREAAMKAVLETSTLLAGKRTADGSEFEKRTADGSEFESPKKKAKVE

SEQ ID NO: 1041 - protein, 2096 aa, synthetic construct
MPAAKRVKLDGGDKKYSIGLDIGTNSVGWAVITDEYKVPSKKFKVLGNTDRHSIKKNLIGALLFDSGETAEATRLKRTARRRYTRRKNRICYLQEIFSNEMAKVDDSFFHRLEESFLVEEDKKHERHPIFGNIVDEVAYHEKYPTIYHLRKKLVDSTDKADLRLIYLALAHMIKFRGHFLIEGDLNPDNSDVDKLFIQLVQTYNQLFEENPINASGVDAKAILSARLSKSRRLENLIAQLPGEKKNGLFGNLIALSLGLTPNFKSNFDLAEDAKLQLSKDTYDDDLDNLLAQIGDQYADLFLAAKNLSDAILLSDILRVNTEITKAPLSASMIKRYDEHHQDLTLLKALVRQQLPEKYKEIFFDQSKNGYAGYIDGGASQEEFYKFIKPILEKMDGTEELLVKLNREDLLRKQRTFDNGSIPHQIHLGELHAILRRQEDFYPFLKDNREKIEKILTFRIPYYVGPLARGNSRFAWMTRKSEETITPWNFEEVVDKGASAQSFIERMTNFDKNLPNEKVLPKHSLLYEYFTVYNELTKVKYVTEGMRKPAFLSGEQKKAIVDLLFKTNRKVTVKQLKEDYFKKIECFDSVEISGVEDRFNASLGTYHDLLKIIKDKDFLDNEENEDILEDIVLTLTLFEDREMIEERLKTYAHLFDDKVMKQLKRRRYTGWGRLSRKLINGIRDKQSGKTILDFLKSDGFANRNFMQLIHDDSLTFKEDIQKAQVSGQGDSLHEHIANLAGSPAIKKGILQTVKVVDELVKVMGRHKPENIVIEMARENQTTQKGQKNSRERMKRIEEGIKELGSQILKEHPVENTQLQNEKLYLYYLQNGRDMYVDQELDINRLSDYDVDHIVPQSFLKDDSIDNKVLTRSDKARGKSDNVPSEEVVKKMKNYWRQLLNAKLITQRKFDNLTKAERGGLSELDKAGFIKRQLVETRQITKHVAQILDSRMNTKYDENDKLIREVKVITLKSKLVSDFRKDFQFYKVREINNYHHAHDAYLNAVVGTALIKKYPKLESEFVYGDYKVYDVRKMIAKSEQEIGKATAKYFFYSNIMNFFKTEITLANGEIRKRPLIETNGETGEIVWDKGRDFATVRKVLSMPQVNIVKKTEVQTGGFSKESILPKRNSDKLIARKKDWDPKKYGGFDSPTVAYSVLVVAKVEKGKSKKLKSVKELLGITIMERSSFEKNPIDFLEAKGYKEVKKDLIIKLPKYSLFELENGRKRMLASAGELQKGNELALPSKYVNFLYLASHYEKLKGSPEDNEQKQLFVEQHKHYLDEIIEQISEFSKRVILADANLDKVLSAYNKHRDKPIREQAENIIHLFTLTNLGAPAAFKYFDTTIDRKRYTSTKEVLDATLIHQSITGLYETRIDLSQLGGDGGEAAAKGGSPAPGGTLNIEDEYRLHETSKEPDVPLGSTWLSDFPQAWAETGGMGLAVRQAPLIIPLKATSTPVSIKQYPMSQEARLGIKPHIQRLLDQGILVPCQSPWNTPLLPVKKPGTNDYRPVQDLREVNKRVEDIHPTVPNPYNLLSGLPPSHQWYTVLDLKDAFFCLRLHPTSQPLFAFEWRDPEMGISGQLTWTRLPQGFKNSPTLFNEALHRDLADFRIQHPDLILLQYVDDLLLAATSEQDCQRGTRALLQTLGNLGYRASAKKAQICQKQVKYLGYLLKEGQRWLTEARKETVMGQPTPKTPRQLREFLGKAGFCRLFIPGFAEMAAPLYPLTKPGTLFNWGPDQQKAYQEIKQALLTAPALGLPDLTKPFELFVDEKQGYAKGVLTQKLGPWRRPVAYLSKKLDPVAAGWPPCLRMVAAIAVLTKDAGKLTMGQPLVILAPHAVEALVKQPPDRWLSNARMTHYQAMLLDTDRVQFGPVVALNPATLLPLPEKEAPHDCLEILAETHGTRPDLTDQPIPDADYTWYTDGSSFLQEGQRRAGAAVTTETEVIWARALPAGTSAQRAELIALTQALKMAEGKKLNVYTDSRYAFATAHVHGEIYRRRGWLTSEGREIKNKNEILALLKALFLPKRLSIIHCPGHQKGNSAEARGNRMADQAAREAAMKAVLETSTLLAGKRTADGSEFEKRTADGSEFESPKKKAKVE

SEQ ID NO: 1042 - protein, 2100 aa, synthetic construct
MPAAKRVKLDGGDKKYSIGLDIGTNSVGWAVITDEYKVPSKKFKVLGNTDRHSIKKNLIGALLFDSGETAEATRLKRTARRRYTRRKNRICYLQEIFSNEMAKVDDSFFHRLEESFLVEEDKKHERHPIFGNIVDEVAYHEKYPTIYHLRKKLVDSTDKADLRLIYLALAHMIKFRGHFLIEGDLNPDNSDVDKLFIQLVQTYNQLFEENPINASGVDAKAILSARLSKSRRLENLIAQLPGEKKNGLFGNLIALSLGLTPNFKSNFDLAEDAKLQLSKDTYDDDLDNLLAQIGDQYADLFLAAKNLSDAILLSDILRVNTEITKAPLSASMIKRYDEHHQDLTLLKALVRQQLPEKYKEIFFDQSKNGYAGYIDGGASQEEFYKFIKPILEKMDGTEELLVKLNREDLLRKQRTFDNGSIPHQIHLGELHAILRRQEDFYPFLKDNREKIEKILTFRIPYYVGPLARGNSRFAWMTRKSEETITPWNFEEVVDKGASAQSFIERMTNFDKNLPNEKVLPKHSLLYEYFTVYNELTKVKYVTEGMRKPAFLSGEQKKAIVDLLFKTNRKVTVKQLKEDYFKKIECFDSVEISGVEDRFNASLGTYHDLLKIIKDKDFLDNEENEDILEDIVLTLTLFEDREMIEERLKTYAHLFDDKVMKQLKRRRYTGWGRLSRKLINGIRDKQSGKTILDFLKSDGFANRNFMQLIHDDSLTFKEDIQKAQVSGQGDSLHEHIANLAGSPAIKKGILQTVKVVDELVKVMGRHKPENIVIEMARENQTTQKGQKNSRERMKRIEEGIKELGSQILKEHPVENTQLQNEKLYLYYLQNGRDMYVDQELDINRLSDYDVDHIVPQSFLKDDSIDNKVLTRSDKARGKSDNVPSEEVVKKMKNYWRQLLNAKLITQRKFDNLTKAERGGLSELDKAGFIKRQLVETRQITKHVAQILDSRMNTKYDENDKLIREVKVITLKSKLVSDFRKDFQFYKVREINNYHHAHDAYLNAVVGTALIKKYPKLESEFVYGDYKVYDVRKMIAKSEQEIGKATAKYFFYSNIMNFFKTEITLANGEIRKRPLIETNGETGEIVWDKGRDFATVRKVLSMPQVNIVKKTEVQTGGFSKESILPKRNSDKLIARKKDWDPKKYGGFDSPTVAYSVLVVAKVEKGKSKKLKSVKELLGITIMERSSFEKNPIDFLEAKGYKEVKKDLIIKLPKYSLFELENGRKRMLASAGELQKGNELALPSKYVNFLYLASHYEKLKGSPEDNEQKQLFVEQHKHYLDEIIEQISEFSKRVILADANLDKVLSAYNKHRDKPIREQAENIIHLFTLTNLGAPAAFKYFDTTIDRKRYTSTKEVLDATLIHQSITGLYETRIDLSQLGGDGGGGGGSGGGGSGGGGSGGTLNIEDEYRLHETSKEPDVPLGSTWLSDFPQAWAETGGMGLAVRQAPLIIPLKATSTPVSIKQYPMSQEARLGIKPHIQRLLDQGILVPCQSPWNTPLLPVKKPGTNDYRPVQDLREVNKRVEDIHPTVPNPYNLLSGLPPSHQWYTVLDLKDAFFCLRLHPTSQPLFAFEWRDPEMGISGQLTWTRLPQGFKNSPTLFNEALHRDLADFRIQHPDLILLQYVDDLLLAATSEQDCQRGTRALLQTLGNLGYRASAKKAQICQKQVKYLGYLLKEGQRWLTEARKETVMGQPTPKTPRQLREFLGKAGFCRLFIPGFAEMAAPLYPLTKPGTLFNWGPDQQKAYQEIKQALLTAPALGLPDLTKPFELFVDEKQGYAKGVLTQKLGPWRRPVAYLSKKLDPVAAGWPPCLRMVAAIAVLTKDAGKLTMGQPLVILAPHAVEALVKQPPDRWLSNARMTHYQAMLLDTDRVQFGPVVALNPATLLPLPEKEAPHDCLEILAETHGTRPDLTDQPIPDADYTWYTDGSSFLQEGQRRAGAAVTTETEVIWARALPAGTSAQRAELIALTQALKMAEGKKLNVYTDSRYAFATAHVHGEIYRRRGWLTSEGREIKNKNEILALLKALFLPKRLSIIHCPGHQKGNSAEARGNRMADQAAREAAMKAVLETSTLLAGKRTADGSEFEKRTADGSEFESPKKKAKVE

SEQ ID NO: 1043 - protein, 2094 aa, synthetic construct
MPAAKRVKLDGGDKKYSIGLDIGTNSVGWAVITDEYKVPSKKFKVLGNTDRHSIKKNLIGALLFDSGETAEATRLKRTARRRYTRRKNRICYLQEIFSNEMAKVDDSFFHRLEESFLVEEDKKHERHPIFGNIVDEVAYHEKYPTIYHLRKKLVDSTDKADLRLIYLALAHMIKFRGHFLIEGDLNPDNSDVDKLFIQLVQTYNQLFEENPINASGVDAKAILSARLSKSRRLENLIAQLPGEKKNGLFGNLIALSLGLTPNFKSNFDLAEDAKLQLSKDTYDDDLDNLLAQIGDQYADLFLAAKNLSDAILLSDILRVNTEITKAPLSASMIKRYDEHHQDLTLLKALVRQQLPEKYKEIFFDQSKNGYAGYIDGGASQEEFYKFIKPILEKMDGTEELLVKLNREDLLRKQRTFDNGSIPHQIHLGELHAILRRQEDFYPFLKDNREKIEKILTFRIPYYVGPLARGNSRFAWMTRKSEETITPWNFEEVVDKGASAQSFIERMTNFDKNLPNEKVLPKHSLLYEYFTVYNELTKVKYVTEGMRKPAFLSGEQKKAIVDLLFKTNRKVTVKQLKEDYFKKIECFDSVEISGVEDRFNASLGTYHDLLKIIKDKDFLDNEENEDILEDIVLTLTLFEDREMIEERLKTYAHLFDDKVMKQLKRRRYTGWGRLSRKLINGIRDKQSGKTILDFLKSDGFANRNFMQLIHDDSLTFKEDIQKAQVSGQGDSLHEHIANLAGSPAIKKGILQTVKVVDELVKVMGRHKPENIVIEMARENQTTQKGQKNSRERMKRIEEGIKELGSQILKEHPVENTQLQNEKLYLYYLQNGRDMYVDQELDINRLSDYDVDHIVPQSFLKDDSIDNKVLTRSDKARGKSDNVPSEEVVKKMKNYWRQLLNAKLITQRKFDNLTKAERGGLSELDKAGFIKRQLVETRQITKHVAQILDSRMNTKYDENDKLIREVKVITLKSKLVSDFRKDFQFYKVREINNYHHAHDAYLNAVVGTALIKKYPKLESEFVYGDYKVYDVRKMIAKSEQEIGKATAKYFFYSNIMNFFKTEITLANGEIRKRPLIETNGETGEIVWDKGRDFATVRKVLSMPQVNIVKKTEVQTGGFSKESILPKRNSDKLIARKKDWDPKKYGGFDSPTVAYSVLVVAKVEKGKSKKLKSVKELLGITIMERSSFEKNPIDFLEAKGYKEVKKDLIIKLPKYSLFELENGRKRMLASAGELQKGNELALPSKYVNFLYLASHYEKLKGSPEDNEQKQLFVEQHKHYLDEIIEQISEFSKRVILADANLDKVLSAYNKHRDKPIREQAENIIHLFTLTNLGAPAAFKYFDTTIDRKRYTSTKEVLDATLIHQSITGLYETRIDLSQLGGDGGPAPGSSGGSGGTLNIEDEYRLHETSKEPDVPLGSTWLSDFPQAWAETGGMGLAVRQAPLIIPLKATSTPVSIKQYPMSQEARLGIKPHIQRLLDQGILVPCQSPWNTPLLPVKKPGTNDYRPVQDLREVNKRVEDIHPTVPNPYNLLSGLPPSHQWYTVLDLKDAFFCLRLHPTSQPLFAFEWRDPEMGISGQLTWTRLPQGFKNSPTLFNEALHRDLADFRIQHPDLILLQYVDDLLLAATSEQDCQRGTRALLQTLGNLGYRASAKKAQICQKQVKYLGYLLKEGQRWLTEARKETVMGQPTPKTPRQLREFLGKAGFCRLFIPGFAEMAAPLYPLTKPGTLFNWGPDQQKAYQEIKQALLTAPALGLPDLTKPFELFVDEKQGYAKGVLTQKLGPWRRPVAYLSKKLDPVAAGWPPCLRMVAAIAVLTKDAGKLTMGQPLVILAPHAVEALVKQPPDRWLSNARMTHYQAMLLDTDRVQFGPVVALNPATLLPLPEKEAPHDCLEILAETHGTRPDLTDQPIPDADYTWYTDGSSFLQEGQRRAGAAVTTETEVIWARALPAGTSAQRAELIALTQALKMAEGKKLNVYTDSRYAFATAHVHGEIYRRRGWLTSEGREIKNKNEILALLKALFLPKRLSIIHCPGHQKGNSAEARGNRMADQAAREAAMKAVLETSTLLAGKRTADGSEFEKRTADGSEFESPKKKAKVE

SEQ ID NO: 1044 - protein, 2093 aa, synthetic construct
MPAAKRVKLDGGDKKYSIGLDIGTNSVGWAVITDEYKVPSKKFKVLGNTDRHSIKKNLIGALLFDSGETAEATRLKRTARRRYTRRKNRICYLQEIFSNEMAKVDDSFFHRLEESFLVEEDKKHERHPIFGNIVDEVAYHEKYPTIYHLRKKLVDSTDKADLRLIYLALAHMIKFRGHFLIEGDLNPDNSDVDKLFIQLVQTYNQLFEENPINASGVDAKAILSARLSKSRRLENLIAQLPGEKKNGLFGNLIALSLGLTPNFKSNFDLAEDAKLQLSKDTYDDDLDNLLAQIGDQYADLFLAAKNLSDAILLSDILRVNTEITKAPLSASMIKRYDEHHQDLTLLKALVRQQLPEKYKEIFFDQSKNGYAGYIDGGASQEEFYKFIKPILEKMDGTEELLVKLNREDLLRKQRTFDNGSIPHQIHLGELHAILRRQEDFYPFLKDNREKIEKILTFRIPYYVGPLARGNSRFAWMTRKSEETITPWNFEEVVDKGASAQSFIERMTNFDKNLPNEKVLPKHSLLYEYFTVYNELTKVKYVTEGMRKPAFLSGEQKKAIVDLLFKTNRKVTVKQLKEDYFKKIECFDSVEISGVEDRFNASLGTYHDLLKIIKDKDFLDNEENEDILEDIVLTLTLFEDREMIEERLKTYAHLFDDKVMKQLKRRRYTGWGRLSRKLINGIRDKQSGKTILDFLKSDGFANRNFMQLIHDDSLTFKEDIQKAQVSGQGDSLHEHIANLAGSPAIKKGILQTVKVVDELVKVMGRHKPENIVIEMARENQTTQKGQKNSRERMKRIEEGIKELGSQILKEHPVENTQLQNEKLYLYYLQNGRDMYVDQELDINRLSDYDVDHIVPQSFLKDDSIDNKVLTRSDKARGKSDNVPSEEVVKKMKNYWRQLLNAKLITQRKFDNLTKAERGGLSELDKAGFIKRQLVETRQITKHVAQILDSRMNTKYDENDKLIREVKVITLKSKLVSDFRKDFQFYKVREINNYHHAHDAYLNAVVGTALIKKYPKLESEFVYGDYKVYDVRKMIAKSEQEIGKATAKYFFYSNIMNFFKTEITLANGEIRKRPLIETNGETGEIVWDKGRDFATVRKVLSMPQVNIVKKTEVQTGGFSKESILPKRNSDKLIARKKDWDPKKYGGFDSPTVAYSVLVVAKVEKGKSKKLKSVKELLGITIMERSSFEKNPIDFLEAKGYKEVKKDLIIKLPKYSLFELENGRKRMLASAGELQKGNELALPSKYVNFLYLASHYEKLKGSPEDNEQKQLFVEQHKHYLDEIIEQISEFSKRVILADANLDKVLSAYNKHRDKPIREQAENIIHLFTLTNLGAPAAFKYFDTTIDRKRYTSTKEVLDATLIHQSITGLYETRIDLSQLGGDGGGGGEAAAKGGTLNIEDEYRLHETSKEPDVPLGSTWLSDFPQAWAETGGMGLAVRQAPLIIPLKATSTPVSIKQYPMSQEARLGIKPHIQRLLDQGILVPCQSPWNTPLLPVKKPGTNDYRPVQDLREVNKRVEDIHPTVPNPYNLLSGLPPSHQWYTVLDLKDAFFCLRLHPTSQPLFAFEWRDPEMGISGQLTWTRLPQGFKNSPTLFNEALHRDLADFRIQHPDLILLQYVDDLLLAATSEQDCQRGTRALLQTLGNLGYRASAKKAQICQKQVKYLGYLLKEGQRWLTEARKETVMGQPTPKTPRQLREFLGKAGFCRLFIPGFAEMAAPLYPLTKPGTLFNWGPDQQKAYQEIKQALLTAPALGLPDLTKPFELFVDEKQGYAKGVLTQKLGPWRRPVAYLSKKLDPVAAGWPPCLRMVAAIAVLTKDAGKLTMGQPLVILAPHAVEALVKQPPDRWLSNARMTHYQAMLLDTDRVQFGPVVALNPATLLPLPEKEAPHDCLEILAETHGTRPDLTDQPIPDADYTWYTDGSSFLQEGQRRAGAAVTTETEVIWARALPAGTSAQRAELIALTQALKMAEGKKLNVYTDSRYAFATAHVHGEIYRRRGWLTSEGREIKNKNEILALLKALFLPKRLSIIHCPGHQKGNSAEARGNRMADQAAREAAMKAVLETSTLLAGKRTADGSEFEKRTADGSEFESPKKKAKVE

SEQ ID NO: 1045 - protein, 2100 aa, synthetic construct
MPAAKRVKLDGGDKKYSIGLDIGTNSVGWAVITDEYKVPSKKFKVLGNTDRHSIKKNLIGALLFDSGETAEATRLKRTARRRYTRRKNRICYLQEIFSNEMAKVDDSFFHRLEESFLVEEDKKHERHPIFGNIVDEVAYHEKYPTIYHLRKKLVDSTDKADLRLIYLALAHMIKFRGHFLIEGDLNPDNSDVDKLFIQLVQTYNQLFEENPINASGVDAKAILSARLSKSRRLENLIAQLPGEKKNGLFGNLIALSLGLTPNFKSNFDLAEDAKLQLSKDTYDDDLDNLLAQIGDQYADLFLAAKNLSDAILLSDILRVNTEITKAPLSASMIKRYDEHHQDLTLLKALVRQQLPEKYKEIFFDQSKNGYAGYIDGGASQEEFYKFIKPILEKMDGTEELLVKLNREDLLRKQRTFDNGSIPHQIHLGELHAILRRQEDFYPFLKDNREKIEKILTFRIPYYVGPLARGNSRFAWMTRKSEETITPWNFEEVVDKGASAQSFIERMTNFDKNLPNEKVLPKHSLLYEYFTVYNELTKVKYVTEGMRKPAFLSGEQKKAIVDLLFKTNRKVTVKQLKEDYFKKIECFDSVEISGVEDRFNASLGTYHDLLKIIKDKDFLDNEENEDILEDIVLTLTLFEDREMIEERLKTYAHLFDDKVMKQLKRRRYTGWGRLSRKLINGIRDKQSGKTILDFLKSDGFANRNFMQLIHDDSLTFKEDIQKAQVSGQGDSLHEHIANLAGSPAIKKGILQTVKVVDELVKVMGRHKPENIVIEMARENQTTQKGQKNSRERMKRIEEGIKELGSQILKEHPVENTQLQNEKLYLYYLQNGRDMYVDQELDINRLSDYDVDHIVPQSFLKDDSIDNKVLTRSDKARGKSDNVPSEEVVKKMKNYWRQLLNAKLITQRKFDNLTKAERGGLSELDKAGFIKRQLVETRQITKHVAQILDSRMNTKYDENDKLIREVKVITLKSKLVSDFRKDFQFYKVREINNYHHAHDAYLNAVVGTALIKKYPKLESEFVYGDYKVYDVRKMIAKSEQEIGKATAKYFFYSNIMNFFKTEITLANGEIRKRPLIETNGETGEIVWDKGRDFATVRKVLSMPQVNIVKKTEVQTGGFSKESILPKRNSDKLIARKKDWDPKKYGGFDSPTVAYSVLVVAKVEKGKSKKLKSVKELLGITIMERSSFEKNPIDFLEAKGYKEVKKDLIIKLPKYSLFELENGRKRMLASAGELQKGNELALPSKYVNFLYLASHYEKLKGSPEDNEQKQLFVEQHKHYLDEIIEQISEFSKRVILADANLDKVLSAYNKHRDKPIREQAENIIHLFTLTNLGAPAAFKYFDTTIDRKRYTSTKEVLDATLIHQSITGLYETRIDLSQLGGDGGGSSGSSGSSGSSGSSGGTLNIEDEYRLHETSKEPDVPLGSTWLSDFPQAWAETGGMGLAVRQAPLIIPLKATSTPVSIKQYPMSQEARLGIKPHIQRLLDQGILVPCQSPWNTPLLPVKKPGTNDYRPVQDLREVNKRVEDIHPTVPNPYNLLSGLPPSHQWYTVLDLKDAFFCLRLHPTSQPLFAFEWRDPEMGISGQLTWTRLPQGFKNSPTLFNEALHRDLADFRIQHPDLILLQYVDDLLLAATSEQDCQRGTRALLQTLGNLGYRASAKKAQICQKQVKYLGYLLKEGQRWLTEARKETVMGQPTPKTPRQLREFLGKAGFCRLFIPGFAEMAAPLYPLTKPGTLFNWGPDQQKAYQEIKQALLTAPALGLPDLTKPFELFVDEKQGYAKGVLTQKLGPWRRPVAYLSKKLDPVAAGWPPCLRMVAAIAVLTKDAGKLTMGQPLVILAPHAVEALVKQPPDRWLSNARMTHYQAMLLDTDRVQFGPVVALNPATLLPLPEKEAPHDCLEILAETHGTRPDLTDQPIPDADYTWYTDGSSFLQEGQRRAGAAVTTETEVIWARALPAGTSAQRAELIALTQALKMAEGKKLNVYTDSRYAFATAHVHGEIYRRRGWLTSEGREIKNKNEILALLKALFLPKRLSIIHCPGHQKGNSAEARGNRMADQAAREAAMKAVLETSTLLAGKRTADGSEFEKRTADGSEFESPKKKAKVE

SEQ ID NO: 1046 - protein, 2096 aa, synthetic construct
MPAAKRVKLDGGDKKYSIGLDIGTNSVGWAVITDEYKVPSKKFKVLGNTDRHSIKKNLIGALLFDSGETAEATRLKRTARRRYTRRKNRICYLQEIFSNEMAKVDDSFFHRLEESFLVEEDKKHERHPIFGNIVDEVAYHEKYPTIYHLRKKLVDSTDKADLRLIYLALAHMIKFRGHFLIEGDLNPDNSDVDKLFIQLVQTYNQLFEENPINASGVDAKAILSARLSKSRRLENLIAQLPGEKKNGLFGNLIALSLGLTPNFKSNFDLAEDAKLQLSKDTYDDDLDNLLAQIGDQYADLFLAAKNLSDAILLSDILRVNTEITKAPLSASMIKRYDEHHQDLTLLKALVRQQLPEKYKEIFFDQSKNGYAGYIDGGASQEEFYKFIKPILEKMDGTEELLVKLNREDLLRKQRTFDNGSIPHQIHLGELHAILRRQEDFYPFLKDNREKIEKILTFRIPYYVGPLARGNSRFAWMTRKSEETITPWNFEEVVDKGASAQSFIERMTNFDKNLPNEKVLPKHSLLYEYFTVYNELTKVKYVTEGMRKPAFLSGEQKKAIVDLLFKTNRKVTVKQLKEDYFKKIECFDSVEISGVEDRFNASLGTYHDLLKIIKDKDFLDNEENEDILEDIVLTLTLFEDREMIEERLKTYAHLFDDKVMKQLKRRRYTGWGRLSRKLINGIRDKQSGKTILDFLKSDGFANRNFMQLIHDDSLTFKEDIQKAQVSGQGDSLHEHIANLAGSPAIKKGILQTVKVVDELVKVMGRHKPENIVIEMARENQTTQKGQKNSRERMKRIEEGIKELGSQILKEHPVENTQLQNEKLYLYYLQNGRDMYVDQELDINRLSDYDVDHIVPQSFLKDDSIDNKVLTRSDKARGKSDNVPSEEVVKKMKNYWRQLLNAKLITQRKFDNLTKAERGGLSELDKAGFIKRQLVETRQITKHVAQILDSRMNTKYDENDKLIREVKVITLKSKLVSDFRKDFQFYKVREINNYHHAHDAYLNAVVGTALIKKYPKLESEFVYGDYKVYDVRKMIAKSEQEIGKATAKYFFYSNIMNFFKTEITLANGEIRKRPLIETNGETGEIVWDKGRDFATVRKVLSMPQVNIVKKTEVQTGGFSKESILPKRNSDKLIARKKDWDPKKYGGFDSPTVAYSVLVVAKVEKGKSKKLKSVKELLGITIMERSSFEKNPIDFLEAKGYKEVKKDLIIKLPKYSLFELENGRKRMLASAGELQKGNELALPSKYVNFLYLASHYEKLKGSPEDNEQKQLFVEQHKHYLDEIIEQISEFSKRVILADANLDKVLSAYNKHRDKPIREQAENIIHLFTLTNLGAPAAFKYFDTTIDRKRYTSTKEVLDATLIHQSITGLYETRIDLSQLGGDGGGGSGGGEAAAKGGTLNIEDEYRLHETSKEPDVPLGSTWLSDFPQAWAETGGMGLAVRQAPLIIPLKATSTPVSIKQYPMSQEARLGIKPHIQRLLDQGILVPCQSPWNTPLLPVKKPGTNDYRPVQDLREVNKRVEDIHPTVPNPYNLLSGLPPSHQWYTVLDLKDAFFCLRLHPTSQPLFAFEWRDPEMGISGQLTWTRLPQGFKNSPTLFNEALHRDLADFRIQHPDLILLQYVDDLLLAATSEQDCQRGTRALLQTLGNLGYRASAKKAQICQKQVKYLGYLLKEGQRWLTEARKETVMGQPTPKTPRQLREFLGKAGFCRLFIPGFAEMAAPLYPLTKPGTLFNWGPDQQKAYQEIKQALLTAPALGLPDLTKPFELFVDEKQGYAKGVLTQKLGPWRRPVAYLSKKLDPVAAGWPPCLRMVAAIAVLTKDAGKLTMGQPLVILAPHAVEALVKQPPDRWLSNARMTHYQAMLLDTDRVQFGPVVALNPATLLPLPEKEAPHDCLEILAETHGTRPDLTDQPIPDADYTWYTDGSSFLQEGQRRAGAAVTTETEVIWARALPAGTSAQRAELIALTQALKMAEGKKLNVYTDSRYAFATAHVHGEIYRRRGWLTSEGREIKNKNEILALLKALFLPKRLSIIHCPGHQKGNSAEARGNRMADQAAREAAMKAVLETSTLLAGKRTADGSEFEKRTADGSEFESPKKKAKVE

SEQ ID NO: 1047 - protein, 2091 aa, synthetic construct
MPAAKRVKLDGGDKKYSIGLDIGTNSVGWAVITDEYKVPSKKFKVLGNTDRHSIKKNLIGALLFDSGETAEATRLKRTARRRYTRRKNRICYLQEIFSNEMAKVDDSFFHRLEESFLVEEDKKHERHPIFGNIVDEVAYHEKYPTIYHLRKKLVDSTDKADLRLIYLALAHMIKFRGHFLIEGDLNPDNSDVDKLFIQLVQTYNQLFEENPINASGVDAKAILSARLSKSRRLENLIAQLPGEKKNGLFGNLIALSLGLTPNFKSNFDLAEDAKLQLSKDTYDDDLDNLLAQIGDQYADLFLAAKNLSDAILLSDILRVNTEITKAPLSASMIKRYDEHHQDLTLLKALVRQQLPEKYKEIFFDQSKNGYAGYIDGGASQEEFYKFIKPILEKMDGTEELLVKLNREDLLRKQRTFDNGSIPHQIHLGELHAILRRQEDFYPFLKDNREKIEKILTFRIPYYVGPLARGNSRFAWMTRKSEETITPWNFEEVVDKGASAQSFIERMTNFDKNLPNEKVLPKHSLLYEYFTVYNELTKVKYVTEGMRKPAFLSGEQKKAIVDLLFKTNRKVTVKQLKEDYFKKIECFDSVEISGVEDRFNASLGTYHDLLKIIKDKDFLDNEENEDILEDIVLTLTLFEDREMIEERLKTYAHLFDDKVMKQLKRRRYTGWGRLSRKLINGIRDKQSGKTILDFLKSDGFANRNFMQLIHDDSLTFKEDIQKAQVSGQGDSLHEHIANLAGSPAIKKGILQTVKVVDELVKVMGRHKPENIVIEMARENQTTQKGQKNSRERMKRIEEGIKELGSQILKEHPVENTQLQNEKLYLYYLQNGRDMYVDQELDINRLSDYDVDHIVPQSFLKDDSIDNKVLTRSDKARGKSDNVPSEEVVKKMKNYWRQLLNAKLITQRKFDNLTKAERGGLSELDKAGFIKRQLVETRQITKHVAQILDSRMNTKYDENDKLIREVKVITLKSKLVSDFRKDFQFYKVREINNYHHAHDAYLNAVVGTALIKKYPKLESEFVYGDYKVYDVRKMIAKSEQEIGKATAKYFFYSNIMNFFKTEITLANGEIRKRPLIETNGETGEIVWDKGRDFATVRKVLSMPQVNIVKKTEVQTGGFSKESILPKRNSDKLIARKKDWDPKKYGGFDSPTVAYSVLVVAKVEKGKSKKLKSVKELLGITIMERSSFEKNPIDFLEAKGYKEVKKDLIIKLPKYSLFELENGRKRMLASAGELQKGNELALPSKYVNFLYLASHYEKLKGSPEDNEQKQLFVEQHKHYLDEIIEQISEFSKRVILADANLDKVLSAYNKHRDKPIREQAENIIHLFTLTNLGAPAAFKYFDTTIDRKRYTSTKEVLDATLIHQSITGLYETRIDLSQLGGDGGGSSGSSGGTLNIEDEYRLHETSKEPDVPLGSTWLSDFPQAWAETGGMGLAVRQAPLIIPLKATSTPVSIKQYPMSQEARLGIKPHIQRLLDQGILVPCQSPWNTPLLPVKKPGTNDYRPVQDLREVNKRVEDIHPTVPNPYNLLSGLPPSHQWYTVLDLKDAFFCLRLHPTSQPLFAFEWRDPEMGISGQLTWTRLPQGFKNSPTLFNEALHRDLADFRIQHPDLILLQYVDDLLLAATSEQDCQRGTRALLQTLGNLGYRASAKKAQICQKQVKYLGYLLKEGQRWLTEARKETVMGQPTPKTPRQLREFLGKAGFCRLFIPGFAEMAAPLYPLTKPGTLFNWGPDQQKAYQEIKQALLTAPALGLPDLTKPFELFVDEKQGYAKGVLTQKLGPWRRPVAYLSKKLDPVAAGWPPCLRMVAAIAVLTKDAGKLTMGQPLVILAPHAVEALVKQPPDRWLSNARMTHYQAMLLDTDRVQFGPVVALNPATLLPLPEKEAPHDCLEILAETHGTRPDLTDQPIPDADYTWYTDGSSFLQEGQRRAGAAVTTETEVIWARALPAGTSAQRAELIALTQALKMAEGKKLNVYTDSRYAFATAHVHGEIYRRRGWLTSEGREIKNKNEILALLKALFLPKRLSIIHCPGHQKGNSAEARGNRMADQAAREAAMKAVLETSTLLAGKRTADGSEFEKRTADGSEFESPKKKAKVE

SEQ ID NO: 1048 - protein, 2093 aa, synthetic construct
MPAAKRVKLDGGDKKYSIGLDIGTNSVGWAVITDEYKVPSKKFKVLGNTDRHSIKKNLIGALLFDSGETAEATRLKRTARRRYTRRKNRICYLQEIFSNEMAKVDDSFFHRLEESFLVEEDKKHERHPIFGNIVDEVAYHEKYPTIYHLRKKLVDSTDKADLRLIYLALAHMIKFRGHFLIEGDLNPDNSDVDKLFIQLVQTYNQLFEENPINASGVDAKAILSARLSKSRRLENLIAQLPGEKKNGLFGNLIALSLGLTPNFKSNFDLAEDAKLQLSKDTYDDDLDNLLAQIGDQYADLFLAAKNLSDAILLSDILRVNTEITKAPLSASMIKRYDEHHQDLTLLKALVRQQLPEKYKEIFFDQSKNGYAGYIDGGASQEEFYKFIKPILEKMDGTEELLVKLNREDLLRKQRTFDNGSIPHQIHLGELHAILRRQEDFYPFLKDNREKIEKILTFRIPYYVGPLARGNSRFAWMTRKSEETITPWNFEEVVDKGASAQSFIERMTNFDKNLPNEKVLPKHSLLYEYFTVYNELTKVKYVTEGMRKPAFLSGEQKKAIVDLLFKTNRKVTVKQLKEDYFKKIECFDSVEISGVEDRFNASLGTYHDLLKIIKDKDFLDNEENEDILEDIVLTLTLFEDREMIEERLKTYAHLFDDKVMKQLKRRRYTGWGRLSRKLINGIRDKQSGKTILDFLKSDGFANRNFMQLIHDDSLTFKEDIQKAQVSGQGDSLHEHIANLAGSPAIKKGILQTVKVVDELVKVMGRHKPENIVIEMARENQTTQKGQKNSRERMKRIEEGIKELGSQILKEHPVENTQLQNEKLYLYYLQNGRDMYVDQELDINRLSDYDVDHIVPQSFLKDDSIDNKVLTRSDKARGKSDNVPSEEVVKKMKNYWRQLLNAKLITQRKFDNLTKAERGGLSELDKAGFIKRQLVETRQITKHVAQILDSRMNTKYDENDKLIREVKVITLKSKLVSDFRKDFQFYKVREINNYHHAHDAYLNAVVGTALIKKYPKLESEFVYGDYKVYDVRKMIAKSEQEIGKATAKYFFYSNIMNFFKTEITLANGEIRKRPLIETNGETGEIVWDKGRDFATVRKVLSMPQVNIVKKTEVQTGGFSKESILPKRNSDKLIARKKDWDPKKYGGFDSPTVAYSVLVVAKVEKGKSKKLKSVKELLGITIMERSSFEKNPIDFLEAKGYKEVKKDLIIKLPKYSLFELENGRKRMLASAGELQKGNELALPSKYVNFLYLASHYEKLKGSPEDNEQKQLFVEQHKHYLDEIIEQISEFSKRVILADANLDKVLSAYNKHRDKPIREQAENIIHLFTLTNLGAPAAFKYFDTTIDRKRYTSTKEVLDATLIHQSITGLYETRIDLSQLGGDGGEAAAKPAPGGTLNIEDEYRLHETSKEPDVPLGSTWLSDFPQAWAETGGMGLAVRQAPLIIPLKATSTPVSIKQYPMSQEARLGIKPHIQRLLDQGILVPCQSPWNTPLLPVKKPGTNDYRPVQDLREVNKRVEDIHPTVPNPYNLLSGLPPSHQWYTVLDLKDAFFCLRLHPTSQPLFAFEWRDPEMGISGQLTWTRLPQGFKNSPTLFNEALHRDLADFRIQHPDLILLQYVDDLLLAATSEQDCQRGTRALLQTLGNLGYRASAKKAQICQKQVKYLGYLLKEGQRWLTEARKETVMGQPTPKTPRQLREFLGKAGFCRLFIPGFAEMAAPLYPLTKPGTLFNWGPDQQKAYQEIKQALLTAPALGLPDLTKPFELFVDEKQGYAKGVLTQKLGPWRRPVAYLSKKLDPVAAGWPPCLRMVAAIAVLTKDAGKLTMGQPLVILAPHAVEALVKQPPDRWLSNARMTHYQAMLLDTDRVQFGPVVALNPATLLPLPEKEAPHDCLEILAETHGTRPDLTDQPIPDADYTWYTDGSSFLQEGQRRAGAAVTTETEVIWARALPAGTSAQRAELIALTQALKMAEGKKLNVYTDSRYAFATAHVHGEIYRRRGWLTSEGREIKNKNEILALLKALFLPKRLSIIHCPGHQKGNSAEARGNRMADQAAREAAMKAVLETSTLLAGKRTADGSEFEKRTADGSEFESPKKKAKVE

SEQ ID NO: 1049 - protein, 2105 aa, synthetic construct
MPAAKRVKLDGGDKKYSIGLDIGTNSVGWAVITDEYKVPSKKFKVLGNTDRHSIKKNLIGALLFDSGETAEATRLKRTARRRYTRRKNRICYLQEIFSNEMAKVDDSFFHRLEESFLVEEDKKHERHPIFGNIVDEVAYHEKYPTIYHLRKKLVDSTDKADLRLIYLALAHMIKFRGHFLIEGDLNPDNSDVDKLFIQLVQTYNQLFEENPINASGVDAKAILSARLSKSRRLENLIAQLPGEKKNGLFGNLIALSLGLTPNFKSNFDLAEDAKLQLSKDTYDDDLDNLLAQIGDQYADLFLAAKNLSDAILLSDILRVNTEITKAPLSASMIKRYDEHHQDLTLLKALVRQQLPEKYKEIFFDQSKNGYAGYIDGGASQEEFYKFIKPILEKMDGTEELLVKLNREDLLRKQRTFDNGSIPHQIHLGELHAILRRQEDFYPFLKDNREKIEKILTFRIPYYVGPLARGNSRFAWMTRKSEETITPWNFEEVVDKGASAQSFIERMTNFDKNLPNEKVLPKHSLLYEYFTVYNELTKVKYVTEGMRKPAFLSGEQKKAIVDLLFKTNRKVTVKQLKEDYFKKIECFDSVEISGVEDRFNASLGTYHDLLKIIKDKDFLDNEENEDILEDIVLTLTLFEDREMIEERLKTYAHLFDDKVMKQLKRRRYTGWGRLSRKLINGIRDKQSGKTILDFLKSDGFANRNFMQLIHDDSLTFKEDIQKAQVSGQGDSLHEHIANLAGSPAIKKGILQTVKVVDELVKVMGRHKPENIVIEMARENQTTQKGQKNSRERMKRIEEGIKELGSQILKEHPVENTQLQNEKLYLYYLQNGRDMYVDQELDINRLSDYDVDHIVPQSFLKDDSIDNKVLTRSDKARGKSDNVPSEEVVKKMKNYWRQLLNAKLITQRKFDNLTKAERGGLSELDKAGFIKRQLVETRQITKHVAQILDSRMNTKYDENDKLIREVKVITLKSKLVSDFRKDFQFYKVREINNYHHAHDAYLNAVVGTALIKKYPKLESEFVYGDYKVYDVRKMIAKSEQEIGKATAKYFFYSNIMNFFKTEITLANGEIRKRPLIETNGETGEIVWDKGRDFATVRKVLSMPQVNIVKKTEVQTGGFSKESILPKRNSDKLIARKKDWDPKKYGGFDSPTVAYSVLVVAKVEKGKSKKLKSVKELLGITIMERSSFEKNPIDFLEAKGYKEVKKDLIIKLPKYSLFELENGRKRMLASAGELQKGNELALPSKYVNFLYLASHYEKLKGSPEDNEQKQLFVEQHKHYLDEIIEQISEFSKRVILADANLDKVLSAYNKHRDKPIREQAENIIHLFTLTNLGAPAAFKYFDTTIDRKRYTSTKEVLDATLIHQSITGLYETRIDLSQLGGDGGGGGGSGGGGSGGGGSGGGGSGGTLNIEDEYRLHETSKEPDVPLGSTWLSDFPQAWAETGGMGLAVRQAPLIIPLKATSTPVSIKQYPMSQEARLGIKPHIQRLLDQGILVPCQSPWNTPLLPVKKPGTNDYRPVQDLREVNKRVEDIHPTVPNPYNLLSGLPPSHQWYTVLDLKDAFFCLRLHPTSQPLFAFEWRDPEMGISGQLTWTRLPQGFKNSPTLFNEALHRDLADFRIQHPDLILLQYVDDLLLAATSEQDCQRGTRALLQTLGNLGYRASAKKAQICQKQVKYLGYLLKEGQRWLTEARKETVMGQPTPKTPRQLREFLGKAGFCRLFIPGFAEMAAPLYPLTKPGTLFNWGPDQQKAYQEIKQALLTAPALGLPDLTKPFELFVDEKQGYAKGVLTQKLGPWRRPVAYLSKKLDPVAAGWPPCLRMVAAIAVLTKDAGKLTMGQPLVILAPHAVEALVKQPPDRWLSNARMTHYQAMLLDTDRVQFGPVVALNPATLLPLPEKEAPHDCLEILAETHGTRPDLTDQPIPDADYTWYTDGSSFLQEGQRRAGAAVTTETEVIWARALPAGTSAQRAELIALTQALKMAEGKKLNVYTDSRYAFATAHVHGEIYRRRGWLTSEGREIKNKNEILALLKALFLPKRLSIIHCPGHQKGNSAEARGNRMADQAAREAAMKAVLETSTLLAGKRTADGSEFEKRTADGSEFESPKKKAKVE

SEQ ID NO: 1050 - protein, 2093 aa, synthetic construct
MPAAKRVKLDGGDKKYSIGLDIGTNSVGWAVITDEYKVPSKKFKVLGNTDRHSIKKNLIGALLFDSGETAEATRLKRTARRRYTRRKNRICYLQEIFSNEMAKVDDSFFHRLEESFLVEEDKKHERHPIFGNIVDEVAYHEKYPTIYHLRKKLVDSTDKADLRLIYLALAHMIKFRGHFLIEGDLNPDNSDVDKLFIQLVQTYNQLFEENPINASGVDAKAILSARLSKSRRLENLIAQLPGEKKNGLFGNLIALSLGLTPNFKSNFDLAEDAKLQLSKDTYDDDLDNLLAQIGDQYADLFLAAKNLSDAILLSDILRVNTEITKAPLSASMIKRYDEHHQDLTLLKALVRQQLPEKYKEIFFDQSKNGYAGYIDGGASQEEFYKFIKPILEKMDGTEELLVKLNREDLLRKQRTFDNGSIPHQIHLGELHAILRRQEDFYPFLKDNREKIEKILTFRIPYYVGPLARGNSRFAWMTRKSEETITPWNFEEVVDKGASAQSFIERMTNFDKNLPNEKVLPKHSLLYEYFTVYNELTKVKYVTEGMRKPAFLSGEQKKAIVDLLFKTNRKVTVKQLKEDYFKKIECFDSVEISGVEDRFNASLGTYHDLLKIIKDKDFLDNEENEDILEDIVLTLTLFEDREMIEERLKTYAHLFDDKVMKQLKRRRYTGWGRLSRKLINGIRDKQSGKTILDFLKSDGFANRNFMQLIHDDSLTFKEDIQKAQVSGQGDSLHEHIANLAGSPAIKKGILQTVKVVDELVKVMGRHKPENIVIEMARENQTTQKGQKNSRERMKRIEEGIKELGSQILKEHPVENTQLQNEKLYLYYLQNGRDMYVDQELDINRLSDYDVDHIVPQSFLKDDSIDNKVLTRSDKARGKSDNVPSEEVVKKMKNYWRQLLNAKLITQRKFDNLTKAERGGLSELDKAGFIKRQLVETRQITKHVAQILDSRMNTKYDENDKLIREVKVITLKSKLVSDFRKDFQFYKVREINNYHHAHDAYLNAVVGTALIKKYPKLESEFVYGDYKVYDVRKMIAKSEQEIGKATAKYFFYSNIMNFFKTEITLANGEIRKRPLIETNGETGEIVWDKGRDFATVRKVLSMPQVNIVKKTEVQTGGFSKESILPKRNSDKLIARKKDWDPKKYGGFDSPTVAYSVLVVAKVEKGKSKKLKSVKELLGITIMERSSFEKNPIDFLEAKGYKEVKKDLIIKLPKYSLFELENGRKRMLASAGELQKGNELALPSKYVNFLYLASHYEKLKGSPEDNEQKQLFVEQHKHYLDEIIEQISEFSKRVILADANLDKVLSAYNKHRDKPIREQAENIIHLFTLTNLGAPAAFKYFDTTIDRKRYTSTKEVLDATLIHQSITGLYETRIDLSQLGGDGGEAAAKGGGGGTLNIEDEYRLHETSKEPDVPLGSTWLSDFPQAWAETGGMGLAVRQAPLIIPLKATSTPVSIKQYPMSQEARLGIKPHIQRLLDQGILVPCQSPWNTPLLPVKKPGTNDYRPVQDLREVNKRVEDIHPTVPNPYNLLSGLPPSHQWYTVLDLKDAFFCLRLHPTSQPLFAFEWRDPEMGISGQLTWTRLPQGFKNSPTLFNEALHRDLADFRIQHPDLILLQYVDDLLLAATSEQDCQRGTRALLQTLGNLGYRASAKKAQICQKQVKYLGYLLKEGQRWLTEARKETVMGQPTPKTPRQLREFLGKAGFCRLFIPGFAEMAAPLYPLTKPGTLFNWGPDQQKAYQEIKQALLTAPALGLPDLTKPFELFVDEKQGYAKGVLTQKLGPWRRPVAYLSKKLDPVAAGWPPCLRMVAAIAVLTKDAGKLTMGQPLVILAPHAVEALVKQPPDRWLSNARMTHYQAMLLDTDRVQFGPVVALNPATLLPLPEKEAPHDCLEILAETHGTRPDLTDQPIPDADYTWYTDGSSFLQEGQRRAGAAVTTETEVIWARALPAGTSAQRAELIALTQALKMAEGKKLNVYTDSRYAFATAHVHGEIYRRRGWLTSEGREIKNKNEILALLKALFLPKRLSIIHCPGHQKGNSAEARGNRMADQAAREAAMKAVLETSTLLAGKRTADGSEFEKRTADGSEFESPKKKAKVE

SEQ ID NO: 1051 - protein, 2096 aa, synthetic construct
MPAAKRVKLDGGDKKYSIGLDIGTNSVGWAVITDEYKVPSKKFKVLGNTDRHSIKKNLIGALLFDSGETAEATRLKRTARRRYTRRKNRICYLQEIFSNEMAKVDDSFFHRLEESFLVEEDKKHERHPIFGNIVDEVAYHEKYPTIYHLRKKLVDSTDKADLRLIYLALAHMIKFRGHFLIEGDLNPDNSDVDKLFIQLVQTYNQLFEENPINASGVDAKAILSARLSKSRRLENLIAQLPGEKKNGLFGNLIALSLGLTPNFKSNFDLAEDAKLQLSKDTYDDDLDNLLAQIGDQYADLFLAAKNLSDAILLSDILRVNTEITKAPLSASMIKRYDEHHQDLTLLKALVRQQLPEKYKEIFFDQSKNGYAGYIDGGASQEEFYKFIKPILEKMDGTEELLVKLNREDLLRKQRTFDNGSIPHQIHLGELHAILRRQEDFYPFLKDNREKIEKILTFRIPYYVGPLARGNSRFAWMTRKSEETITPWNFEEVVDKGASAQSFIERMTNFDKNLPNEKVLPKHSLLYEYFTVYNELTKVKYVTEGMRKPAFLSGEQKKAIVDLLFKTNRKVTVKQLKEDYFKKIECFDSVEISGVEDRFNASLGTYHDLLKIIKDKDFLDNEENEDILEDIVLTLTLFEDREMIEERLKTYAHLFDDKVMKQLKRRRYTGWGRLSRKLINGIRDKQSGKTILDFLKSDGFANRNFMQLIHDDSLTFKEDIQKAQVSGQGDSLHEHIANLAGSPAIKKGILQTVKVVDELVKVMGRHKPENIVIEMARENQTTQKGQKNSRERMKRIEEGIKELGSQILKEHPVENTQLQNEKLYLYYLQNGRDMYVDQELDINRLSDYDVDHIVPQSFLKDDSIDNKVLTRSDKARGKSDNVPSEEVVKKMKNYWRQLLNAKLITQRKFDNLTKAERGGLSELDKAGFIKRQLVETRQITKHVAQILDSRMNTKYDENDKLIREVKVITLKSKLVSDFRKDFQFYKVREINNYHHAHDAYLNAVVGTALIKKYPKLESEFVYGDYKVYDVRKMIAKSEQEIGKATAKYFFYSNIMNFFKTEITLANGEIRKRPLIETNGETGEIVWDKGRDFATVRKVLSMPQVNIVKKTEVQTGGFSKESILPKRNSDKLIARKKDWDPKKYGGFDSPTVAYSVLVVAKVEKGKSKKLKSVKELLGITIMERSSFEKNPIDFLEAKGYKEVKKDLIIKLPKYSLFELENGRKRMLASAGELQKGNELALPSKYVNFLYLASHYEKLKGSPEDNEQKQLFVEQHKHYLDEIIEQISEFSKRVILADANLDKVLSAYNKHRDKPIREQAENIIHLFTLTNLGAPAAFKYFDTTIDRKRYTSTKEVLDATLIHQSITGLYETRIDLSQLGGDGGEAAAKGGSGGGGGTLNIEDEYRLHETSKEPDVPLGSTWLSDFPQAWAETGGMGLAVRQAPLIIPLKATSTPVSIKQYPMSQEARLGIKPHIQRLLDQGILVPCQSPWNTPLLPVKKPGTNDYRPVQDLREVNKRVEDIHPTVPNPYNLLSGLPPSHQWYTVLDLKDAFFCLRLHPTSQPLFAFEWRDPEMGISGQLTWTRLPQGFKNSPTLFNEALHRDLADFRIQHPDLILLQYVDDLLLAATSEQDCQRGTRALLQTLGNLGYRASAKKAQICQKQVKYLGYLLKEGQRWLTEARKETVMGQPTPKTPRQLREFLGKAGFCRLFIPGFAEMAAPLYPLTKPGTLFNWGPDQQKAYQEIKQALLTAPALGLPDLTKPFELFVDEKQGYAKGVLTQKLGPWRRPVAYLSKKLDPVAAGWPPCLRMVAAIAVLTKDAGKLTMGQPLVILAPHAVEALVKQPPDRWLSNARMTHYQAMLLDTDRVQFGPVVALNPATLLPLPEKEAPHDCLEILAETHGTRPDLTDQPIPDADYTWYTDGSSFLQEGQRRAGAAVTTETEVIWARALPAGTSAQRAELIALTQALKMAEGKKLNVYTDSRYAFATAHVHGEIYRRRGWLTSEGREIKNKNEILALLKALFLPKRLSIIHCPGHQKGNSAEARGNRMADQAAREAAMKAVLETSTLLAGKRTADGSEFEKRTADGSEFESPKKKAKVE

SEQ ID NO: 1052 - protein, 2115 aa, synthetic construct
MPAAKRVKLDGGDKKYSIGLDIGTNSVGWAVITDEYKVPSKKFKVLGNTDRHSIKKNLIGALLFDSGETAEATRLKRTARRRYTRRKNRICYLQEIFSNEMAKVDDSFFHRLEESFLVEEDKKHERHPIFGNIVDEVAYHEKYPTIYHLRKKLVDSTDKADLRLIYLALAHMIKFRGHFLIEGDLNPDNSDVDKLFIQLVQTYNQLFEENPINASGVDAKAILSARLSKSRRLENLIAQLPGEKKNGLFGNLIALSLGLTPNFKSNFDLAEDAKLQLSKDTYDDDLDNLLAQIGDQYADLFLAAKNLSDAILLSDILRVNTEITKAPLSASMIKRYDEHHQDLTLLKALVRQQLPEKYKEIFFDQSKNGYAGYIDGGASQEEFYKFIKPILEKMDGTEELLVKLNREDLLRKQRTFDNGSIPHQIHLGELHAILRRQEDFYPFLKDNREKIEKILTFRIPYYVGPLARGNSRFAWMTRKSEETITPWNFEEVVDKGASAQSFIERMTNFDKNLPNEKVLPKHSLLYEYFTVYNELTKVKYVTEGMRKPAFLSGEQKKAIVDLLFKTNRKVTVKQLKEDYFKKIECFDSVEISGVEDRFNASLGTYHDLLKIIKDKDFLDNEENEDILEDIVLTLTLFEDREMIEERLKTYAHLFDDKVMKQLKRRRYTGWGRLSRKLINGIRDKQSGKTILDFLKSDGFANRNFMQLIHDDSLTFKEDIQKAQVSGQGDSLHEHIANLAGSPAIKKGILQTVKVVDELVKVMGRHKPENIVIEMARENQTTQKGQKNSRERMKRIEEGIKELGSQILKEHPVENTQLQNEKLYLYYLQNGRDMYVDQELDINRLSDYDVDHIVPQSFLKDDSIDNKVLTRSDKARGKSDNVPSEEVVKKMKNYWRQLLNAKLITQRKFDNLTKAERGGLSELDKAGFIKRQLVETRQITKHVAQILDSRMNTKYDENDKLIREVKVITLKSKLVSDFRKDFQFYKVREINNYHHAHDAYLNAVVGTALIKKYPKLESEFVYGDYKVYDVRKMIAKSEQEIGKATAKYFFYSNIMNFFKTEITLANGEIRKRPLIETNGETGEIVWDKGRDFATVRKVLSMPQVNIVKKTEVQTGGFSKESILPKRNSDKLIARKKDWDPKKYGGFDSPTVAYSVLVVAKVEKGKSKKLKSVKELLGITIMERSSFEKNPIDFLEAKGYKEVKKDLIIKLPKYSLFELENGRKRMLASAGELQKGNELALPSKYVNFLYLASHYEKLKGSPEDNEQKQLFVEQHKHYLDEIIEQISEFSKRVILADANLDKVLSAYNKHRDKPIREQAENIIHLFTLTNLGAPAAFKYFDTTIDRKRYTSTKEVLDATLIHQSITGLYETRIDLSQLGGDGGEAAAKEAAAKEAAAKEAAAKEAAAKEAAAKGGTLNIEDEYRLHETSKEPDVPLGSTWLSDFPQAWAETGGMGLAVRQAPLIIPLKATSTPVSIKQYPMSQEARLGIKPHIQRLLDQGILVPCQSPWNTPLLPVKKPGTNDYRPVQDLREVNKRVEDIHPTVPNPYNLLSGLPPSHQWYTVLDLKDAFFCLRLHPTSQPLFAFEWRDPEMGISGQLTWTRLPQGFKNSPTLFNEALHRDLADFRIQHPDLILLQYVDDLLLAATSEQDCQRGTRALLQTLGNLGYRASAKKAQICQKQVKYLGYLLKEGQRWLTEARKETVMGQPTPKTPRQLREFLGKAGFCRLFIPGFAEMAAPLYPLTKPGTLFNWGPDQQKAYQEIKQALLTAPALGLPDLTKPFELFVDEKQGYAKGVLTQKLGPWRRPVAYLSKKLDPVAAGWPPCLRMVAAIAVLTKDAGKLTMGQPLVILAPHAVEALVKQPPDRWLSNARMTHYQAMLLDTDRVQFGPVVALNPATLLPLPEKEAPHDCLEILAETHGTRPDLTDQPIPDADYTWYTDGSSFLQEGQRRAGAAVTTETEVIWARALPAGTSAQRAELIALTQALKMAEGKKLNVYTDSRYAFATAHVHGEIYRRRGWLTSEGREIKNKNEILALLKALFLPKRLSIIHCPGHQKGNSAEARGNRMADQAAREAAMKAVLETSTLLAGKRTADGSEFEKRTADGSEFESPKKKAKVE

SEQ ID NO: 1053 - protein, 2096 aa, synthetic construct
MPAAKRVKLDGGDKKYSIGLDIGTNSVGWAVITDEYKVPSKKFKVLGNTDRHSIKKNLIGALLFDSGETAEATRLKRTARRRYTRRKNRICYLQEIFSNEMAKVDDSFFHRLEESFLVEEDKKHERHPIFGNIVDEVAYHEKYPTIYHLRKKLVDSTDKADLRLIYLALAHMIKFRGHFLIEGDLNPDNSDVDKLFIQLVQTYNQLFEENPINASGVDAKAILSARLSKSRRLENLIAQLPGEKKNGLFGNLIALSLGLTPNFKSNFDLAEDAKLQLSKDTYDDDLDNLLAQIGDQYADLFLAAKNLSDAILLSDILRVNTEITKAPLSASMIKRYDEHHQDLTLLKALVRQQLPEKYKEIFFDQSKNGYAGYIDGGASQEEFYKFIKPILEKMDGTEELLVKLNREDLLRKQRTFDNGSIPHQIHLGELHAILRRQEDFYPFLKDNREKIEKILTFRIPYYVGPLARGNSRFAWMTRKSEETITPWNFEEVVDKGASAQSFIERMTNFDKNLPNEKVLPKHSLLYEYFTVYNELTKVKYVTEGMRKPAFLSGEQKKAIVDLLFKTNRKVTVKQLKEDYFKKIECFDSVEISGVEDRFNASLGTYHDLLKIIKDKDFLDNEENEDILEDIVLTLTLFEDREMIEERLKTYAHLFDDKVMKQLKRRRYTGWGRLSRKLINGIRDKQSGKTILDFLKSDGFANRNFMQLIHDDSLTFKEDIQKAQVSGQGDSLHEHIANLAGSPAIKKGILQTVKVVDELVKVMGRHKPENIVIEMARENQTTQKGQKNSRERMKRIEEGIKELGSQILKEHPVENTQLQNEKLYLYYLQNGRDMYVDQELDINRLSDYDVDHIVPQSFLKDDSIDNKVLTRSDKARGKSDNVPSEEVVKKMKNYWRQLLNAKLITQRKFDNLTKAERGGLSELDKAGFIKRQLVETRQITKHVAQILDSRMNTKYDENDKLIREVKVITLKSKLVSDFRKDFQFYKVREINNYHHAHDAYLNAVVGTALIKKYPKLESEFVYGDYKVYDVRKMIAKSEQEIGKATAKYFFYSNIMNFFKTEITLANGEIRKRPLIETNGETGEIVWDKGRDFATVRKVLSMPQVNIVKKTEVQTGGFSKESILPKRNSDKLIARKKDWDPKKYGGFDSPTVAYSVLVVAKVEKGKSKKLKSVKELLGITIMERSSFEKNPIDFLEAKGYKEVKKDLIIKLPKYSLFELENGRKRMLASAGELQKGNELALPSKYVNFLYLASHYEKLKGSPEDNEQKQLFVEQHKHYLDEIIEQISEFSKRVILADANLDKVLSAYNKHRDKPIREQAENIIHLFTLTNLGAPAAFKYFDTTIDRKRYTSTKEVLDATLIHQSITGLYETRIDLSQLGGDGGGGGGSSEAAAKGGTLNIEDEYRLHETSKEPDVPLGSTWLSDFPQAWAETGGMGLAVRQAPLIIPLKATSTPVSIKQYPMSQEARLGIKPHIQRLLDQGILVPCQSPWNTPLLPVKKPGTNDYRPVQDLREVNKRVEDIHPTVPNPYNLLSGLPPSHQWYTVLDLKDAFFCLRLHPTSQPLFAFEWRDPEMGISGQLTWTRLPQGFKNSPTLFNEALHRDLADFRIQHPDLILLQYVDDLLLAATSEQDCQRGTRALLQTLGNLGYRASAKKAQICQKQVKYLGYLLKEGQRWLTEARKETVMGQPTPKTPRQLREFLGKAGFCRLFIPGFAEMAAPLYPLTKPGTLFNWGPDQQKAYQEIKQALLTAPALGLPDLTKPFELFVDEKQGYAKGVLTQKLGPWRRPVAYLSKKLDPVAAGWPPCLRMVAAIAVLTKDAGKLTMGQPLVILAPHAVEALVKQPPDRWLSNARMTHYQAMLLDTDRVQFGPVVALNPATLLPLPEKEAPHDCLEILAETHGTRPDLTDQPIPDADYTWYTDGSSFLQEGQRRAGAAVTTETEVIWARALPAGTSAQRAELIALTQALKMAEGKKLNVYTDSRYAFATAHVHGEIYRRRGWLTSEGREIKNKNEILALLKALFLPKRLSIIHCPGHQKGNSAEARGNRMADQAAREAAMKAVLETSTLLAGKRTADGSEFEKRTADGSEFESPKKKAKVE

SEQ ID NO: 1054 - protein, 2096 aa, synthetic construct
MPAAKRVKLDGGDKKYSIGLDIGTNSVGWAVITDEYKVPSKKFKVLGNTDRHSIKKNLIGALLFDSGETAEATRLKRTARRRYTRRKNRICYLQEIFSNEMAKVDDSFFHRLEESFLVEEDKKHERHPIFGNIVDEVAYHEKYPTIYHLRKKLVDSTDKADLRLIYLALAHMIKFRGHFLIEGDLNPDNSDVDKLFIQLVQTYNQLFEENPINASGVDAKAILSARLSKSRRLENLIAQLPGEKKNGLFGNLIALSLGLTPNFKSNFDLAEDAKLQLSKDTYDDDLDNLLAQIGDQYADLFLAAKNLSDAILLSDILRVNTEITKAPLSASMIKRYDEHHQDLTLLKALVRQQLPEKYKEIFFDQSKNGYAGYIDGGASQEEFYKFIKPILEKMDGTEELLVKLNREDLLRKQRTFDNGSIPHQIHLGELHAILRRQEDFYPFLKDNREKIEKILTFRIPYYVGPLARGNSRFAWMTRKSEETITPWNFEEVVDKGASAQSFIERMTNFDKNLPNEKVLPKHSLLYEYFTVYNELTKVKYVTEGMRKPAFLSGEQKKAIVDLLFKTNRKVTVKQLKEDYFKKIECFDSVEISGVEDRFNASLGTYHDLLKIIKDKDFLDNEENEDILEDIVLTLTLFEDREMIEERLKTYAHLFDDKVMKQLKRRRYTGWGRLSRKLINGIRDKQSGKTILDFLKSDGFANRNFMQLIHDDSLTFKEDIQKAQVSGQGDSLHEHIANLAGSPAIKKGILQTVKVVDELVKVMGRHKPENIVIEMARENQTTQKGQKNSRERMKRIEEGIKELGSQILKEHPVENTQLQNEKLYLYYLQNGRDMYVDQELDINRLSDYDVDHIVPQSFLKDDSIDNKVLTRSDKARGKSDNVPSEEVVKKMKNYWRQLLNAKLITQRKFDNLTKAERGGLSELDKAGFIKRQLVETRQITKHVAQILDSRMNTKYDENDKLIREVKVITLKSKLVSDFRKDFQFYKVREINNYHHAHDAYLNAVVGTALIKKYPKLESEFVYGDYKVYDVRKMIAKSEQEIGKATAKYFFYSNIMNFFKTEITLANGEIRKRPLIETNGETGEIVWDKGRDFATVRKVLSMPQVNIVKKTEVQTGGFSKESILPKRNSDKLIARKKDWDPKKYGGFDSPTVAYSVLVVAKVEKGKSKKLKSVKELLGITIMERSSFEKNPIDFLEAKGYKEVKKDLIIKLPKYSLFELENGRKRMLASAGELQKGNELALPSKYVNFLYLASHYEKLKGSPEDNEQKQLFVEQHKHYLDEIIEQISEFSKRVILADANLDKVLSAYNKHRDKPIREQAENIIHLFTLTNLGAPAAFKYFDTTIDRKRYTSTKEVLDATLIHQSITGLYETRIDLSQLGGDGGGSSGGGEAAAKGGTLNIEDEYRLHETSKEPDVPLGSTWLSDFPQAWAETGGMGLAVRQAPLIIPLKATSTPVSIKQYPMSQEARLGIKPHIQRLLDQGILVPCQSPWNTPLLPVKKPGTNDYRPVQDLREVNKRVEDIHPTVPNPYNLLSGLPPSHQWYTVLDLKDAFFCLRLHPTSQPLFAFEWRDPEMGISGQLTWTRLPQGFKNSPTLFNEALHRDLADFRIQHPDLILLQYVDDLLLAATSEQDCQRGTRALLQTLGNLGYRASAKKAQICQKQVKYLGYLLKEGQRWLTEARKETVMGQPTPKTPRQLREFLGKAGFCRLFIPGFAEMAAPLYPLTKPGTLFNWGPDQQKAYQEIKQALLTAPALGLPDLTKPFELFVDEKQGYAKGVLTQKLGPWRRPVAYLSKKLDPVAAGWPPCLRMVAAIAVLTKDAGKLTMGQPLVILAPHAVEALVKQPPDRWLSNARMTHYQAMLLDTDRVQFGPVVALNPATLLPLPEKEAPHDCLEILAETHGTRPDLTDQPIPDADYTWYTDGSSFLQEGQRRAGAAVTTETEVIWARALPAGTSAQRAELIALTQALKMAEGKKLNVYTDSRYAFATAHVHGEIYRRRGWLTSEGREIKNKNEILALLKALFLPKRLSIIHCPGHQKGNSAEARGNRMADQAAREAAMKAVLETSTLLAGKRTADGSEFEKRTADGSEFESPKKKAKVE

SEQ ID NO: 1055 - protein, 2094 aa, synthetic construct
MPAAKRVKLDGGDKKYSIGLDIGTNSVGWAVITDEYKVPSKKFKVLGNTDRHSIKKNLIGALLFDSGETAEATRLKRTARRRYTRRKNRICYLQEIFSNEMAKVDDSFFHRLEESFLVEEDKKHERHPIFGNIVDEVAYHEKYPTIYHLRKKLVDSTDKADLRLIYLALAHMIKFRGHFLIEGDLNPDNSDVDKLFIQLVQTYNQLFEENPINASGVDAKAILSARLSKSRRLENLIAQLPGEKKNGLFGNLIALSLGLTPNFKSNFDLAEDAKLQLSKDTYDDDLDNLLAQIGDQYADLFLAAKNLSDAILLSDILRVNTEITKAPLSASMIKRYDEHHQDLTLLKALVRQQLPEKYKEIFFDQSKNGYAGYIDGGASQEEFYKFIKPILEKMDGTEELLVKLNREDLLRKQRTFDNGSIPHQIHLGELHAILRRQEDFYPFLKDNREKIEKILTFRIPYYVGPLARGNSRFAWMTRKSEETITPWNFEEVVDKGASAQSFIERMTNFDKNLPNEKVLPKHSLLYEYFTVYNELTKVKYVTEGMRKPAFLSGEQKKAIVDLLFKTNRKVTVKQLKEDYFKKIECFDSVEISGVEDRFNASLGTYHDLLKIIKDKDFLDNEENEDILEDIVLTLTLFEDREMIEERLKTYAHLFDDKVMKQLKRRRYTGWGRLSRKLINGIRDKQSGKTILDFLKSDGFANRNFMQLIHDDSLTFKEDIQKAQVSGQGDSLHEHIANLAGSPAIKKGILQTVKVVDELVKVMGRHKPENIVIEMARENQTTQKGQKNSRERMKRIEEGIKELGSQILKEHPVENTQLQNEKLYLYYLQNGRDMYVDQELDINRLSDYDVDHIVPQSFLKDDSIDNKVLTRSDKARGKSDNVPSEEVVKKMKNYWRQLLNAKLITQRKFDNLTKAERGGLSELDKAGFIKRQLVETRQITKHVAQILDSRMNTKYDENDKLIREVKVITLKSKLVSDFRKDFQFYKVREINNYHHAHDAYLNAVVGTALIKKYPKLESEFVYGDYKVYDVRKMIAKSEQEIGKATAKYFFYSNIMNFFKTEITLANGEIRKRPLIETNGETGEIVWDKGRDFATVRKVLSMPQVNIVKKTEVQTGGFSKESILPKRNSDKLIARKKDWDPKKYGGFDSPTVAYSVLVVAKVEKGKSKKLKSVKELLGITIMERSSFEKNPIDFLEAKGYKEVKKDLIIKLPKYSLFELENGRKRMLASAGELQKGNELALPSKYVNFLYLASHYEKLKGSPEDNEQKQLFVEQHKHYLDEIIEQISEFSKRVILADANLDKVLSAYNKHRDKPIREQAENIIHLFTLTNLGAPAAFKYFDTTIDRKRYTSTKEVLDATLIHQSITGLYETRIDLSQLGGDGGGGSPAPGGGGGTLNIEDEYRLHETSKEPDVPLGSTWLSDFPQAWAETGGMGLAVRQAPLIIPLKATSTPVSIKQYPMSQEARLGIKPHIQRLLDQGILVPCQSPWNTPLLPVKKPGTNDYRPVQDLREVNKRVEDIHPTVPNPYNLLSGLPPSHQWYTVLDLKDAFFCLRLHPTSQPLFAFEWRDPEMGISGQLTWTRLPQGFKNSPTLFNEALHRDLADFRIQHPDLILLQYVDDLLLAATSEQDCQRGTRALLQTLGNLGYRASAKKAQICQKQVKYLGYLLKEGQRWLTEARKETVMGQPTPKTPRQLREFLGKAGFCRLFIPGFAEMAAPLYPLTKPGTLFNWGPDQQKAYQEIKQALLTAPALGLPDLTKPFELFVDEKQGYAKGVLTQKLGPWRRPVAYLSKKLDPVAAGWPPCLRMVAAIAVLTKDAGKLTMGQPLVILAPHAVEALVKQPPDRWLSNARMTHYQAMLLDTDRVQFGPVVALNPATLLPLPEKEAPHDCLEILAETHGTRPDLTDQPIPDADYTWYTDGSSFLQEGQRRAGAAVTTETEVIWARALPAGTSAQRAELIALTQALKMAEGKKLNVYTDSRYAFATAHVHGEIYRRRGWLTSEGREIKNKNEILALLKALFLPKRLSIIHCPGHQKGNSAEARGNRMADQAAREAAMKAVLETSTLLAGKRTADGSEFEKRTADGSEFESPKKKAKVE

SEQ ID NO: 1056 - protein, 2096 aa, synthetic construct
MPAAKRVKLDGGDKKYSIGLDIGTNSVGWAVITDEYKVPSKKFKVLGNTDRHSIKKNLIGALLFDSGETAEATRLKRTARRRYTRRKNRICYLQEIFSNEMAKVDDSFFHRLEESFLVEEDKKHERHPIFGNIVDEVAYHEKYPTIYHLRKKLVDSTDKADLRLIYLALAHMIKFRGHFLIEGDLNPDNSDVDKLFIQLVQTYNQLFEENPINASGVDAKAILSARLSKSRRLENLIAQLPGEKKNGLFGNLIALSLGLTPNFKSNFDLAEDAKLQLSKDTYDDDLDNLLAQIGDQYADLFLAAKNLSDAILLSDILRVNTEITKAPLSASMIKRYDEHHQDLTLLKALVRQQLPEKYKEIFFDQSKNGYAGYIDGGASQEEFYKFIKPILEKMDGTEELLVKLNREDLLRKQRTFDNGSIPHQIHLGELHAILRRQEDFYPFLKDNREKIEKILTFRIPYYVGPLARGNSRFAWMTRKSEETITPWNFEEVVDKGASAQSFIERMTNFDKNLPNEKVLPKHSLLYEYFTVYNELTKVKYVTEGMRKPAFLSGEQKKAIVDLLFKTNRKVTVKQLKEDYFKKIECFDSVEISGVEDRFNASLGTYHDLLKIIKDKDFLDNEENEDILEDIVLTLTLFEDREMIEERLKTYAHLFDDKVMKQLKRRRYTGWGRLSRKLINGIRDKQSGKTILDFLKSDGFANRNFMQLIHDDSLTFKEDIQKAQVSGQGDSLHEHIANLAGSPAIKKGILQTVKVVDELVKVMGRHKPENIVIEMARENQTTQKGQKNSRERMKRIEEGIKELGSQILKEHPVENTQLQNEKLYLYYLQNGRDMYVDQELDINRLSDYDVDHIVPQSFLKDDSIDNKVLTRSDKARGKSDNVPSEEVVKKMKNYWRQLLNAKLITQRKFDNLTKAERGGLSELDKAGFIKRQLVETRQITKHVAQILDSRMNTKYDENDKLIREVKVITLKSKLVSDFRKDFQFYKVREINNYHHAHDAYLNAVVGTALIKKYPKLESEFVYGDYKVYDVRKMIAKSEQEIGKATAKYFFYSNIMNFFKTEITLANGEIRKRPLIETNGETGEIVWDKGRDFATVRKVLSMPQVNIVKKTEVQTGGFSKESILPKRNSDKLIARKKDWDPKKYGGFDSPTVAYSVLVVAKVEKGKSKKLKSVKELLGITIMERSSFEKNPIDFLEAKGYKEVKKDLIIKLPKYSLFELENGRKRMLASAGELQKGNELALPSKYVNFLYLASHYEKLKGSPEDNEQKQLFVEQHKHYLDEIIEQISEFSKRVILADANLDKVLSAYNKHRDKPIREQAENIIHLFTLTNLGAPAAFKYFDTTIDRKRYTSTKEVLDATLIHQSITGLYETRIDLSQLGGDGGEAAAKGGGGSSGGTLNIEDEYRLHETSKEPDVPLGSTWLSDFPQAWAETGGMGLAVRQAPLIIPLKATSTPVSIKQYPMSQEARLGIKPHIQRLLDQGILVPCQSPWNTPLLPVKKPGTNDYRPVQDLREVNKRVEDIHPTVPNPYNLLSGLPPSHQWYTVLDLKDAFFCLRLHPTSQPLFAFEWRDPEMGISGQLTWTRLPQGFKNSPTLFNEALHRDLADFRIQHPDLILLQYVDDLLLAATSEQDCQRGTRALLQTLGNLGYRASAKKAQICQKQVKYLGYLLKEGQRWLTEARKETVMGQPTPKTPRQLREFLGKAGFCRLFIPGFAEMAAPLYPLTKPGTLFNWGPDQQKAYQEIKQALLTAPALGLPDLTKPFELFVDEKQGYAKGVLTQKLGPWRRPVAYLSKKLDPVAAGWPPCLRMVAAIAVLTKDAGKLTMGQPLVILAPHAVEALVKQPPDRWLSNARMTHYQAMLLDTDRVQFGPVVALNPATLLPLPEKEAPHDCLEILAETHGTRPDLTDQPIPDADYTWYTDGSSFLQEGQRRAGAAVTTETEVIWARALPAGTSAQRAELIALTQALKMAEGKKLNVYTDSRYAFATAHVHGEIYRRRGWLTSEGREIKNKNEILALLKALFLPKRLSIIHCPGHQKGNSAEARGNRMADQAAREAAMKAVLETSTLLAGKRTADGSEFEKRTADGSEFESPKKKAKVE

SEQ ID NO: 1057 - protein, 2089 aa, synthetic construct
MPAAKRVKLDGGDKKYSIGLDIGTNSVGWAVITDEYKVPSKKFKVLGNTDRHSIKKNLIGALLFDSGETAEATRLKRTARRRYTRRKNRICYLQEIFSNEMAKVDDSFFHRLEESFLVEEDKKHERHPIFGNIVDEVAYHEKYPTIYHLRKKLVDSTDKADLRLIYLALAHMIKFRGHFLIEGDLNPDNSDVDKLFIQLVQTYNQLFEENPINASGVDAKAILSARLSKSRRLENLIAQLPGEKKNGLFGNLIALSLGLTPNFKSNFDLAEDAKLQLSKDTYDDDLDNLLAQIGDQYADLFLAAKNLSDAILLSDILRVNTEITKAPLSASMIKRYDEHHQDLTLLKALVRQQLPEKYKEIFFDQSKNGYAGYIDGGASQEEFYKFIKPILEKMDGTEELLVKLNREDLLRKQRTFDNGSIPHQIHLGELHAILRRQEDFYPFLKDNREKIEKILTFRIPYYVGPLARGNSRFAWMTRKSEETITPWNFEEVVDKGASAQSFIERMTNFDKNLPNEKVLPKHSLLYEYFTVYNELTKVKYVTEGMRKPAFLSGEQKKAIVDLLFKTNRKVTVKQLKEDYFKKIECFDSVEISGVEDRFNASLGTYHDLLKIIKDKDFLDNEENEDILEDIVLTLTLFEDREMIEERLKTYAHLFDDKVMKQLKRRRYTGWGRLSRKLINGIRDKQSGKTILDFLKSDGFANRNFMQLIHDDSLTFKEDIQKAQVSGQGDSLHEHIANLAGSPAIKKGILQTVKVVDELVKVMGRHKPENIVIEMARENQTTQKGQKNSRERMKRIEEGIKELGSQILKEHPVENTQLQNEKLYLYYLQNGRDMYVDQELDINRLSDYDVDHIVPQSFLKDDSIDNKVLTRSDKARGKSDNVPSEEVVKKMKNYWRQLLNAKLITQRKFDNLTKAERGGLSELDKAGFIKRQLVETRQITKHVAQILDSRMNTKYDENDKLIREVKVITLKSKLVSDFRKDFQFYKVREINNYHHAHDAYLNAVVGTALIKKYPKLESEFVYGDYKVYDVRKMIAKSEQEIGKATAKYFFYSNIMNFFKTEITLANGEIRKRPLIETNGETGEIVWDKGRDFATVRKVLSMPQVNIVKKTEVQTGGFSKESILPKRNSDKLIARKKDWDPKKYGGFDSPTVAYSVLVVAKVEKGKSKKLKSVKELLGITIMERSSFEKNPIDFLEAKGYKEVKKDLIIKLPKYSLFELENGRKRMLASAGELQKGNELALPSKYVNFLYLASHYEKLKGSPEDNEQKQLFVEQHKHYLDEIIEQISEFSKRVILADANLDKVLSAYNKHRDKPIREQAENIIHLFTLTNLGAPAAFKYFDTTIDRKRYTSTKEVLDATLIHQSITGLYETRIDLSQLGGDGGGGGGGGTLNIEDEYRLHETSKEPDVPLGSTWLSDFPQAWAETGGMGLAVRQAPLIIPLKATSTPVSIKQYPMSQEARLGIKPHIQRLLDQGILVPCQSPWNTPLLPVKKPGTNDYRPVQDLREVNKRVEDIHPTVPNPYNLLSGLPPSHQWYTVLDLKDAFFCLRLHPTSQPLFAFEWRDPEMGISGQLTWTRLPQGFKNSPTLFNEALHRDLADFRIQHPDLILLQYVDDLLLAATSEQDCQRGTRALLQTLGNLGYRASAKKAQICQKQVKYLGYLLKEGQRWLTEARKETVMGQPTPKTPRQLREFLGKAGFCRLFIPGFAEMAAPLYPLTKPGTLFNWGPDQQKAYQEIKQALLTAPALGLPDLTKPFELFVDEKQGYAKGVLTQKLGPWRRPVAYLSKKLDPVAAGWPPCLRMVAAIAVLTKDAGKLTMGQPLVILAPHAVEALVKQPPDRWLSNARMTHYQAMLLDTDRVQFGPVVALNPATLLPLPEKEAPHDCLEILAETHGTRPDLTDQPIPDADYTWYTDGSSFLQEGQRRAGAAVTTETEVIWARALPAGTSAQRAELIALTQALKMAEGKKLNVYTDSRYAFATAHVHGEIYRRRGWLTSEGREIKNKNEILALLKALFLPKRLSIIHCPGHQKGNSAEARGNRMADQAAREAAMKAVLETSTLLAGKRTADGSEFEKRTADGSEFESPKKKAKVE

SEQ ID NO: 1058 - protein, 2096 aa, synthetic construct
MPAAKRVKLDGGDKKYSIGLDIGTNSVGWAVITDEYKVPSKKFKVLGNTDRHSIKKNLIGALLFDSGETAEATRLKRTARRRYTRRKNRICYLQEIFSNEMAKVDDSFFHRLEESFLVEEDKKHERHPIFGNIVDEVAYHEKYPTIYHLRKKLVDSTDKADLRLIYLALAHMIKFRGHFLIEGDLNPDNSDVDKLFIQLVQTYNQLFEENPINASGVDAKAILSARLSKSRRLENLIAQLPGEKKNGLFGNLIALSLGLTPNFKSNFDLAEDAKLQLSKDTYDDDLDNLLAQIGDQYADLFLAAKNLSDAILLSDILRVNTEITKAPLSASMIKRYDEHHQDLTLLKALVRQQLPEKYKEIFFDQSKNGYAGYIDGGASQEEFYKFIKPILEKMDGTEELLVKLNREDLLRKQRTFDNGSIPHQIHLGELHAILRRQEDFYPFLKDNREKIEKILTFRIPYYVGPLARGNSRFAWMTRKSEETITPWNFEEVVDKGASAQSFIERMTNFDKNLPNEKVLPKHSLLYEYFTVYNELTKVKYVTEGMRKPAFLSGEQKKAIVDLLFKTNRKVTVKQLKEDYFKKIECFDSVEISGVEDRFNASLGTYHDLLKIIKDKDFLDNEENEDILEDIVLTLTLFEDREMIEERLKTYAHLFDDKVMKQLKRRRYTGWGRLSRKLINGIRDKQSGKTILDFLKSDGFANRNFMQLIHDDSLTFKEDIQKAQVSGQGDSLHEHIANLAGSPAIKKGILQTVKVVDELVKVMGRHKPENIVIEMARENQTTQKGQKNSRERMKRIEEGIKELGSQILKEHPVENTQLQNEKLYLYYLQNGRDMYVDQELDINRLSDYDVDHIVPQSFLKDDSIDNKVLTRSDKARGKSDNVPSEEVVKKMKNYWRQLLNAKLITQRKFDNLTKAERGGLSELDKAGFIKRQLVETRQITKHVAQILDSRMNTKYDENDKLIREVKVITLKSKLVSDFRKDFQFYKVREINNYHHAHDAYLNAVVGTALIKKYPKLESEFVYGDYKVYDVRKMIAKSEQEIGKATAKYFFYSNIMNFFKTEITLANGEIRKRPLIETNGETGEIVWDKGRDFATVRKVLSMPQVNIVKKTEVQTGGFSKESILPKRNSDKLIARKKDWDPKKYGGFDSPTVAYSVLVVAKVEKGKSKKLKSVKELLGITIMERSSFEKNPIDFLEAKGYKEVKKDLIIKLPKYSLFELENGRKRMLASAGELQKGNELALPSKYVNFLYLASHYEKLKGSPEDNEQKQLFVEQHKHYLDEIIEQISEFSKRVILADANLDKVLSAYNKHRDKPIREQAENIIHLFTLTNLGAPAAFKYFDTTIDRKRYTSTKEVLDATLIHQSITGLYETRIDLSQLGGDGGEAAAKGGGPAPGGTLNIEDEYRLHETSKEPDVPLGSTWLSDFPQAWAETGGMGLAVRQAPLIIPLKATSTPVSIKQYPMSQEARLGIKPHIQRLLDQGILVPCQSPWNTPLLPVKKPGTNDYRPVQDLREVNKRVEDIHPTVPNPYNLLSGLPPSHQWYTVLDLKDAFFCLRLHPTSQPLFAFEWRDPEMGISGQLTWTRLPQGFKNSPTLFNEALHRDLADFRIQHPDLILLQYVDDLLLAATSEQDCQRGTRALLQTLGNLGYRASAKKAQICQKQVKYLGYLLKEGQRWLTEARKETVMGQPTPKTPRQLREFLGKAGFCRLFIPGFAEMAAPLYPLTKPGTLFNWGPDQQKAYQEIKQALLTAPALGLPDLTKPFELFVDEKQGYAKGVLTQKLGPWRRPVAYLSKKLDPVAAGWPPCLRMVAAIAVLTKDAGKLTMGQPLVILAPHAVEALVKQPPDRWLSNARMTHYQAMLLDTDRVQFGPVVALNPATLLPLPEKEAPHDCLEILAETHGTRPDLTDQPIPDADYTWYTDGSSFLQEGQRRAGAAVTTETEVIWARALPAGTSAQRAELIALTQALKMAEGKKLNVYTDSRYAFATAHVHGEIYRRRGWLTSEGREIKNKNEILALLKALFLPKRLSIIHCPGHQKGNSAEARGNRMADQAAREAAMKAVLETSTLLAGKRTADGSEFEKRTADGSEFESPKKKAKVE

SEQ ID NO: 1059 - protein, 2096 aa, synthetic construct
MPAAKRVKLDGGDKKYSIGLDIGTNSVGWAVITDEYKVPSKKFKVLGNTDRHSIKKNLIGALLFDSGETAEATRLKRTARRRYTRRKNRICYLQEIFSNEMAKVDDSFFHRLEESFLVEEDKKHERHPIFGNIVDEVAYHEKYPTIYHLRKKLVDSTDKADLRLIYLALAHMIKFRGHFLIEGDLNPDNSDVDKLFIQLVQTYNQLFEENPINASGVDAKAILSARLSKSRRLENLIAQLPGEKKNGLFGNLIALSLGLTPNFKSNFDLAEDAKLQLSKDTYDDDLDNLLAQIGDQYADLFLAAKNLSDAILLSDILRVNTEITKAPLSASMIKRYDEHHQDLTLLKALVRQQLPEKYKEIFFDQSKNGYAGYIDGGASQEEFYKFIKPILEKMDGTEELLVKLNREDLLRKQRTFDNGSIPHQIHLGELHAILRRQEDFYPFLKDNREKIEKILTFRIPYYVGPLARGNSRFAWMTRKSEETITPWNFEEVVDKGASAQSFIERMTNFDKNLPNEKVLPKHSLLYEYFTVYNELTKVKYVTEGMRKPAFLSGEQKKAIVDLLFKTNRKVTVKQLKEDYFKKIECFDSVEISGVEDRFNASLGTYHDLLKIIKDKDFLDNEENEDILEDIVLTLTLFEDREMIEERLKTYAHLFDDKVMKQLKRRRYTGWGRLSRKLINGIRDKQSGKTILDFLKSDGFANRNFMQLIHDDSLTFKEDIQKAQVSGQGDSLHEHIANLAGSPAIKKGILQTVKVVDELVKVMGRHKPENIVIEMARENQTTQKGQKNSRERMKRIEEGIKELGSQILKEHPVENTQLQNEKLYLYYLQNGRDMYVDQELDINRLSDYDVDHIVPQSFLKDDSIDNKVLTRSDKARGKSDNVPSEEVVKKMKNYWRQLLNAKLITQRKFDNLTKAERGGLSELDKAGFIKRQLVETRQITKHVAQILDSRMNTKYDENDKLIREVKVITLKSKLVSDFRKDFQFYKVREINNYHHAHDAYLNAVVGTALIKKYPKLESEFVYGDYKVYDVRKMIAKSEQEIGKATAKYFFYSNIMNFFKTEITLANGEIRKRPLIETNGETGEIVWDKGRDFATVRKVLSMPQVNIVKKTEVQTGGFSKESILPKRNSDKLIARKKDWDPKKYGGFDSPTVAYSVLVVAKVEKGKSKKLKSVKELLGITIMERSSFEKNPIDFLEAKGYKEVKKDLIIKLPKYSLFELENGRKRMLASAGELQKGNELALPSKYVNFLYLASHYEKLKGSPEDNEQKQLFVEQHKHYLDEIIEQISEFSKRVILADANLDKVLSAYNKHRDKPIREQAENIIHLFTLTNLGAPAAFKYFDTTIDRKRYTSTKEVLDATLIHQSITGLYETRIDLSQLGGDGGGGSGSSEAAAKGGTLNIEDEYRLHETSKEPDVPLGSTWLSDFPQAWAETGGMGLAVRQAPLIIPLKATSTPVSIKQYPMSQEARLGIKPHIQRLLDQGILVPCQSPWNTPLLPVKKPGTNDYRPVQDLREVNKRVEDIHPTVPNPYNLLSGLPPSHQWYTVLDLKDAFFCLRLHPTSQPLFAFEWRDPEMGISGQLTWTRLPQGFKNSPTLFNEALHRDLADFRIQHPDLILLQYVDDLLLAATSEQDCQRGTRALLQTLGNLGYRASAKKAQICQKQVKYLGYLLKEGQRWLTEARKETVMGQPTPKTPRQLREFLGKAGFCRLFIPGFAEMAAPLYPLTKPGTLFNWGPDQQKAYQEIKQALLTAPALGLPDLTKPFELFVDEKQGYAKGVLTQKLGPWRRPVAYLSKKLDPVAAGWPPCLRMVAAIAVLTKDAGKLTMGQPLVILAPHAVEALVKQPPDRWLSNARMTHYQAMLLDTDRVQFGPVVALNPATLLPLPEKEAPHDCLEILAETHGTRPDLTDQPIPDADYTWYTDGSSFLQEGQRRAGAAVTTETEVIWARALPAGTSAQRAELIALTQALKMAEGKKLNVYTDSRYAFATAHVHGEIYRRRGWLTSEGREIKNKNEILALLKALFLPKRLSIIHCPGHQKGNSAEARGNRMADQAAREAAMKAVLETSTLLAGKRTADGSEFEKRTADGSEFESPKKKAKVE

SEQ ID NO: 1060 - protein, 2096 aa, synthetic construct
MPAAKRVKLDGGDKKYSIGLDIGTNSVGWAVITDEYKVPSKKFKVLGNTDRHSIKKNLIGALLFDSGETAEATRLKRTARRRYTRRKNRICYLQEIFSNEMAKVDDSFFHRLEESFLVEEDKKHERHPIFGNIVDEVAYHEKYPTIYHLRKKLVDSTDKADLRLIYLALAHMIKFRGHFLIEGDLNPDNSDVDKLFIQLVQTYNQLFEENPINASGVDAKAILSARLSKSRRLENLIAQLPGEKKNGLFGNLIALSLGLTPNFKSNFDLAEDAKLQLSKDTYDDDLDNLLAQIGDQYADLFLAAKNLSDAILLSDILRVNTEITKAPLSASMIKRYDEHHQDLTLLKALVRQQLPEKYKEIFFDQSKNGYAGYIDGGASQEEFYKFIKPILEKMDGTEELLVKLNREDLLRKQRTFDNGSIPHQIHLGELHAILRRQEDFYPFLKDNREKIEKILTFRIPYYVGPLARGNSRFAWMTRKSEETITPWNFEEVVDKGASAQSFIERMTNFDKNLPNEKVLPKHSLLYEYFTVYNELTKVKYVTEGMRKPAFLSGEQKKAIVDLLFKTNRKVTVKQLKEDYFKKIECFDSVEISGVEDRFNASLGTYHDLLKIIKDKDFLDNEENEDILEDIVLTLTLFEDREMIEERLKTYAHLFDDKVMKQLKRRRYTGWGRLSRKLINGIRDKQSGKTILDFLKSDGFANRNFMQLIHDDSLTFKEDIQKAQVSGQGDSLHEHIANLAGSPAIKKGILQTVKVVDELVKVMGRHKPENIVIEMARENQTTQKGQKNSRERMKRIEEGIKELGSQILKEHPVENTQLQNEKLYLYYLQNGRDMYVDQELDINRLSDYDVDHIVPQSFLKDDSIDNKVLTRSDKARGKSDNVPSEEVVKKMKNYWRQLLNAKLITQRKFDNLTKAERGGLSELDKAGFIKRQLVETRQITKHVAQILDSRMNTKYDENDKLIREVKVITLKSKLVSDFRKDFQFYKVREINNYHHAHDAYLNAVVGTALIKKYPKLESEFVYGDYKVYDVRKMIAKSEQEIGKATAKYFFYSNIMNFFKTEITLANGEIRKRPLIETNGETGEIVWDKGRDFATVRKVLSMPQVNIVKKTEVQTGGFSKESILPKRNSDKLIARKKDWDPKKYGGFDSPTVAYSVLVVAKVEKGKSKKLKSVKELLGITIMERSSFEKNPIDFLEAKGYKEVKKDLIIKLPKYSLFELENGRKRMLASAGELQKGNELALPSKYVNFLYLASHYEKLKGSPEDNEQKQLFVEQHKHYLDEIIEQISEFSKRVILADANLDKVLSAYNKHRDKPIREQAENIIHLFTLTNLGAPAAFKYFDTTIDRKRYTSTKEVLDATLIHQSITGLYETRIDLSQLGGDGGGSSGGSEAAAKGGTLNIEDEYRLHETSKEPDVPLGSTWLSDFPQAWAETGGMGLAVRQAPLIIPLKATSTPVSIKQYPMSQEARLGIKPHIQRLLDQGILVPCQSPWNTPLLPVKKPGTNDYRPVQDLREVNKRVEDIHPTVPNPYNLLSGLPPSHQWYTVLDLKDAFFCLRLHPTSQPLFAFEWRDPEMGISGQLTWTRLPQGFKNSPTLFNEALHRDLADFRIQHPDLILLQYVDDLLLAATSEQDCQRGTRALLQTLGNLGYRASAKKAQICQKQVKYLGYLLKEGQRWLTEARKETVMGQPTPKTPRQLREFLGKAGFCRLFIPGFAEMAAPLYPLTKPGTLFNWGPDQQKAYQEIKQALLTAPALGLPDLTKPFELFVDEKQGYAKGVLTQKLGPWRRPVAYLSKKLDPVAAGWPPCLRMVAAIAVLTKDAGKLTMGQPLVILAPHAVEALVKQPPDRWLSNARMTHYQAMLLDTDRVQFGPVVALNPATLLPLPEKEAPHDCLEILAETHGTRPDLTDQPIPDADYTWYTDGSSFLQEGQRRAGAAVTTETEVIWARALPAGTSAQRAELIALTQALKMAEGKKLNVYTDSRYAFATAHVHGEIYRRRGWLTSEGREIKNKNEILALLKALFLPKRLSIIHCPGHQKGNSAEARGNRMADQAAREAAMKAVLETSTLLAGKRTADGSEFEKRTADGSEFESPKKKAKVE

SEQ ID NO: 1061 - protein, 2094 aa, synthetic construct
MPAAKRVKLDGGDKKYSIGLDIGTNSVGWAVITDEYKVPSKKFKVLGNTDRHSIKKNLIGALLFDSGETAEATRLKRTARRRYTRRKNRICYLQEIFSNEMAKVDDSFFHRLEESFLVEEDKKHERHPIFGNIVDEVAYHEKYPTIYHLRKKLVDSTDKADLRLIYLALAHMIKFRGHFLIEGDLNPDNSDVDKLFIQLVQTYNQLFEENPINASGVDAKAILSARLSKSRRLENLIAQLPGEKKNGLFGNLIALSLGLTPNFKSNFDLAEDAKLQLSKDTYDDDLDNLLAQIGDQYADLFLAAKNLSDAILLSDILRVNTEITKAPLSASMIKRYDEHHQDLTLLKALVRQQLPEKYKEIFFDQSKNGYAGYIDGGASQEEFYKFIKPILEKMDGTEELLVKLNREDLLRKQRTFDNGSIPHQIHLGELHAILRRQEDFYPFLKDNREKIEKILTFRIPYYVGPLARGNSRFAWMTRKSEETITPWNFEEVVDKGASAQSFIERMTNFDKNLPNEKVLPKHSLLYEYFTVYNELTKVKYVTEGMRKPAFLSGEQKKAIVDLLFKTNRKVTVKQLKEDYFKKIECFDSVEISGVEDRFNASLGTYHDLLKIIKDKDFLDNEENEDILEDIVLTLTLFEDREMIEERLKTYAHLFDDKVMKQLKRRRYTGWGRLSRKLINGIRDKQSGKTILDFLKSDGFANRNFMQLIHDDSLTFKEDIQKAQVSGQGDSLHEHIANLAGSPAIKKGILQTVKVVDELVKVMGRHKPENIVIEMARENQTTQKGQKNSRERMKRIEEGIKELGSQILKEHPVENTQLQNEKLYLYYLQNGRDMYVDQELDINRLSDYDVDHIVPQSFLKDDSIDNKVLTRSDKARGKSDNVPSEEVVKKMKNYWRQLLNAKLITQRKFDNLTKAERGGLSELDKAGFIKRQLVETRQITKHVAQILDSRMNTKYDENDKLIREVKVITLKSKLVSDFRKDFQFYKVREINNYHHAHDAYLNAVVGTALIKKYPKLESEFVYGDYKVYDVRKMIAKSEQEIGKATAKYFFYSNIMNFFKTEITLANGEIRKRPLIETNGETGEIVWDKGRDFATVRKVLSMPQVNIVKKTEVQTGGFSKESILPKRNSDKLIARKKDWDPKKYGGFDSPTVAYSVLVVAKVEKGKSKKLKSVKELLGITIMERSSFEKNPIDFLEAKGYKEVKKDLIIKLPKYSLFELENGRKRMLASAGELQKGNELALPSKYVNFLYLASHYEKLKGSPEDNEQKQLFVEQHKHYLDEIIEQISEFSKRVILADANLDKVLSAYNKHRDKPIREQAENIIHLFTLTNLGAPAAFKYFDTTIDRKRYTSTKEVLDATLIHQSITGLYETRIDLSQLGGDGGGSSGGSPAPGGTLNIEDEYRLHETSKEPDVPLGSTWLSDFPQAWAETGGMGLAVRQAPLIIPLKATSTPVSIKQYPMSQEARLGIKPHIQRLLDQGILVPCQSPWNTPLLPVKKPGTNDYRPVQDLREVNKRVEDIHPTVPNPYNLLSGLPPSHQWYTVLDLKDAFFCLRLHPTSQPLFAFEWRDPEMGISGQLTWTRLPQGFKNSPTLFNEALHRDLADFRIQHPDLILLQYVDDLLLAATSEQDCQRGTRALLQTLGNLGYRASAKKAQICQKQVKYLGYLLKEGQRWLTEARKETVMGQPTPKTPRQLREFLGKAGFCRLFIPGFAEMAAPLYPLTKPGTLFNWGPDQQKAYQEIKQALLTAPALGLPDLTKPFELFVDEKQGYAKGVLTQKLGPWRRPVAYLSKKLDPVAAGWPPCLRMVAAIAVLTKDAGKLTMGQPLVILAPHAVEALVKQPPDRWLSNARMTHYQAMLLDTDRVQFGPVVALNPATLLPLPEKEAPHDCLEILAETHGTRPDLTDQPIPDADYTWYTDGSSFLQEGQRRAGAAVTTETEVIWARALPAGTSAQRAELIALTQALKMAEGKKLNVYTDSRYAFATAHVHGEIYRRRGWLTSEGREIKNKNEILALLKALFLPKRLSIIHCPGHQKGNSAEARGNRMADQAAREAAMKAVLETSTLLAGKRTADGSEFEKRTADGSEFESPKKKAKVE

SEQ ID NO: 1062 - protein, 2091 aa, synthetic construct
MPAAKRVKLDGGDKKYSIGLDIGTNSVGWAVITDEYKVPSKKFKVLGNTDRHSIKKNLIGALLFDSGETAEATRLKRTARRRYTRRKNRICYLQEIFSNEMAKVDDSFFHRLEESFLVEEDKKHERHPIFGNIVDEVAYHEKYPTIYHLRKKLVDSTDKADLRLIYLALAHMIKFRGHFLIEGDLNPDNSDVDKLFIQLVQTYNQLFEENPINASGVDAKAILSARLSKSRRLENLIAQLPGEKKNGLFGNLIALSLGLTPNFKSNFDLAEDAKLQLSKDTYDDDLDNLLAQIGDQYADLFLAAKNLSDAILLSDILRVNTEITKAPLSASMIKRYDEHHQDLTLLKALVRQQLPEKYKEIFFDQSKNGYAGYIDGGASQEEFYKFIKPILEKMDGTEELLVKLNREDLLRKQRTFDNGSIPHQIHLGELHAILRRQEDFYPFLKDNREKIEKILTFRIPYYVGPLARGNSRFAWMTRKSEETITPWNFEEVVDKGASAQSFIERMTNFDKNLPNEKVLPKHSLLYEYFTVYNELTKVKYVTEGMRKPAFLSGEQKKAIVDLLFKTNRKVTVKQLKEDYFKKIECFDSVEISGVEDRFNASLGTYHDLLKIIKDKDFLDNEENEDILEDIVLTLTLFEDREMIEERLKTYAHLFDDKVMKQLKRRRYTGWGRLSRKLINGIRDKQSGKTILDFLKSDGFANRNFMQLIHDDSLTFKEDIQKAQVSGQGDSLHEHIANLAGSPAIKKGILQTVKVVDELVKVMGRHKPENIVIEMARENQTTQKGQKNSRERMKRIEEGIKELGSQILKEHPVENTQLQNEKLYLYYLQNGRDMYVDQELDINRLSDYDVDHIVPQSFLKDDSIDNKVLTRSDKARGKSDNVPSEEVVKKMKNYWRQLLNAKLITQRKFDNLTKAERGGLSELDKAGFIKRQLVETRQITKHVAQILDSRMNTKYDENDKLIREVKVITLKSKLVSDFRKDFQFYKVREINNYHHAHDAYLNAVVGTALIKKYPKLESEFVYGDYKVYDVRKMIAKSEQEIGKATAKYFFYSNIMNFFKTEITLANGEIRKRPLIETNGETGEIVWDKGRDFATVRKVLSMPQVNIVKKTEVQTGGFSKESILPKRNSDKLIARKKDWDPKKYGGFDSPTVAYSVLVVAKVEKGKSKKLKSVKELLGITIMERSSFEKNPIDFLEAKGYKEVKKDLIIKLPKYSLFELENGRKRMLASAGELQKGNELALPSKYVNFLYLASHYEKLKGSPEDNEQKQLFVEQHKHYLDEIIEQISEFSKRVILADANLDKVLSAYNKHRDKPIREQAENIIHLFTLTNLGAPAAFKYFDTTIDRKRYTSTKEVLDATLIHQSITGLYETRIDLSQLGGDGGGSSGGSGGTLNIEDEYRLHETSKEPDVPLGSTWLSDFPQAWAETGGMGLAVRQAPLIIPLKATSTPVSIKQYPMSQEARLGIKPHIQRLLDQGILVPCQSPWNTPLLPVKKPGTNDYRPVQDLREVNKRVEDIHPTVPNPYNLLSGLPPSHQWYTVLDLKDAFFCLRLHPTSQPLFAFEWRDPEMGISGQLTWTRLPQGFKNSPTLFNEALHRDLADFRIQHPDLILLQYVDDLLLAATSEQDCQRGTRALLQTLGNLGYRASAKKAQICQKQVKYLGYLLKEGQRWLTEARKETVMGQPTPKTPRQLREFLGKAGFCRLFIPGFAEMAAPLYPLTKPGTLFNWGPDQQKAYQEIKQALLTAPALGLPDLTKPFELFVDEKQGYAKGVLTQKLGPWRRPVAYLSKKLDPVAAGWPPCLRMVAAIAVLTKDAGKLTMGQPLVILAPHAVEALVKQPPDRWLSNARMTHYQAMLLDTDRVQFGPVVALNPATLLPLPEKEAPHDCLEILAETHGTRPDLTDQPIPDADYTWYTDGSSFLQEGQRRAGAAVTTETEVIWARALPAGTSAQRAELIALTQALKMAEGKKLNVYTDSRYAFATAHVHGEIYRRRGWLTSEGREIKNKNEILALLKALFLPKRLSIIHCPGHQKGNSAEARGNRMADQAAREAAMKAVLETSTLLAGKRTADGSEFEKRTADGSEFESPKKKAKVE

SEQ ID NO: 1063 - protein, 2094 aa, synthetic construct
MPAAKRVKLDGGDKKYSIGLDIGTNSVGWAVITDEYKVPSKKFKVLGNTDRHSIKKNLIGALLFDSGETAEATRLKRTARRRYTRRKNRICYLQEIFSNEMAKVDDSFFHRLEESFLVEEDKKHERHPIFGNIVDEVAYHEKYPTIYHLRKKLVDSTDKADLRLIYLALAHMIKFRGHFLIEGDLNPDNSDVDKLFIQLVQTYNQLFEENPINASGVDAKAILSARLSKSRRLENLIAQLPGEKKNGLFGNLIALSLGLTPNFKSNFDLAEDAKLQLSKDTYDDDLDNLLAQIGDQYADLFLAAKNLSDAILLSDILRVNTEITKAPLSASMIKRYDEHHQDLTLLKALVRQQLPEKYKEIFFDQSKNGYAGYIDGGASQEEFYKFIKPILEKMDGTEELLVKLNREDLLRKQRTFDNGSIPHQIHLGELHAILRRQEDFYPFLKDNREKIEKILTFRIPYYVGPLARGNSRFAWMTRKSEETITPWNFEEVVDKGASAQSFIERMTNFDKNLPNEKVLPKHSLLYEYFTVYNELTKVKYVTEGMRKPAFLSGEQKKAIVDLLFKTNRKVTVKQLKEDYFKKIECFDSVEISGVEDRFNASLGTYHDLLKIIKDKDFLDNEENEDILEDIVLTLTLFEDREMIEERLKTYAHLFDDKVMKQLKRRRYTGWGRLSRKLINGIRDKQSGKTILDFLKSDGFANRNFMQLIHDDSLTFKEDIQKAQVSGQGDSLHEHIANLAGSPAIKKGILQTVKVVDELVKVMGRHKPENIVIEMARENQTTQKGQKNSRERMKRIEEGIKELGSQILKEHPVENTQLQNEKLYLYYLQNGRDMYVDQELDINRLSDYDVDHIVPQSFLKDDSIDNKVLTRSDKARGKSDNVPSEEVVKKMKNYWRQLLNAKLITQRKFDNLTKAERGGLSELDKAGFIKRQLVETRQITKHVAQILDSRMNTKYDENDKLIREVKVITLKSKLVSDFRKDFQFYKVREINNYHHAHDAYLNAVVGTALIKKYPKLESEFVYGDYKVYDVRKMIAKSEQEIGKATAKYFFYSNIMNFFKTEITLANGEIRKRPLIETNGETGEIVWDKGRDFATVRKVLSMPQVNIVKKTEVQTGGFSKESILPKRNSDKLIARKKDWDPKKYGGFDSPTVAYSVLVVAKVEKGKSKKLKSVKELLGITIMERSSFEKNPIDFLEAKGYKEVKKDLIIKLPKYSLFELENGRKRMLASAGELQKGNELALPSKYVNFLYLASHYEKLKGSPEDNEQKQLFVEQHKHYLDEIIEQISEFSKRVILADANLDKVLSAYNKHRDKPIREQAENIIHLFTLTNLGAPAAFKYFDTTIDRKRYTSTKEVLDATLIHQSITGLYETRIDLSQLGGDGGGGSGSSPAPGGTLNIEDEYRLHETSKEPDVPLGSTWLSDFPQAWAETGGMGLAVRQAPLIIPLKATSTPVSIKQYPMSQEARLGIKPHIQRLLDQGILVPCQSPWNTPLLPVKKPGTNDYRPVQDLREVNKRVEDIHPTVPNPYNLLSGLPPSHQWYTVLDLKDAFFCLRLHPTSQPLFAFEWRDPEMGISGQLTWTRLPQGFKNSPTLFNEALHRDLADFRIQHPDLILLQYVDDLLLAATSEQDCQRGTRALLQTLGNLGYRASAKKAQICQKQVKYLGYLLKEGQRWLTEARKETVMGQPTPKTPRQLREFLGKAGFCRLFIPGFAEMAAPLYPLTKPGTLFNWGPDQQKAYQEIKQALLTAPALGLPDLTKPFELFVDEKQGYAKGVLTQKLGPWRRPVAYLSKKLDPVAAGWPPCLRMVAAIAVLTKDAGKLTMGQPLVILAPHAVEALVKQPPDRWLSNARMTHYQAMLLDTDRVQFGPVVALNPATLLPLPEKEAPHDCLEILAETHGTRPDLTDQPIPDADYTWYTDGSSFLQEGQRRAGAAVTTETEVIWARALPAGTSAQRAELIALTQALKMAEGKKLNVYTDSRYAFATAHVHGEIYRRRGWLTSEGREIKNKNEILALLKALFLPKRLSIIHCPGHQKGNSAEARGNRMADQAAREAAMKAVLETSTLLAGKRTADGSEFEKRTADGSEFESPKKKAKVE

SEQ ID NO: 1064 - protein, 2096 aa, synthetic construct
MPAAKRVKLDGGDKKYSIGLDIGTNSVGWAVITDEYKVPSKKFKVLGNTDRHSIKKNLIGALLFDSGETAEATRLKRTARRRYTRRKNRICYLQEIFSNEMAKVDDSFFHRLEESFLVEEDKKHERHPIFGNIVDEVAYHEKYPTIYHLRKKLVDSTDKADLRLIYLALAHMIKFRGHFLIEGDLNPDNSDVDKLFIQLVQTYNQLFEENPINASGVDAKAILSARLSKSRRLENLIAQLPGEKKNGLFGNLIALSLGLTPNFKSNFDLAEDAKLQLSKDTYDDDLDNLLAQIGDQYADLFLAAKNLSDAILLSDILRVNTEITKAPLSASMIKRYDEHHQDLTLLKALVRQQLPEKYKEIFFDQSKNGYAGYIDGGASQEEFYKFIKPILEKMDGTEELLVKLNREDLLRKQRTFDNGSIPHQIHLGELHAILRRQEDFYPFLKDNREKIEKILTFRIPYYVGPLARGNSRFAWMTRKSEETITPWNFEEVVDKGASAQSFIERMTNFDKNLPNEKVLPKHSLLYEYFTVYNELTKVKYVTEGMRKPAFLSGEQKKAIVDLLFKTNRKVTVKQLKEDYFKKIECFDSVEISGVEDRFNASLGTYHDLLKIIKDKDFLDNEENEDILEDIVLTLTLFEDREMIEERLKTYAHLFDDKVMKQLKRRRYTGWGRLSRKLINGIRDKQSGKTILDFLKSDGFANRNFMQLIHDDSLTFKEDIQKAQVSGQGDSLHEHIANLAGSPAIKKGILQTVKVVDELVKVMGRHKPENIVIEMARENQTTQKGQKNSRERMKRIEEGIKELGSQILKEHPVENTQLQNEKLYLYYLQNGRDMYVDQELDINRLSDYDVDHIVPQSFLKDDSIDNKVLTRSDKARGKSDNVPSEEVVKKMKNYWRQLLNAKLITQRKFDNLTKAERGGLSELDKAGFIKRQLVETRQITKHVAQILDSRMNTKYDENDKLIREVKVITLKSKLVSDFRKDFQFYKVREINNYHHAHDAYLNAVVGTALIKKYPKLESEFVYGDYKVYDVRKMIAKSEQEIGKATAKYFFYSNIMNFFKTEITLANGEIRKRPLIETNGETGEIVWDKGRDFATVRKVLSMPQVNIVKKTEVQTGGFSKESILPKRNSDKLIARKKDWDPKKYGGFDSPTVAYSVLVVAKVEKGKSKKLKSVKELLGITIMERSSFEKNPIDFLEAKGYKEVKKDLIIKLPKYSLFELENGRKRMLASAGELQKGNELALPSKYVNFLYLASHYEKLKGSPEDNEQKQLFVEQHKHYLDEIIEQISEFSKRVILADANLDKVLSAYNKHRDKPIREQAENIIHLFTLTNLGAPAAFKYFDTTIDRKRYTSTKEVLDATLIHQSITGLYETRIDLSQLGGDGGEAAAKPAPGSSGGTLNIEDEYRLHETSKEPDVPLGSTWLSDFPQAWAETGGMGLAVRQAPLIIPLKATSTPVSIKQYPMSQEARLGIKPHIQRLLDQGILVPCQSPWNTPLLPVKKPGTNDYRPVQDLREVNKRVEDIHPTVPNPYNLLSGLPPSHQWYTVLDLKDAFFCLRLHPTSQPLFAFEWRDPEMGISGQLTWTRLPQGFKNSPTLFNEALHRDLADFRIQHPDLILLQYVDDLLLAATSEQDCQRGTRALLQTLGNLGYRASAKKAQICQKQVKYLGYLLKEGQRWLTEARKETVMGQPTPKTPRQLREFLGKAGFCRLFIPGFAEMAAPLYPLTKPGTLFNWGPDQQKAYQEIKQALLTAPALGLPDLTKPFELFVDEKQGYAKGVLTQKLGPWRRPVAYLSKKLDPVAAGWPPCLRMVAAIAVLTKDAGKLTMGQPLVILAPHAVEALVKQPPDRWLSNARMTHYQAMLLDTDRVQFGPVVALNPATLLPLPEKEAPHDCLEILAETHGTRPDLTDQPIPDADYTWYTDGSSFLQEGQRRAGAAVTTETEVIWARALPAGTSAQRAELIALTQALKMAEGKKLNVYTDSRYAFATAHVHGEIYRRRGWLTSEGREIKNKNEILALLKALFLPKRLSIIHCPGHQKGNSAEARGNRMADQAAREAAMKAVLETSTLLAGKRTADGSEFEKRTADGSEFESPKKKAKVE

SEQ ID NO: 1065 - protein, 2094 aa, synthetic construct
MPAAKRVKLDGGDKKYSIGLDIGTNSVGWAVITDEYKVPSKKFKVLGNTDRHSIKKNLIGALLFDSGETAEATRLKRTARRRYTRRKNRICYLQEIFSNEMAKVDDSFFHRLEESFLVEEDKKHERHPIFGNIVDEVAYHEKYPTIYHLRKKLVDSTDKADLRLIYLALAHMIKFRGHFLIEGDLNPDNSDVDKLFIQLVQTYNQLFEENPINASGVDAKAILSARLSKSRRLENLIAQLPGEKKNGLFGNLIALSLGLTPNFKSNFDLAEDAKLQLSKDTYDDDLDNLLAQIGDQYADLFLAAKNLSDAILLSDILRVNTEITKAPLSASMIKRYDEHHQDLTLLKALVRQQLPEKYKEIFFDQSKNGYAGYIDGGASQEEFYKFIKPILEKMDGTEELLVKLNREDLLRKQRTFDNGSIPHQIHLGELHAILRRQEDFYPFLKDNREKIEKILTFRIPYYVGPLARGNSRFAWMTRKSEETITPWNFEEVVDKGASAQSFIERMTNFDKNLPNEKVLPKHSLLYEYFTVYNELTKVKYVTEGMRKPAFLSGEQKKAIVDLLFKTNRKVTVKQLKEDYFKKIECFDSVEISGVEDRFNASLGTYHDLLKIIKDKDFLDNEENEDILEDIVLTLTLFEDREMIEERLKTYAHLFDDKVMKQLKRRRYTGWGRLSRKLINGIRDKQSGKTILDFLKSDGFANRNFMQLIHDDSLTFKEDIQKAQVSGQGDSLHEHIANLAGSPAIKKGILQTVKVVDELVKVMGRHKPENIVIEMARENQTTQKGQKNSRERMKRIEEGIKELGSQILKEHPVENTQLQNEKLYLYYLQNGRDMYVDQELDINRLSDYDVDHIVPQSFLKDDSIDNKVLTRSDKARGKSDNVPSEEVVKKMKNYWRQLLNAKLITQRKFDNLTKAERGGLSELDKAGFIKRQLVETRQITKHVAQILDSRMNTKYDENDKLIREVKVITLKSKLVSDFRKDFQFYKVREINNYHHAHDAYLNAVVGTALIKKYPKLESEFVYGDYKVYDVRKMIAKSEQEIGKATAKYFFYSNIMNFFKTEITLANGEIRKRPLIETNGETGEIVWDKGRDFATVRKVLSMPQVNIVKKTEVQTGGFSKESILPKRNSDKLIARKKDWDPKKYGGFDSPTVAYSVLVVAKVEKGKSKKLKSVKELLGITIMERSSFEKNPIDFLEAKGYKEVKKDLIIKLPKYSLFELENGRKRMLASAGELQKGNELALPSKYVNFLYLASHYEKLKGSPEDNEQKQLFVEQHKHYLDEIIEQISEFSKRVILADANLDKVLSAYNKHRDKPIREQAENIIHLFTLTNLGAPAAFKYFDTTIDRKRYTSTKEVLDATLIHQSITGLYETRIDLSQLGGDGGGGSGGSGGSGGTLNIEDEYRLHETSKEPDVPLGSTWLSDFPQAWAETGGMGLAVRQAPLIIPLKATSTPVSIKQYPMSQEARLGIKPHIQRLLDQGILVPCQSPWNTPLLPVKKPGTNDYRPVQDLREVNKRVEDIHPTVPNPYNLLSGLPPSHQWYTVLDLKDAFFCLRLHPTSQPLFAFEWRDPEMGISGQLTWTRLPQGFKNSPTLFNEALHRDLADFRIQHPDLILLQYVDDLLLAATSEQDCQRGTRALLQTLGNLGYRASAKKAQICQKQVKYLGYLLKEGQRWLTEARKETVMGQPTPKTPRQLREFLGKAGFCRLFIPGFAEMAAPLYPLTKPGTLFNWGPDQQKAYQEIKQALLTAPALGLPDLTKPFELFVDEKQGYAKGVLTQKLGPWRRPVAYLSKKLDPVAAGWPPCLRMVAAIAVLTKDAGKLTMGQPLVILAPHAVEALVKQPPDRWLSNARMTHYQAMLLDTDRVQFGPVVALNPATLLPLPEKEAPHDCLEILAETHGTRPDLTDQPIPDADYTWYTDGSSFLQEGQRRAGAAVTTETEVIWARALPAGTSAQRAELIALTQALKMAEGKKLNVYTDSRYAFATAHVHGEIYRRRGWLTSEGREIKNKNEILALLKALFLPKRLSIIHCPGHQKGNSAEARGNRMADQAAREAAMKAVLETSTLLAGKRTADGSEFEKRTADGSEFESPKKKAKVE

SEQ ID NO: 1066 - protein, 2096 aa, synthetic construct
MPAAKRVKLDGGDKKYSIGLDIGTNSVGWAVITDEYKVPSKKFKVLGNTDRHSIKKNLIGALLFDSGETAEATRLKRTARRRYTRRKNRICYLQEIFSNEMAKVDDSFFHRLEESFLVEEDKKHERHPIFGNIVDEVAYHEKYPTIYHLRKKLVDSTDKADLRLIYLALAHMIKFRGHFLIEGDLNPDNSDVDKLFIQLVQTYNQLFEENPINASGVDAKAILSARLSKSRRLENLIAQLPGEKKNGLFGNLIALSLGLTPNFKSNFDLAEDAKLQLSKDTYDDDLDNLLAQIGDQYADLFLAAKNLSDAILLSDILRVNTEITKAPLSASMIKRYDEHHQDLTLLKALVRQQLPEKYKEIFFDQSKNGYAGYIDGGASQEEFYKFIKPILEKMDGTEELLVKLNREDLLRKQRTFDNGSIPHQIHLGELHAILRRQEDFYPFLKDNREKIEKILTFRIPYYVGPLARGNSRFAWMTRKSEETITPWNFEEVVDKGASAQSFIERMTNFDKNLPNEKVLPKHSLLYEYFTVYNELTKVKYVTEGMRKPAFLSGEQKKAIVDLLFKTNRKVTVKQLKEDYFKKIECFDSVEISGVEDRFNASLGTYHDLLKIIKDKDFLDNEENEDILEDIVLTLTLFEDREMIEERLKTYAHLFDDKVMKQLKRRRYTGWGRLSRKLINGIRDKQSGKTILDFLKSDGFANRNFMQLIHDDSLTFKEDIQKAQVSGQGDSLHEHIANLAGSPAIKKGILQTVKVVDELVKVMGRHKPENIVIEMARENQTTQKGQKNSRERMKRIEEGIKELGSQILKEHPVENTQLQNEKLYLYYLQNGRDMYVDQELDINRLSDYDVDHIVPQSFLKDDSIDNKVLTRSDKARGKSDNVPSEEVVKKMKNYWRQLLNAKLITQRKFDNLTKAERGGLSELDKAGFIKRQLVETRQITKHVAQILDSRMNTKYDENDKLIREVKVITLKSKLVSDFRKDFQFYKVREINNYHHAHDAYLNAVVGTALIKKYPKLESEFVYGDYKVYDVRKMIAKSEQEIGKATAKYFFYSNIMNFFKTEITLANGEIRKRPLIETNGETGEIVWDKGRDFATVRKVLSMPQVNIVKKTEVQTGGFSKESILPKRNSDKLIARKKDWDPKKYGGFDSPTVAYSVLVVAKVEKGKSKKLKSVKELLGITIMERSSFEKNPIDFLEAKGYKEVKKDLIIKLPKYSLFELENGRKRMLASAGELQKGNELALPSKYVNFLYLASHYEKLKGSPEDNEQKQLFVEQHKHYLDEIIEQISEFSKRVILADANLDKVLSAYNKHRDKPIREQAENIIHLFTLTNLGAPAAFKYFDTTIDRKRYTSTKEVLDATLIHQSITGLYETRIDLSQLGGDGGPAPEAAAKGGSGGTLNIEDEYRLHETSKEPDVPLGSTWLSDFPQAWAETGGMGLAVRQAPLIIPLKATSTPVSIKQYPMSQEARLGIKPHIQRLLDQGILVPCQSPWNTPLLPVKKPGTNDYRPVQDLREVNKRVEDIHPTVPNPYNLLSGLPPSHQWYTVLDLKDAFFCLRLHPTSQPLFAFEWRDPEMGISGQLTWTRLPQGFKNSPTLFNEALHRDLADFRIQHPDLILLQYVDDLLLAATSEQDCQRGTRALLQTLGNLGYRASAKKAQICQKQVKYLGYLLKEGQRWLTEARKETVMGQPTPKTPRQLREFLGKAGFCRLFIPGFAEMAAPLYPLTKPGTLFNWGPDQQKAYQEIKQALLTAPALGLPDLTKPFELFVDEKQGYAKGVLTQKLGPWRRPVAYLSKKLDPVAAGWPPCLRMVAAIAVLTKDAGKLTMGQPLVILAPHAVEALVKQPPDRWLSNARMTHYQAMLLDTDRVQFGPVVALNPATLLPLPEKEAPHDCLEILAETHGTRPDLTDQPIPDADYTWYTDGSSFLQEGQRRAGAAVTTETEVIWARALPAGTSAQRAELIALTQALKMAEGKKLNVYTDSRYAFATAHVHGEIYRRRGWLTSEGREIKNKNEILALLKALFLPKRLSIIHCPGHQKGNSAEARGNRMADQAAREAAMKAVLETSTLLAGKRTADGSEFEKRTADGSEFESPKKKAKVE

SEQ ID NO: 1067 - protein, 2103 aa, synthetic construct
MPAAKRVKLDGGDKKYSIGLDIGTNSVGWAVITDEYKVPSKKFKVLGNTDRHSIKKNLIGALLFDSGETAEATRLKRTARRRYTRRKNRICYLQEIFSNEMAKVDDSFFHRLEESFLVEEDKKHERHPIFGNIVDEVAYHEKYPTIYHLRKKLVDSTDKADLRLIYLALAHMIKFRGHFLIEGDLNPDNSDVDKLFIQLVQTYNQLFEENPINASGVDAKAILSARLSKSRRLENLIAQLPGEKKNGLFGNLIALSLGLTPNFKSNFDLAEDAKLQLSKDTYDDDLDNLLAQIGDQYADLFLAAKNLSDAILLSDILRVNTEITKAPLSASMIKRYDEHHQDLTLLKALVRQQLPEKYKEIFFDQSKNGYAGYIDGGASQEEFYKFIKPILEKMDGTEELLVKLNREDLLRKQRTFDNGSIPHQIHLGELHAILRRQEDFYPFLKDNREKIEKILTFRIPYYVGPLARGNSRFAWMTRKSEETITPWNFEEVVDKGASAQSFIERMTNFDKNLPNEKVLPKHSLLYEYFTVYNELTKVKYVTEGMRKPAFLSGEQKKAIVDLLFKTNRKVTVKQLKEDYFKKIECFDSVEISGVEDRFNASLGTYHDLLKIIKDKDFLDNEENEDILEDIVLTLTLFEDREMIEERLKTYAHLFDDKVMKQLKRRRYTGWGRLSRKLINGIRDKQSGKTILDFLKSDGFANRNFMQLIHDDSLTFKEDIQKAQVSGQGDSLHEHIANLAGSPAIKKGILQTVKVVDELVKVMGRHKPENIVIEMARENQTTQKGQKNSRERMKRIEEGIKELGSQILKEHPVENTQLQNEKLYLYYLQNGRDMYVDQELDINRLSDYDVDHIVPQSFLKDDSIDNKVLTRSDKARGKSDNVPSEEVVKKMKNYWRQLLNAKLITQRKFDNLTKAERGGLSELDKAGFIKRQLVETRQITKHVAQILDSRMNTKYDENDKLIREVKVITLKSKLVSDFRKDFQFYKVREINNYHHAHDAYLNAVVGTALIKKYPKLESEFVYGDYKVYDVRKMIAKSEQEIGKATAKYFFYSNIMNFFKTEITLANGEIRKRPLIETNGETGEIVWDKGRDFATVRKVLSMPQVNIVKKTEVQTGGFSKESILPKRNSDKLIARKKDWDPKKYGGFDSPTVAYSVLVVAKVEKGKSKKLKSVKELLGITIMERSSFEKNPIDFLEAKGYKEVKKDLIIKLPKYSLFELENGRKRMLASAGELQKGNELALPSKYVNFLYLASHYEKLKGSPEDNEQKQLFVEQHKHYLDEIIEQISEFSKRVILADANLDKVLSAYNKHRDKPIREQAENIIHLFTLTNLGAPAAFKYFDTTIDRKRYTSTKEVLDATLIHQSITGLYETRIDLSQLGGDGGGSSGSSGSSGSSGSSGSSGGTLNIEDEYRLHETSKEPDVPLGSTWLSDFPQAWAETGGMGLAVRQAPLIIPLKATSTPVSIKQYPMSQEARLGIKPHIQRLLDQGILVPCQSPWNTPLLPVKKPGTNDYRPVQDLREVNKRVEDIHPTVPNPYNLLSGLPPSHQWYTVLDLKDAFFCLRLHPTSQPLFAFEWRDPEMGISGQLTWTRLPQGFKNSPTLFNEALHRDLADFRIQHPDLILLQYVDDLLLAATSEQDCQRGTRALLQTLGNLGYRASAKKAQICQKQVKYLGYLLKEGQRWLTEARKETVMGQPTPKTPRQLREFLGKAGFCRLFIPGFAEMAAPLYPLTKPGTLFNWGPDQQKAYQEIKQALLTAPALGLPDLTKPFELFVDEKQGYAKGVLTQKLGPWRRPVAYLSKKLDPVAAGWPPCLRMVAAIAVLTKDAGKLTMGQPLVILAPHAVEALVKQPPDRWLSNARMTHYQAMLLDTDRVQFGPVVALNPATLLPLPEKEAPHDCLEILAETHGTRPDLTDQPIPDADYTWYTDGSSFLQEGQRRAGAAVTTETEVIWARALPAGTSAQRAELIALTQALKMAEGKKLNVYTDSRYAFATAHVHGEIYRRRGWLTSEGREIKNKNEILALLKALFLPKRLSIIHCPGHQKGNSAEARGNRMADQAAREAAMKAVLETSTLLAGKRTADGSEFEKRTADGSEFESPKKKAKVE

SEQ ID NO: 1068 - protein, 2096 aa, synthetic construct
MPAAKRVKLDGGDKKYSIGLDIGTNSVGWAVITDEYKVPSKKFKVLGNTDRHSIKKNLIGALLFDSGETAEATRLKRTARRRYTRRKNRICYLQEIFSNEMAKVDDSFFHRLEESFLVEEDKKHERHPIFGNIVDEVAYHEKYPTIYHLRKKLVDSTDKADLRLIYLALAHMIKFRGHFLIEGDLNPDNSDVDKLFIQLVQTYNQLFEENPINASGVDAKAILSARLSKSRRLENLIAQLPGEKKNGLFGNLIALSLGLTPNFKSNFDLAEDAKLQLSKDTYDDDLDNLLAQIGDQYADLFLAAKNLSDAILLSDILRVNTEITKAPLSASMIKRYDEHHQDLTLLKALVRQQLPEKYKEIFFDQSKNGYAGYIDGGASQEEFYKFIKPILEKMDGTEELLVKLNREDLLRKQRTFDNGSIPHQIHLGELHAILRRQEDFYPFLKDNREKIEKILTFRIPYYVGPLARGNSRFAWMTRKSEETITPWNFEEVVDKGASAQSFIERMTNFDKNLPNEKVLPKHSLLYEYFTVYNELTKVKYVTEGMRKPAFLSGEQKKAIVDLLFKTNRKVTVKQLKEDYFKKIECFDSVEISGVEDRFNASLGTYHDLLKIIKDKDFLDNEENEDILEDIVLTLTLFEDREMIEERLKTYAHLFDDKVMKQLKRRRYTGWGRLSRKLINGIRDKQSGKTILDFLKSDGFANRNFMQLIHDDSLTFKEDIQKAQVSGQGDSLHEHIANLAGSPAIKKGILQTVKVVDELVKVMGRHKPENIVIEMARENQTTQKGQKNSRERMKRIEEGIKELGSQILKEHPVENTQLQNEKLYLYYLQNGRDMYVDQELDINRLSDYDVDHIVPQSFLKDDSIDNKVLTRSDKARGKSDNVPSEEVVKKMKNYWRQLLNAKLITQRKFDNLTKAERGGLSELDKAGFIKRQLVETRQITKHVAQILDSRMNTKYDENDKLIREVKVITLKSKLVSDFRKDFQFYKVREINNYHHAHDAYLNAVVGTALIKKYPKLESEFVYGDYKVYDVRKMIAKSEQEIGKATAKYFFYSNIMNFFKTEITLANGEIRKRPLIETNGETGEIVWDKGRDFATVRKVLSMPQVNIVKKTEVQTGGFSKESILPKRNSDKLIARKKDWDPKKYGGFDSPTVAYSVLVVAKVEKGKSKKLKSVKELLGITIMERSSFEKNPIDFLEAKGYKEVKKDLIIKLPKYSLFELENGRKRMLASAGELQKGNELALPSKYVNFLYLASHYEKLKGSPEDNEQKQLFVEQHKHYLDEIIEQISEFSKRVILADANLDKVLSAYNKHRDKPIREQAENIIHLFTLTNLGAPAAFKYFDTTIDRKRYTSTKEVLDATLIHQSITGLYETRIDLSQLGGDGGEAAAKGSSGGSGGTLNIEDEYRLHETSKEPDVPLGSTWLSDFPQAWAETGGMGLAVRQAPLIIPLKATSTPVSIKQYPMSQEARLGIKPHIQRLLDQGILVPCQSPWNTPLLPVKKPGTNDYRPVQDLREVNKRVEDIHPTVPNPYNLLSGLPPSHQWYTVLDLKDAFFCLRLHPTSQPLFAFEWRDPEMGISGQLTWTRLPQGFKNSPTLFNEALHRDLADFRIQHPDLILLQYVDDLLLAATSEQDCQRGTRALLQTLGNLGYRASAKKAQICQKQVKYLGYLLKEGQRWLTEARKETVMGQPTPKTPRQLREFLGKAGFCRLFIPGFAEMAAPLYPLTKPGTLFNWGPDQQKAYQEIKQALLTAPALGLPDLTKPFELFVDEKQGYAKGVLTQKLGPWRRPVAYLSKKLDPVAAGWPPCLRMVAAIAVLTKDAGKLTMGQPLVILAPHAVEALVKQPPDRWLSNARMTHYQAMLLDTDRVQFGPVVALNPATLLPLPEKEAPHDCLEILAETHGTRPDLTDQPIPDADYTWYTDGSSFLQEGQRRAGAAVTTETEVIWARALPAGTSAQRAELIALTQALKMAEGKKLNVYTDSRYAFATAHVHGEIYRRRGWLTSEGREIKNKNEILALLKALFLPKRLSIIHCPGHQKGNSAEARGNRMADQAAREAAMKAVLETSTLLAGKRTADGSEFEKRTADGSEFESPKKKAKVE

SEQ ID NO: 1069 - protein, 2096 aa, synthetic construct
MPAAKRVKLDGGDKKYSIGLDIGTNSVGWAVITDEYKVPSKKFKVLGNTDRHSIKKNLIGALLFDSGETAEATRLKRTARRRYTRRKNRICYLQEIFSNEMAKVDDSFFHRLEESFLVEEDKKHERHPIFGNIVDEVAYHEKYPTIYHLRKKLVDSTDKADLRLIYLALAHMIKFRGHFLIEGDLNPDNSDVDKLFIQLVQTYNQLFEENPINASGVDAKAILSARLSKSRRLENLIAQLPGEKKNGLFGNLIALSLGLTPNFKSNFDLAEDAKLQLSKDTYDDDLDNLLAQIGDQYADLFLAAKNLSDAILLSDILRVNTEITKAPLSASMIKRYDEHHQDLTLLKALVRQQLPEKYKEIFFDQSKNGYAGYIDGGASQEEFYKFIKPILEKMDGTEELLVKLNREDLLRKQRTFDNGSIPHQIHLGELHAILRRQEDFYPFLKDNREKIEKILTFRIPYYVGPLARGNSRFAWMTRKSEETITPWNFEEVVDKGASAQSFIERMTNFDKNLPNEKVLPKHSLLYEYFTVYNELTKVKYVTEGMRKPAFLSGEQKKAIVDLLFKTNRKVTVKQLKEDYFKKIECFDSVEISGVEDRFNASLGTYHDLLKIIKDKDFLDNEENEDILEDIVLTLTLFEDREMIEERLKTYAHLFDDKVMKQLKRRRYTGWGRLSRKLINGIRDKQSGKTILDFLKSDGFANRNFMQLIHDDSLTFKEDIQKAQVSGQGDSLHEHIANLAGSPAIKKGILQTVKVVDELVKVMGRHKPENIVIEMARENQTTQKGQKNSRERMKRIEEGIKELGSQILKEHPVENTQLQNEKLYLYYLQNGRDMYVDQELDINRLSDYDVDHIVPQSFLKDDSIDNKVLTRSDKARGKSDNVPSEEVVKKMKNYWRQLLNAKLITQRKFDNLTKAERGGLSELDKAGFIKRQLVETRQITKHVAQILDSRMNTKYDENDKLIREVKVITLKSKLVSDFRKDFQFYKVREINNYHHAHDAYLNAVVGTALIKKYPKLESEFVYGDYKVYDVRKMIAKSEQEIGKATAKYFFYSNIMNFFKTEITLANGEIRKRPLIETNGETGEIVWDKGRDFATVRKVLSMPQVNIVKKTEVQTGGFSKESILPKRNSDKLIARKKDWDPKKYGGFDSPTVAYSVLVVAKVEKGKSKKLKSVKELLGITIMERSSFEKNPIDFLEAKGYKEVKKDLIIKLPKYSLFELENGRKRMLASAGELQKGNELALPSKYVNFLYLASHYEKLKGSPEDNEQKQLFVEQHKHYLDEIIEQISEFSKRVILADANLDKVLSAYNKHRDKPIREQAENIIHLFTLTNLGAPAAFKYFDTTIDRKRYTSTKEVLDATLIHQSITGLYETRIDLSQLGGDGGPAPAPAPAPAPGGTLNIEDEYRLHETSKEPDVPLGSTWLSDFPQAWAETGGMGLAVRQAPLIIPLKATSTPVSIKQYPMSQEARLGIKPHIQRLLDQGILVPCQSPWNTPLLPVKKPGTNDYRPVQDLREVNKRVEDIHPTVPNPYNLLSGLPPSHQWYTVLDLKDAFFCLRLHPTSQPLFAFEWRDPEMGISGQLTWTRLPQGFKNSPTLFNEALHRDLADFRIQHPDLILLQYVDDLLLAATSEQDCQRGTRALLQTLGNLGYRASAKKAQICQKQVKYLGYLLKEGQRWLTEARKETVMGQPTPKTPRQLREFLGKAGFCRLFIPGFAEMAAPLYPLTKPGTLFNWGPDQQKAYQEIKQALLTAPALGLPDLTKPFELFVDEKQGYAKGVLTQKLGPWRRPVAYLSKKLDPVAAGWPPCLRMVAAIAVLTKDAGKLTMGQPLVILAPHAVEALVKQPPDRWLSNARMTHYQAMLLDTDRVQFGPVVALNPATLLPLPEKEAPHDCLEILAETHGTRPDLTDQPIPDADYTWYTDGSSFLQEGQRRAGAAVTTETEVIWARALPAGTSAQRAELIALTQALKMAEGKKLNVYTDSRYAFATAHVHGEIYRRRGWLTSEGREIKNKNEILALLKALFLPKRLSIIHCPGHQKGNSAEARGNRMADQAAREAAMKAVLETSTLLAGKRTADGSEFEKRTADGSEFESPKKKAKVE

SEQ ID NO: 1070 - protein, 2091 aa, synthetic construct
MPAAKRVKLDGGDKKYSIGLDIGTNSVGWAVITDEYKVPSKKFKVLGNTDRHSIKKNLIGALLFDSGETAEATRLKRTARRRYTRRKNRICYLQEIFSNEMAKVDDSFFHRLEESFLVEEDKKHERHPIFGNIVDEVAYHEKYPTIYHLRKKLVDSTDKADLRLIYLALAHMIKFRGHFLIEGDLNPDNSDVDKLFIQLVQTYNQLFEENPINASGVDAKAILSARLSKSRRLENLIAQLPGEKKNGLFGNLIALSLGLTPNFKSNFDLAEDAKLQLSKDTYDDDLDNLLAQIGDQYADLFLAAKNLSDAILLSDILRVNTEITKAPLSASMIKRYDEHHQDLTLLKALVRQQLPEKYKEIFFDQSKNGYAGYIDGGASQEEFYKFIKPILEKMDGTEELLVKLNREDLLRKQRTFDNGSIPHQIHLGELHAILRRQEDFYPFLKDNREKIEKILTFRIPYYVGPLARGNSRFAWMTRKSEETITPWNFEEVVDKGASAQSFIERMTNFDKNLPNEKVLPKHSLLYEYFTVYNELTKVKYVTEGMRKPAFLSGEQKKAIVDLLFKTNRKVTVKQLKEDYFKKIECFDSVEISGVEDRFNASLGTYHDLLKIIKDKDFLDNEENEDILEDIVLTLTLFEDREMIEERLKTYAHLFDDKVMKQLKRRRYTGWGRLSRKLINGIRDKQSGKTILDFLKSDGFANRNFMQLIHDDSLTFKEDIQKAQVSGQGDSLHEHIANLAGSPAIKKGILQTVKVVDELVKVMGRHKPENIVIEMARENQTTQKGQKNSRERMKRIEEGIKELGSQILKEHPVENTQLQNEKLYLYYLQNGRDMYVDQELDINRLSDYDVDHIVPQSFLKDDSIDNKVLTRSDKARGKSDNVPSEEVVKKMKNYWRQLLNAKLITQRKFDNLTKAERGGLSELDKAGFIKRQLVETRQITKHVAQILDSRMNTKYDENDKLIREVKVITLKSKLVSDFRKDFQFYKVREINNYHHAHDAYLNAVVGTALIKKYPKLESEFVYGDYKVYDVRKMIAKSEQEIGKATAKYFFYSNIMNFFKTEITLANGEIRKRPLIETNGETGEIVWDKGRDFATVRKVLSMPQVNIVKKTEVQTGGFSKESILPKRNSDKLIARKKDWDPKKYGGFDSPTVAYSVLVVAKVEKGKSKKLKSVKELLGITIMERSSFEKNPIDFLEAKGYKEVKKDLIIKLPKYSLFELENGRKRMLASAGELQKGNELALPSKYVNFLYLASHYEKLKGSPEDNEQKQLFVEQHKHYLDEIIEQISEFSKRVILADANLDKVLSAYNKHRDKPIREQAENIIHLFTLTNLGAPAAFKYFDTTIDRKRYTSTKEVLDATLIHQSITGLYETRIDLSQLGGDGGGSSGGGGGTLNIEDEYRLHETSKEPDVPLGSTWLSDFPQAWAETGGMGLAVRQAPLIIPLKATSTPVSIKQYPMSQEARLGIKPHIQRLLDQGILVPCQSPWNTPLLPVKKPGTNDYRPVQDLREVNKRVEDIHPTVPNPYNLLSGLPPSHQWYTVLDLKDAFFCLRLHPTSQPLFAFEWRDPEMGISGQLTWTRLPQGFKNSPTLFNEALHRDLADFRIQHPDLILLQYVDDLLLAATSEQDCQRGTRALLQTLGNLGYRASAKKAQICQKQVKYLGYLLKEGQRWLTEARKETVMGQPTPKTPRQLREFLGKAGFCRLFIPGFAEMAAPLYPLTKPGTLFNWGPDQQKAYQEIKQALLTAPALGLPDLTKPFELFVDEKQGYAKGVLTQKLGPWRRPVAYLSKKLDPVAAGWPPCLRMVAAIAVLTKDAGKLTMGQPLVILAPHAVEALVKQPPDRWLSNARMTHYQAMLLDTDRVQFGPVVALNPATLLPLPEKEAPHDCLEILAETHGTRPDLTDQPIPDADYTWYTDGSSFLQEGQRRAGAAVTTETEVIWARALPAGTSAQRAELIALTQALKMAEGKKLNVYTDSRYAFATAHVHGEIYRRRGWLTSEGREIKNKNEILALLKALFLPKRLSIIHCPGHQKGNSAEARGNRMADQAAREAAMKAVLETSTLLAGKRTADGSEFEKRTADGSEFESPKKKAKVE

SEQ ID NO: 1071 - protein, 2094 aa, synthetic construct
MPAAKRVKLDGGDKKYSIGLDIGTNSVGWAVITDEYKVPSKKFKVLGNTDRHSIKKNLIGALLFDSGETAEATRLKRTARRRYTRRKNRICYLQEIFSNEMAKVDDSFFHRLEESFLVEEDKKHERHPIFGNIVDEVAYHEKYPTIYHLRKKLVDSTDKADLRLIYLALAHMIKFRGHFLIEGDLNPDNSDVDKLFIQLVQTYNQLFEENPINASGVDAKAILSARLSKSRRLENLIAQLPGEKKNGLFGNLIALSLGLTPNFKSNFDLAEDAKLQLSKDTYDDDLDNLLAQIGDQYADLFLAAKNLSDAILLSDILRVNTEITKAPLSASMIKRYDEHHQDLTLLKALVRQQLPEKYKEIFFDQSKNGYAGYIDGGASQEEFYKFIKPILEKMDGTEELLVKLNREDLLRKQRTFDNGSIPHQIHLGELHAILRRQEDFYPFLKDNREKIEKILTFRIPYYVGPLARGNSRFAWMTRKSEETITPWNFEEVVDKGASAQSFIERMTNFDKNLPNEKVLPKHSLLYEYFTVYNELTKVKYVTEGMRKPAFLSGEQKKAIVDLLFKTNRKVTVKQLKEDYFKKIECFDSVEISGVEDRFNASLGTYHDLLKIIKDKDFLDNEENEDILEDIVLTLTLFEDREMIEERLKTYAHLFDDKVMKQLKRRRYTGWGRLSRKLINGIRDKQSGKTILDFLKSDGFANRNFMQLIHDDSLTFKEDIQKAQVSGQGDSLHEHIANLAGSPAIKKGILQTVKVVDELVKVMGRHKPENIVIEMARENQTTQKGQKNSRERMKRIEEGIKELGSQILKEHPVENTQLQNEKLYLYYLQNGRDMYVDQELDINRLSDYDVDHIVPQSFLKDDSIDNKVLTRSDKARGKSDNVPSEEVVKKMKNYWRQLLNAKLITQRKFDNLTKAERGGLSELDKAGFIKRQLVETRQITKHVAQILDSRMNTKYDENDKLIREVKVITLKSKLVSDFRKDFQFYKVREINNYHHAHDAYLNAVVGTALIKKYPKLESEFVYGDYKVYDVRKMIAKSEQEIGKATAKYFFYSNIMNFFKTEITLANGEIRKRPLIETNGETGEIVWDKGRDFATVRKVLSMPQVNIVKKTEVQTGGFSKESILPKRNSDKLIARKKDWDPKKYGGFDSPTVAYSVLVVAKVEKGKSKKLKSVKELLGITIMERSSFEKNPIDFLEAKGYKEVKKDLIIKLPKYSLFELENGRKRMLASAGELQKGNELALPSKYVNFLYLASHYEKLKGSPEDNEQKQLFVEQHKHYLDEIIEQISEFSKRVILADANLDKVLSAYNKHRDKPIREQAENIIHLFTLTNLGAPAAFKYFDTTIDRKRYTSTKEVLDATLIHQSITGLYETRIDLSQLGGDGGPAPGGSGGGGGTLNIEDEYRLHETSKEPDVPLGSTWLSDFPQAWAETGGMGLAVRQAPLIIPLKATSTPVSIKQYPMSQEARLGIKPHIQRLLDQGILVPCQSPWNTPLLPVKKPGTNDYRPVQDLREVNKRVEDIHPTVPNPYNLLSGLPPSHQWYTVLDLKDAFFCLRLHPTSQPLFAFEWRDPEMGISGQLTWTRLPQGFKNSPTLFNEALHRDLADFRIQHPDLILLQYVDDLLLAATSEQDCQRGTRALLQTLGNLGYRASAKKAQICQKQVKYLGYLLKEGQRWLTEARKETVMGQPTPKTPRQLREFLGKAGFCRLFIPGFAEMAAPLYPLTKPGTLFNWGPDQQKAYQEIKQALLTAPALGLPDLTKPFELFVDEKQGYAKGVLTQKLGPWRRPVAYLSKKLDPVAAGWPPCLRMVAAIAVLTKDAGKLTMGQPLVILAPHAVEALVKQPPDRWLSNARMTHYQAMLLDTDRVQFGPVVALNPATLLPLPEKEAPHDCLEILAETHGTRPDLTDQPIPDADYTWYTDGSSFLQEGQRRAGAAVTTETEVIWARALPAGTSAQRAELIALTQALKMAEGKKLNVYTDSRYAFATAHVHGEIYRRRGWLTSEGREIKNKNEILALLKALFLPKRLSIIHCPGHQKGNSAEARGNRMADQAAREAAMKAVLETSTLLAGKRTADGSEFEKRTADGSEFESPKKKAKVE

SEQ ID NO: 1072 - protein, 2097 aa, synthetic construct
MPAAKRVKLDGGDKKYSIGLDIGTNSVGWAVITDEYKVPSKKFKVLGNTDRHSIKKNLIGALLFDSGETAEATRLKRTARRRYTRRKNRICYLQEIFSNEMAKVDDSFFHRLEESFLVEEDKKHERHPIFGNIVDEVAYHEKYPTIYHLRKKLVDSTDKADLRLIYLALAHMIKFRGHFLIEGDLNPDNSDVDKLFIQLVQTYNQLFEENPINASGVDAKAILSARLSKSRRLENLIAQLPGEKKNGLFGNLIALSLGLTPNFKSNFDLAEDAKLQLSKDTYDDDLDNLLAQIGDQYADLFLAAKNLSDAILLSDILRVNTEITKAPLSASMIKRYDEHHQDLTLLKALVRQQLPEKYKEIFFDQSKNGYAGYIDGGASQEEFYKFIKPILEKMDGTEELLVKLNREDLLRKQRTFDNGSIPHQIHLGELHAILRRQEDFYPFLKDNREKIEKILTFRIPYYVGPLARGNSRFAWMTRKSEETITPWNFEEVVDKGASAQSFIERMTNFDKNLPNEKVLPKHSLLYEYFTVYNELTKVKYVTEGMRKPAFLSGEQKKAIVDLLFKTNRKVTVKQLKEDYFKKIECFDSVEISGVEDRFNASLGTYHDLLKIIKDKDFLDNEENEDILEDIVLTLTLFEDREMIEERLKTYAHLFDDKVMKQLKRRRYTGWGRLSRKLINGIRDKQSGKTILDFLKSDGFANRNFMQLIHDDSLTFKEDIQKAQVSGQGDSLHEHIANLAGSPAIKKGILQTVKVVDELVKVMGRHKPENIVIEMARENQTTQKGQKNSRERMKRIEEGIKELGSQILKEHPVENTQLQNEKLYLYYLQNGRDMYVDQELDINRLSDYDVDHIVPQSFLKDDSIDNKVLTRSDKARGKSDNVPSEEVVKKMKNYWRQLLNAKLITQRKFDNLTKAERGGLSELDKAGFIKRQLVETRQITKHVAQILDSRMNTKYDENDKLIREVKVITLKSKLVSDFRKDFQFYKVREINNYHHAHDAYLNAVVGTALIKKYPKLESEFVYGDYKVYDVRKMIAKSEQEIGKATAKYFFYSNIMNFFKTEITLANGEIRKRPLIETNGETGEIVWDKGRDFATVRKVLSMPQVNIVKKTEVQTGGFSKESILPKRNSDKLIARKKDWDPKKYGGFDSPTVAYSVLVVAKVEKGKSKKLKSVKELLGITIMERSSFEKNPIDFLEAKGYKEVKKDLIIKLPKYSLFELENGRKRMLASAGELQKGNELALPSKYVNFLYLASHYEKLKGSPEDNEQKQLFVEQHKHYLDEIIEQISEFSKRVILADANLDKVLSAYNKHRDKPIREQAENIIHLFTLTNLGAPAAFKYFDTTIDRKRYTSTKEVLDATLIHQSITGLYETRIDLSQLGGDGGGSAGSAAGSGEFGGTLNIEDEYRLHETSKEPDVPLGSTWLSDFPQAWAETGGMGLAVRQAPLIIPLKATSTPVSIKQYPMSQEARLGIKPHIQRLLDQGILVPCQSPWNTPLLPVKKPGTNDYRPVQDLREVNKRVEDIHPTVPNPYNLLSGLPPSHQWYTVLDLKDAFFCLRLHPTSQPLFAFEWRDPEMGISGQLTWTRLPQGFKNSPTLFNEALHRDLADFRIQHPDLILLQYVDDLLLAATSEQDCQRGTRALLQTLGNLGYRASAKKAQICQKQVKYLGYLLKEGQRWLTEARKETVMGQPTPKTPRQLREFLGKAGFCRLFIPGFAEMAAPLYPLTKPGTLFNWGPDQQKAYQEIKQALLTAPALGLPDLTKPFELFVDEKQGYAKGVLTQKLGPWRRPVAYLSKKLDPVAAGWPPCLRMVAAIAVLTKDAGKLTMGQPLVILAPHAVEALVKQPPDRWLSNARMTHYQAMLLDTDRVQFGPVVALNPATLLPLPEKEAPHDCLEILAETHGTRPDLTDQPIPDADYTWYTDGSSFLQEGQRRAGAAVTTETEVIWARALPAGTSAQRAELIALTQALKMAEGKKLNVYTDSRYAFATAHVHGEIYRRRGWLTSEGREIKNKNEILALLKALFLPKRLSIIHCPGHQKGNSAEARGNRMADQAAREAAMKAVLETSTLLAGKRTADGSEFEKRTADGSEFESPKKKAKVE

SEQ ID NO: 1073 - protein, 2094 aa, synthetic construct
MPAAKRVKLDGGDKKYSIGLDIGTNSVGWAVITDEYKVPSKKFKVLGNTDRHSIKKNLIGALLFDSGETAEATRLKRTARRRYTRRKNRICYLQEIFSNEMAKVDDSFFHRLEESFLVEEDKKHERHPIFGNIVDEVAYHEKYPTIYHLRKKLVDSTDKADLRLIYLALAHMIKFRGHFLIEGDLNPDNSDVDKLFIQLVQTYNQLFEENPINASGVDAKAILSARLSKSRRLENLIAQLPGEKKNGLFGNLIALSLGLTPNFKSNFDLAEDAKLQLSKDTYDDDLDNLLAQIGDQYADLFLAAKNLSDAILLSDILRVNTEITKAPLSASMIKRYDEHHQDLTLLKALVRQQLPEKYKEIFFDQSKNGYAGYIDGGASQEEFYKFIKPILEKMDGTEELLVKLNREDLLRKQRTFDNGSIPHQIHLGELHAILRRQEDFYPFLKDNREKIEKILTFRIPYYVGPLARGNSRFAWMTRKSEETITPWNFEEVVDKGASAQSFIERMTNFDKNLPNEKVLPKHSLLYEYFTVYNELTKVKYVTEGMRKPAFLSGEQKKAIVDLLFKTNRKVTVKQLKEDYFKKIECFDSVEISGVEDRFNASLGTYHDLLKIIKDKDFLDNEENEDILEDIVLTLTLFEDREMIEERLKTYAHLFDDKVMKQLKRRRYTGWGRLSRKLINGIRDKQSGKTILDFLKSDGFANRNFMQLIHDDSLTFKEDIQKAQVSGQGDSLHEHIANLAGSPAIKKGILQTVKVVDELVKVMGRHKPENIVIEMARENQTTQKGQKNSRERMKRIEEGIKELGSQILKEHPVENTQLQNEKLYLYYLQNGRDMYVDQELDINRLSDYDVDHIVPQSFLKDDSIDNKVLTRSDKARGKSDNVPSEEVVKKMKNYWRQLLNAKLITQRKFDNLTKAERGGLSELDKAGFIKRQLVETRQITKHVAQILDSRMNTKYDENDKLIREVKVITLKSKLVSDFRKDFQFYKVREINNYHHAHDAYLNAVVGTALIKKYPKLESEFVYGDYKVYDVRKMIAKSEQEIGKATAKYFFYSNIMNFFKTEITLANGEIRKRPLIETNGETGEIVWDKGRDFATVRKVLSMPQVNIVKKTEVQTGGFSKESILPKRNSDKLIARKKDWDPKKYGGFDSPTVAYSVLVVAKVEKGKSKKLKSVKELLGITIMERSSFEKNPIDFLEAKGYKEVKKDLIIKLPKYSLFELENGRKRMLASAGELQKGNELALPSKYVNFLYLASHYEKLKGSPEDNEQKQLFVEQHKHYLDEIIEQISEFSKRVILADANLDKVLSAYNKHRDKPIREQAENIIHLFTLTNLGAPAAFKYFDTTIDRKRYTSTKEVLDATLIHQSITGLYETRIDLSQLGGDGGGGGGSSPAPGGTLNIEDEYRLHETSKEPDVPLGSTWLSDFPQAWAETGGMGLAVRQAPLIIPLKATSTPVSIKQYPMSQEARLGIKPHIQRLLDQGILVPCQSPWNTPLLPVKKPGTNDYRPVQDLREVNKRVEDIHPTVPNPYNLLSGLPPSHQWYTVLDLKDAFFCLRLHPTSQPLFAFEWRDPEMGISGQLTWTRLPQGFKNSPTLFNEALHRDLADFRIQHPDLILLQYVDDLLLAATSEQDCQRGTRALLQTLGNLGYRASAKKAQICQKQVKYLGYLLKEGQRWLTEARKETVMGQPTPKTPRQLREFLGKAGFCRLFIPGFAEMAAPLYPLTKPGTLFNWGPDQQKAYQEIKQALLTAPALGLPDLTKPFELFVDEKQGYAKGVLTQKLGPWRRPVAYLSKKLDPVAAGWPPCLRMVAAIAVLTKDAGKLTMGQPLVILAPHAVEALVKQPPDRWLSNARMTHYQAMLLDTDRVQFGPVVALNPATLLPLPEKEAPHDCLEILAETHGTRPDLTDQPIPDADYTWYTDGSSFLQEGQRRAGAAVTTETEVIWARALPAGTSAQRAELIALTQALKMAEGKKLNVYTDSRYAFATAHVHGEIYRRRGWLTSEGREIKNKNEILALLKALFLPKRLSIIHCPGHQKGNSAEARGNRMADQAAREAAMKAVLETSTLLAGKRTADGSEFEKRTADGSEFESPKKKAKVE

SEQ ID NO: 1074 - protein, 2095 aa, synthetic construct
MPAAKRVKLDGGDKKYSIGLDIGTNSVGWAVITDEYKVPSKKFKVLGNTDRHSIKKNLIGALLFDSGETAEATRLKRTARRRYTRRKNRICYLQEIFSNEMAKVDDSFFHRLEESFLVEEDKKHERHPIFGNIVDEVAYHEKYPTIYHLRKKLVDSTDKADLRLIYLALAHMIKFRGHFLIEGDLNPDNSDVDKLFIQLVQTYNQLFEENPINASGVDAKAILSARLSKSRRLENLIAQLPGEKKNGLFGNLIALSLGLTPNFKSNFDLAEDAKLQLSKDTYDDDLDNLLAQIGDQYADLFLAAKNLSDAILLSDILRVNTEITKAPLSASMIKRYDEHHQDLTLLKALVRQQLPEKYKEIFFDQSKNGYAGYIDGGASQEEFYKFIKPILEKMDGTEELLVKLNREDLLRKQRTFDNGSIPHQIHLGELHAILRRQEDFYPFLKDNREKIEKILTFRIPYYVGPLARGNSRFAWMTRKSEETITPWNFEEVVDKGASAQSFIERMTNFDKNLPNEKVLPKHSLLYEYFTVYNELTKVKYVTEGMRKPAFLSGEQKKAIVDLLFKTNRKVTVKQLKEDYFKKIECFDSVEISGVEDRFNASLGTYHDLLKIIKDKDFLDNEENEDILEDIVLTLTLFEDREMIEERLKTYAHLFDDKVMKQLKRRRYTGWGRLSRKLINGIRDKQSGKTILDFLKSDGFANRNFMQLIHDDSLTFKEDIQKAQVSGQGDSLHEHIANLAGSPAIKKGILQTVKVVDELVKVMGRHKPENIVIEMARENQTTQKGQKNSRERMKRIEEGIKELGSQILKEHPVENTQLQNEKLYLYYLQNGRDMYVDQELDINRLSDYDVDHIVPQSFLKDDSIDNKVLTRSDKARGKSDNVPSEEVVKKMKNYWRQLLNAKLITQRKFDNLTKAERGGLSELDKAGFIKRQLVETRQITKHVAQILDSRMNTKYDENDKLIREVKVITLKSKLVSDFRKDFQFYKVREINNYHHAHDAYLNAVVGTALIKKYPKLESEFVYGDYKVYDVRKMIAKSEQEIGKATAKYFFYSNIMNFFKTEITLANGEIRKRPLIETNGETGEIVWDKGRDFATVRKVLSMPQVNIVKKTEVQTGGFSKESILPKRNSDKLIARKKDWDPKKYGGFDSPTVAYSVLVVAKVEKGKSKKLKSVKELLGITIMERSSFEKNPIDFLEAKGYKEVKKDLIIKLPKYSLFELENGRKRMLASAGELQKGNELALPSKYVNFLYLASHYEKLKGSPEDNEQKQLFVEQHKHYLDEIIEQISEFSKRVILADANLDKVLSAYNKHRDKPIREQAENIIHLFTLTNLGAPAAFKYFDTTIDRKRYTSTKEVLDATLIHQSITGLYETRIDLSQLGGDGGGGGGSGGGGSGGTLNIEDEYRLHETSKEPDVPLGSTWLSDFPQAWAETGGMGLAVRQAPLIIPLKATSTPVSIKQYPMSQEARLGIKPHIQRLLDQGILVPCQSPWNTPLLPVKKPGTNDYRPVQDLREVNKRVEDIHPTVPNPYNLLSGLPPSHQWYTVLDLKDAFFCLRLHPTSQPLFAFEWRDPEMGISGQLTWTRLPQGFKNSPTLFNEALHRDLADFRIQHPDLILLQYVDDLLLAATSEQDCQRGTRALLQTLGNLGYRASAKKAQICQKQVKYLGYLLKEGQRWLTEARKETVMGQPTPKTPRQLREFLGKAGFCRLFIPGFAEMAAPLYPLTKPGTLFNWGPDQQKAYQEIKQALLTAPALGLPDLTKPFELFVDEKQGYAKGVLTQKLGPWRRPVAYLSKKLDPVAAGWPPCLRMVAAIAVLTKDAGKLTMGQPLVILAPHAVEALVKQPPDRWLSNARMTHYQAMLLDTDRVQFGPVVALNPATLLPLPEKEAPHDCLEILAETHGTRPDLTDQPIPDADYTWYTDGSSFLQEGQRRAGAAVTTETEVIWARALPAGTSAQRAELIALTQALKMAEGKKLNVYTDSRYAFATAHVHGEIYRRRGWLTSEGREIKNKNEILALLKALFLPKRLSIIHCPGHQKGNSAEARGNRMADQAAREAAMKAVLETSTLLAGKRTADGSEFEKRTADGSEFESPKKKAKVE

SEQ ID NO: 1075 - protein, 2096 aa, synthetic construct
MPAAKRVKLDGGDKKYSIGLDIGTNSVGWAVITDEYKVPSKKFKVLGNTDRHSIKKNLIGALLFDSGETAEATRLKRTARRRYTRRKNRICYLQEIFSNEMAKVDDSFFHRLEESFLVEEDKKHERHPIFGNIVDEVAYHEKYPTIYHLRKKLVDSTDKADLRLIYLALAHMIKFRGHFLIEGDLNPDNSDVDKLFIQLVQTYNQLFEENPINASGVDAKAILSARLSKSRRLENLIAQLPGEKKNGLFGNLIALSLGLTPNFKSNFDLAEDAKLQLSKDTYDDDLDNLLAQIGDQYADLFLAAKNLSDAILLSDILRVNTEITKAPLSASMIKRYDEHHQDLTLLKALVRQQLPEKYKEIFFDQSKNGYAGYIDGGASQEEFYKFIKPILEKMDGTEELLVKLNREDLLRKQRTFDNGSIPHQIHLGELHAILRRQEDFYPFLKDNREKIEKILTFRIPYYVGPLARGNSRFAWMTRKSEETITPWNFEEVVDKGASAQSFIERMTNFDKNLPNEKVLPKHSLLYEYFTVYNELTKVKYVTEGMRKPAFLSGEQKKAIVDLLFKTNRKVTVKQLKEDYFKKIECFDSVEISGVEDRFNASLGTYHDLLKIIKDKDFLDNEENEDILEDIVLTLTLFEDREMIEERLKTYAHLFDDKVMKQLKRRRYTGWGRLSRKLINGIRDKQSGKTILDFLKSDGFANRNFMQLIHDDSLTFKEDIQKAQVSGQGDSLHEHIANLAGSPAIKKGILQTVKVVDELVKVMGRHKPENIVIEMARENQTTQKGQKNSRERMKRIEEGIKELGSQILKEHPVENTQLQNEKLYLYYLQNGRDMYVDQELDINRLSDYDVDHIVPQSFLKDDSIDNKVLTRSDKARGKSDNVPSEEVVKKMKNYWRQLLNAKLITQRKFDNLTKAERGGLSELDKAGFIKRQLVETRQITKHVAQILDSRMNTKYDENDKLIREVKVITLKSKLVSDFRKDFQFYKVREINNYHHAHDAYLNAVVGTALIKKYPKLESEFVYGDYKVYDVRKMIAKSEQEIGKATAKYFFYSNIMNFFKTEITLANGEIRKRPLIETNGETGEIVWDKGRDFATVRKVLSMPQVNIVKKTEVQTGGFSKESILPKRNSDKLIARKKDWDPKKYGGFDSPTVAYSVLVVAKVEKGKSKKLKSVKELLGITIMERSSFEKNPIDFLEAKGYKEVKKDLIIKLPKYSLFELENGRKRMLASAGELQKGNELALPSKYVNFLYLASHYEKLKGSPEDNEQKQLFVEQHKHYLDEIIEQISEFSKRVILADANLDKVLSAYNKHRDKPIREQAENIIHLFTLTNLGAPAAFKYFDTTIDRKRYTSTKEVLDATLIHQSITGLYETRIDLSQLGGDGGGSSEAAAKGGSGGTLNIEDEYRLHETSKEPDVPLGSTWLSDFPQAWAETGGMGLAVRQAPLIIPLKATSTPVSIKQYPMSQEARLGIKPHIQRLLDQGILVPCQSPWNTPLLPVKKPGTNDYRPVQDLREVNKRVEDIHPTVPNPYNLLSGLPPSHQWYTVLDLKDAFFCLRLHPTSQPLFAFEWRDPEMGISGQLTWTRLPQGFKNSPTLFNEALHRDLADFRIQHPDLILLQYVDDLLLAATSEQDCQRGTRALLQTLGNLGYRASAKKAQICQKQVKYLGYLLKEGQRWLTEARKETVMGQPTPKTPRQLREFLGKAGFCRLFIPGFAEMAAPLYPLTKPGTLFNWGPDQQKAYQEIKQALLTAPALGLPDLTKPFELFVDEKQGYAKGVLTQKLGPWRRPVAYLSKKLDPVAAGWPPCLRMVAAIAVLTKDAGKLTMGQPLVILAPHAVEALVKQPPDRWLSNARMTHYQAMLLDTDRVQFGPVVALNPATLLPLPEKEAPHDCLEILAETHGTRPDLTDQPIPDADYTWYTDGSSFLQEGQRRAGAAVTTETEVIWARALPAGTSAQRAELIALTQALKMAEGKKLNVYTDSRYAFATAHVHGEIYRRRGWLTSEGREIKNKNEILALLKALFLPKRLSIIHCPGHQKGNSAEARGNRMADQAAREAAMKAVLETSTLLAGKRTADGSEFEKRTADGSEFESPKKKAKVE

SEQ ID NO: 1076 - protein, 2096 aa, synthetic construct
MPAAKRVKLDGGDKKYSIGLDIGTNSVGWAVITDEYKVPSKKFKVLGNTDRHSIKKNLIGALLFDSGETAEATRLKRTARRRYTRRKNRICYLQEIFSNEMAKVDDSFFHRLEESFLVEEDKKHERHPIFGNIVDEVAYHEKYPTIYHLRKKLVDSTDKADLRLIYLALAHMIKFRGHFLIEGDLNPDNSDVDKLFIQLVQTYNQLFEENPINASGVDAKAILSARLSKSRRLENLIAQLPGEKKNGLFGNLIALSLGLTPNFKSNFDLAEDAKLQLSKDTYDDDLDNLLAQIGDQYADLFLAAKNLSDAILLSDILRVNTEITKAPLSASMIKRYDEHHQDLTLLKALVRQQLPEKYKEIFFDQSKNGYAGYIDGGASQEEFYKFIKPILEKMDGTEELLVKLNREDLLRKQRTFDNGSIPHQIHLGELHAILRRQEDFYPFLKDNREKIEKILTFRIPYYVGPLARGNSRFAWMTRKSEETITPWNFEEVVDKGASAQSFIERMTNFDKNLPNEKVLPKHSLLYEYFTVYNELTKVKYVTEGMRKPAFLSGEQKKAIVDLLFKTNRKVTVKQLKEDYFKKIECFDSVEISGVEDRFNASLGTYHDLLKIIKDKDFLDNEENEDILEDIVLTLTLFEDREMIEERLKTYAHLFDDKVMKQLKRRRYTGWGRLSRKLINGIRDKQSGKTILDFLKSDGFANRNFMQLIHDDSLTFKEDIQKAQVSGQGDSLHEHIANLAGSPAIKKGILQTVKVVDELVKVMGRHKPENIVIEMARENQTTQKGQKNSRERMKRIEEGIKELGSQILKEHPVENTQLQNEKLYLYYLQNGRDMYVDQELDINRLSDYDVDHIVPQSFLKDDSIDNKVLTRSDKARGKSDNVPSEEVVKKMKNYWRQLLNAKLITQRKFDNLTKAERGGLSELDKAGFIKRQLVETRQITKHVAQILDSRMNTKYDENDKLIREVKVITLKSKLVSDFRKDFQFYKVREINNYHHAHDAYLNAVVGTALIKKYPKLESEFVYGDYKVYDVRKMIAKSEQEIGKATAKYFFYSNIMNFFKTEITLANGEIRKRPLIETNGETGEIVWDKGRDFATVRKVLSMPQVNIVKKTEVQTGGFSKESILPKRNSDKLIARKKDWDPKKYGGFDSPTVAYSVLVVAKVEKGKSKKLKSVKELLGITIMERSSFEKNPIDFLEAKGYKEVKKDLIIKLPKYSLFELENGRKRMLASAGELQKGNELALPSKYVNFLYLASHYEKLKGSPEDNEQKQLFVEQHKHYLDEIIEQISEFSKRVILADANLDKVLSAYNKHRDKPIREQAENIIHLFTLTNLGAPAAFKYFDTTIDRKRYTSTKEVLDATLIHQSITGLYETRIDLSQLGGDGGGGGPAPEAAAKGGTLNIEDEYRLHETSKEPDVPLGSTWLSDFPQAWAETGGMGLAVRQAPLIIPLKATSTPVSIKQYPMSQEARLGIKPHIQRLLDQGILVPCQSPWNTPLLPVKKPGTNDYRPVQDLREVNKRVEDIHPTVPNPYNLLSGLPPSHQWYTVLDLKDAFFCLRLHPTSQPLFAFEWRDPEMGISGQLTWTRLPQGFKNSPTLFNEALHRDLADFRIQHPDLILLQYVDDLLLAATSEQDCQRGTRALLQTLGNLGYRASAKKAQICQKQVKYLGYLLKEGQRWLTEARKETVMGQPTPKTPRQLREFLGKAGFCRLFIPGFAEMAAPLYPLTKPGTLFNWGPDQQKAYQEIKQALLTAPALGLPDLTKPFELFVDEKQGYAKGVLTQKLGPWRRPVAYLSKKLDPVAAGWPPCLRMVAAIAVLTKDAGKLTMGQPLVILAPHAVEALVKQPPDRWLSNARMTHYQAMLLDTDRVQFGPVVALNPATLLPLPEKEAPHDCLEILAETHGTRPDLTDQPIPDADYTWYTDGSSFLQEGQRRAGAAVTTETEVIWARALPAGTSAQRAELIALTQALKMAEGKKLNVYTDSRYAFATAHVHGEIYRRRGWLTSEGREIKNKNEILALLKALFLPKRLSIIHCPGHQKGNSAEARGNRMADQAAREAAMKAVLETSTLLAGKRTADGSEFEKRTADGSEFESPKKKAKVE

SEQ ID NO: 1077 - protein, 2097 aa, synthetic construct
MPAAKRVKLDGGDKKYSIGLDIGTNSVGWAVITDEYKVPSKKFKVLGNTDRHSIKKNLIGALLFDSGETAEATRLKRTARRRYTRRKNRICYLQEIFSNEMAKVDDSFFHRLEESFLVEEDKKHERHPIFGNIVDEVAYHEKYPTIYHLRKKLVDSTDKADLRLIYLALAHMIKFRGHFLIEGDLNPDNSDVDKLFIQLVQTYNQLFEENPINASGVDAKAILSARLSKSRRLENLIAQLPGEKKNGLFGNLIALSLGLTPNFKSNFDLAEDAKLQLSKDTYDDDLDNLLAQIGDQYADLFLAAKNLSDAILLSDILRVNTEITKAPLSASMIKRYDEHHQDLTLLKALVRQQLPEKYKEIFFDQSKNGYAGYIDGGASQEEFYKFIKPILEKMDGTEELLVKLNREDLLRKQRTFDNGSIPHQIHLGELHAILRRQEDFYPFLKDNREKIEKILTFRIPYYVGPLARGNSRFAWMTRKSEETITPWNFEEVVDKGASAQSFIERMTNFDKNLPNEKVLPKHSLLYEYFTVYNELTKVKYVTEGMRKPAFLSGEQKKAIVDLLFKTNRKVTVKQLKEDYFKKIECFDSVEISGVEDRFNASLGTYHDLLKIIKDKDFLDNEENEDILEDIVLTLTLFEDREMIEERLKTYAHLFDDKVMKQLKRRRYTGWGRLSRKLINGIRDKQSGKTILDFLKSDGFANRNFMQLIHDDSLTFKEDIQKAQVSGQGDSLHEHIANLAGSPAIKKGILQTVKVVDELVKVMGRHKPENIVIEMARENQTTQKGQKNSRERMKRIEEGIKELGSQILKEHPVENTQLQNEKLYLYYLQNGRDMYVDQELDINRLSDYDVDHIVPQSFLKDDSIDNKVLTRSDKARGKSDNVPSEEVVKKMKNYWRQLLNAKLITQRKFDNLTKAERGGLSELDKAGFIKRQLVETRQITKHVAQILDSRMNTKYDENDKLIREVKVITLKSKLVSDFRKDFQFYKVREINNYHHAHDAYLNAVVGTALIKKYPKLESEFVYGDYKVYDVRKMIAKSEQEIGKATAKYFFYSNIMNFFKTEITLANGEIRKRPLIETNGETGEIVWDKGRDFATVRKVLSMPQVNIVKKTEVQTGGFSKESILPKRNSDKLIARKKDWDPKKYGGFDSPTVAYSVLVVAKVEKGKSKKLKSVKELLGITIMERSSFEKNPIDFLEAKGYKEVKKDLIIKLPKYSLFELENGRKRMLASAGELQKGNELALPSKYVNFLYLASHYEKLKGSPEDNEQKQLFVEQHKHYLDEIIEQISEFSKRVILADANLDKVLSAYNKHRDKPIREQAENIIHLFTLTNLGAPAAFKYFDTTIDRKRYTSTKEVLDATLIHQSITGLYETRIDLSQLGGDGGGSSGSSGSSGSSGGTLNIEDEYRLHETSKEPDVPLGSTWLSDFPQAWAETGGMGLAVRQAPLIIPLKATSTPVSIKQYPMSQEARLGIKPHIQRLLDQGILVPCQSPWNTPLLPVKKPGTNDYRPVQDLREVNKRVEDIHPTVPNPYNLLSGLPPSHQWYTVLDLKDAFFCLRLHPTSQPLFAFEWRDPEMGISGQLTWTRLPQGFKNSPTLFNEALHRDLADFRIQHPDLILLQYVDDLLLAATSEQDCQRGTRALLQTLGNLGYRASAKKAQICQKQVKYLGYLLKEGQRWLTEARKETVMGQPTPKTPRQLREFLGKAGFCRLFIPGFAEMAAPLYPLTKPGTLFNWGPDQQKAYQEIKQALLTAPALGLPDLTKPFELFVDEKQGYAKGVLTQKLGPWRRPVAYLSKKLDPVAAGWPPCLRMVAAIAVLTKDAGKLTMGQPLVILAPHAVEALVKQPPDRWLSNARMTHYQAMLLDTDRVQFGPVVALNPATLLPLPEKEAPHDCLEILAETHGTRPDLTDQPIPDADYTWYTDGSSFLQEGQRRAGAAVTTETEVIWARALPAGTSAQRAELIALTQALKMAEGKKLNVYTDSRYAFATAHVHGEIYRRRGWLTSEGREIKNKNEILALLKALFLPKRLSIIHCPGHQKGNSAEARGNRMADQAAREAAMKAVLETSTLLAGKRTADGSEFEKRTADGSEFESPKKKAKVE

SEQ ID NO: 1078 - protein, 2093 aa, synthetic construct
MPAAKRVKLDGGDKKYSIGLDIGTNSVGWAVITDEYKVPSKKFKVLGNTDRHSIKKNLIGALLFDSGETAEATRLKRTARRRYTRRKNRICYLQEIFSNEMAKVDDSFFHRLEESFLVEEDKKHERHPIFGNIVDEVAYHEKYPTIYHLRKKLVDSTDKADLRLIYLALAHMIKFRGHFLIEGDLNPDNSDVDKLFIQLVQTYNQLFEENPINASGVDAKAILSARLSKSRRLENLIAQLPGEKKNGLFGNLIALSLGLTPNFKSNFDLAEDAKLQLSKDTYDDDLDNLLAQIGDQYADLFLAAKNLSDAILLSDILRVNTEITKAPLSASMIKRYDEHHQDLTLLKALVRQQLPEKYKEIFFDQSKNGYAGYIDGGASQEEFYKFIKPILEKMDGTEELLVKLNREDLLRKQRTFDNGSIPHQIHLGELHAILRRQEDFYPFLKDNREKIEKILTFRIPYYVGPLARGNSRFAWMTRKSEETITPWNFEEVVDKGASAQSFIERMTNFDKNLPNEKVLPKHSLLYEYFTVYNELTKVKYVTEGMRKPAFLSGEQKKAIVDLLFKTNRKVTVKQLKEDYFKKIECFDSVEISGVEDRFNASLGTYHDLLKIIKDKDFLDNEENEDILEDIVLTLTLFEDREMIEERLKTYAHLFDDKVMKQLKRRRYTGWGRLSRKLINGIRDKQSGKTILDFLKSDGFANRNFMQLIHDDSLTFKEDIQKAQVSGQGDSLHEHIANLAGSPAIKKGILQTVKVVDELVKVMGRHKPENIVIEMARENQTTQKGQKNSRERMKRIEEGIKELGSQILKEHPVENTQLQNEKLYLYYLQNGRDMYVDQELDINRLSDYDVDHIVPQSFLKDDSIDNKVLTRSDKARGKSDNVPSEEVVKKMKNYWRQLLNAKLITQRKFDNLTKAERGGLSELDKAGFIKRQLVETRQITKHVAQILDSRMNTKYDENDKLIREVKVITLKSKLVSDFRKDFQFYKVREINNYHHAHDAYLNAVVGTALIKKYPKLESEFVYGDYKVYDVRKMIAKSEQEIGKATAKYFFYSNIMNFFKTEITLANGEIRKRPLIETNGETGEIVWDKGRDFATVRKVLSMPQVNIVKKTEVQTGGFSKESILPKRNSDKLIARKKDWDPKKYGGFDSPTVAYSVLVVAKVEKGKSKKLKSVKELLGITIMERSSFEKNPIDFLEAKGYKEVKKDLIIKLPKYSLFELENGRKRMLASAGELQKGNELALPSKYVNFLYLASHYEKLKGSPEDNEQKQLFVEQHKHYLDEIIEQISEFSKRVILADANLDKVLSAYNKHRDKPIREQAENIIHLFTLTNLGAPAAFKYFDTTIDRKRYTSTKEVLDATLIHQSITGLYETRIDLSQLGGDGGEAAAKGSSGGTLNIEDEYRLHETSKEPDVPLGSTWLSDFPQAWAETGGMGLAVRQAPLIIPLKATSTPVSIKQYPMSQEARLGIKPHIQRLLDQGILVPCQSPWNTPLLPVKKPGTNDYRPVQDLREVNKRVEDIHPTVPNPYNLLSGLPPSHQWYTVLDLKDAFFCLRLHPTSQPLFAFEWRDPEMGISGQLTWTRLPQGFKNSPTLFNEALHRDLADFRIQHPDLILLQYVDDLLLAATSEQDCQRGTRALLQTLGNLGYRASAKKAQICQKQVKYLGYLLKEGQRWLTEARKETVMGQPTPKTPRQLREFLGKAGFCRLFIPGFAEMAAPLYPLTKPGTLFNWGPDQQKAYQEIKQALLTAPALGLPDLTKPFELFVDEKQGYAKGVLTQKLGPWRRPVAYLSKKLDPVAAGWPPCLRMVAAIAVLTKDAGKLTMGQPLVILAPHAVEALVKQPPDRWLSNARMTHYQAMLLDTDRVQFGPVVALNPATLLPLPEKEAPHDCLEILAETHGTRPDLTDQPIPDADYTWYTDGSSFLQEGQRRAGAAVTTETEVIWARALPAGTSAQRAELIALTQALKMAEGKKLNVYTDSRYAFATAHVHGEIYRRRGWLTSEGREIKNKNEILALLKALFLPKRLSIIHCPGHQKGNSAEARGNRMADQAAREAAMKAVLETSTLLAGKRTADGSEFEKRTADGSEFESPKKKAKVE

SEQ ID NO: 1079 - protein, 2100 aa, synthetic construct
MPAAKRVKLDGGDKKYSIGLDIGTNSVGWAVITDEYKVPSKKFKVLGNTDRHSIKKNLIGALLFDSGETAEATRLKRTARRRYTRRKNRICYLQEIFSNEMAKVDDSFFHRLEESFLVEEDKKHERHPIFGNIVDEVAYHEKYPTIYHLRKKLVDSTDKADLRLIYLALAHMIKFRGHFLIEGDLNPDNSDVDKLFIQLVQTYNQLFEENPINASGVDAKAILSARLSKSRRLENLIAQLPGEKKNGLFGNLIALSLGLTPNFKSNFDLAEDAKLQLSKDTYDDDLDNLLAQIGDQYADLFLAAKNLSDAILLSDILRVNTEITKAPLSASMIKRYDEHHQDLTLLKALVRQQLPEKYKEIFFDQSKNGYAGYIDGGASQEEFYKFIKPILEKMDGTEELLVKLNREDLLRKQRTFDNGSIPHQIHLGELHAILRRQEDFYPFLKDNREKIEKILTFRIPYYVGPLARGNSRFAWMTRKSEETITPWNFEEVVDKGASAQSFIERMTNFDKNLPNEKVLPKHSLLYEYFTVYNELTKVKYVTEGMRKPAFLSGEQKKAIVDLLFKTNRKVTVKQLKEDYFKKIECFDSVEISGVEDRFNASLGTYHDLLKIIKDKDFLDNEENEDILEDIVLTLTLFEDREMIEERLKTYAHLFDDKVMKQLKRRRYTGWGRLSRKLINGIRDKQSGKTILDFLKSDGFANRNFMQLIHDDSLTFKEDIQKAQVSGQGDSLHEHIANLAGSPAIKKGILQTVKVVDELVKVMGRHKPENIVIEMARENQTTQKGQKNSRERMKRIEEGIKELGSQILKEHPVENTQLQNEKLYLYYLQNGRDMYVDQELDINRLSDYDVDHIVPQSFLKDDSIDNKVLTRSDKARGKSDNVPSEEVVKKMKNYWRQLLNAKLITQRKFDNLTKAERGGLSELDKAGFIKRQLVETRQITKHVAQILDSRMNTKYDENDKLIREVKVITLKSKLVSDFRKDFQFYKVREINNYHHAHDAYLNAVVGTALIKKYPKLESEFVYGDYKVYDVRKMIAKSEQEIGKATAKYFFYSNIMNFFKTEITLANGEIRKRPLIETNGETGEIVWDKGRDFATVRKVLSMPQVNIVKKTEVQTGGFSKESILPKRNSDKLIARKKDWDPKKYGGFDSPTVAYSVLVVAKVEKGKSKKLKSVKELLGITIMERSSFEKNPIDFLEAKGYKEVKKDLIIKLPKYSLFELENGRKRMLASAGELQKGNELALPSKYVNFLYLASHYEKLKGSPEDNEQKQLFVEQHKHYLDEIIEQISEFSKRVILADANLDKVLSAYNKHRDKPIREQAENIIHLFTLTNLGAPAAFKYFDTTIDRKRYTSTKEVLDATLIHQSITGLYETRIDLSQLGGDGGGGGGSEAAAKGGGGSGGTLNIEDEYRLHETSKEPDVPLGSTWLSDFPQAWAETGGMGLAVRQAPLIIPLKATSTPVSIKQYPMSQEARLGIKPHIQRLLDQGILVPCQSPWNTPLLPVKKPGTNDYRPVQDLREVNKRVEDIHPTVPNPYNLLSGLPPSHQWYTVLDLKDAFFCLRLHPTSQPLFAFEWRDPEMGISGQLTWTRLPQGFKNSPTLFNEALHRDLADFRIQHPDLILLQYVDDLLLAATSEQDCQRGTRALLQTLGNLGYRASAKKAQICQKQVKYLGYLLKEGQRWLTEARKETVMGQPTPKTPRQLREFLGKAGFCRLFIPGFAEMAAPLYPLTKPGTLFNWGPDQQKAYQEIKQALLTAPALGLPDLTKPFELFVDEKQGYAKGVLTQKLGPWRRPVAYLSKKLDPVAAGWPPCLRMVAAIAVLTKDAGKLTMGQPLVILAPHAVEALVKQPPDRWLSNARMTHYQAMLLDTDRVQFGPVVALNPATLLPLPEKEAPHDCLEILAETHGTRPDLTDQPIPDADYTWYTDGSSFLQEGQRRAGAAVTTETEVIWARALPAGTSAQRAELIALTQALKMAEGKKLNVYTDSRYAFATAHVHGEIYRRRGWLTSEGREIKNKNEILALLKALFLPKRLSIIHCPGHQKGNSAEARGNRMADQAAREAAMKAVLETSTLLAGKRTADGSEFEKRTADGSEFESPKKKAKVE

SEQ ID NO: 1080 - protein, 2088 aa, synthetic construct
MPAAKRVKLDGGDKKYSIGLDIGTNSVGWAVITDEYKVPSKKFKVLGNTDRHSIKKNLIGALLFDSGETAEATRLKRTARRRYTRRKNRICYLQEIFSNEMAKVDDSFFHRLEESFLVEEDKKHERHPIFGNIVDEVAYHEKYPTIYHLRKKLVDSTDKADLRLIYLALAHMIKFRGHFLIEGDLNPDNSDVDKLFIQLVQTYNQLFEENPINASGVDAKAILSARLSKSRRLENLIAQLPGEKKNGLFGNLIALSLGLTPNFKSNFDLAEDAKLQLSKDTYDDDLDNLLAQIGDQYADLFLAAKNLSDAILLSDILRVNTEITKAPLSASMIKRYDEHHQDLTLLKALVRQQLPEKYKEIFFDQSKNGYAGYIDGGASQEEFYKFIKPILEKMDGTEELLVKLNREDLLRKQRTFDNGSIPHQIHLGELHAILRRQEDFYPFLKDNREKIEKILTFRIPYYVGPLARGNSRFAWMTRKSEETITPWNFEEVVDKGASAQSFIERMTNFDKNLPNEKVLPKHSLLYEYFTVYNELTKVKYVTEGMRKPAFLSGEQKKAIVDLLFKTNRKVTVKQLKEDYFKKIECFDSVEISGVEDRFNASLGTYHDLLKIIKDKDFLDNEENEDILEDIVLTLTLFEDREMIEERLKTYAHLFDDKVMKQLKRRRYTGWGRLSRKLINGIRDKQSGKTILDFLKSDGFANRNFMQLIHDDSLTFKEDIQKAQVSGQGDSLHEHIANLAGSPAIKKGILQTVKVVDELVKVMGRHKPENIVIEMARENQTTQKGQKNSRERMKRIEEGIKELGSQILKEHPVENTQLQNEKLYLYYLQNGRDMYVDQELDINRLSDYDVDHIVPQSFLKDDSIDNKVLTRSDKARGKSDNVPSEEVVKKMKNYWRQLLNAKLITQRKFDNLTKAERGGLSELDKAGFIKRQLVETRQITKHVAQILDSRMNTKYDENDKLIREVKVITLKSKLVSDFRKDFQFYKVREINNYHHAHDAYLNAVVGTALIKKYPKLESEFVYGDYKVYDVRKMIAKSEQEIGKATAKYFFYSNIMNFFKTEITLANGEIRKRPLIETNGETGEIVWDKGRDFATVRKVLSMPQVNIVKKTEVQTGGFSKESILPKRNSDKLIARKKDWDPKKYGGFDSPTVAYSVLVVAKVEKGKSKKLKSVKELLGITIMERSSFEKNPIDFLEAKGYKEVKKDLIIKLPKYSLFELENGRKRMLASAGELQKGNELALPSKYVNFLYLASHYEKLKGSPEDNEQKQLFVEQHKHYLDEIIEQISEFSKRVILADANLDKVLSAYNKHRDKPIREQAENIIHLFTLTNLGAPAAFKYFDTTIDRKRYTSTKEVLDATLIHQSITGLYETRIDLSQLGGDGGGGGGGTLNIEDEYRLHETSKEPDVPLGSTWLSDFPQAWAETGGMGLAVRQAPLIIPLKATSTPVSIKQYPMSQEARLGIKPHIQRLLDQGILVPCQSPWNTPLLPVKKPGTNDYRPVQDLREVNKRVEDIHPTVPNPYNLLSGLPPSHQWYTVLDLKDAFFCLRLHPTSQPLFAFEWRDPEMGISGQLTWTRLPQGFKNSPTLFNEALHRDLADFRIQHPDLILLQYVDDLLLAATSEQDCQRGTRALLQTLGNLGYRASAKKAQICQKQVKYLGYLLKEGQRWLTEARKETVMGQPTPKTPRQLREFLGKAGFCRLFIPGFAEMAAPLYPLTKPGTLFNWGPDQQKAYQEIKQALLTAPALGLPDLTKPFELFVDEKQGYAKGVLTQKLGPWRRPVAYLSKKLDPVAAGWPPCLRMVAAIAVLTKDAGKLTMGQPLVILAPHAVEALVKQPPDRWLSNARMTHYQAMLLDTDRVQFGPVVALNPATLLPLPEKEAPHDCLEILAETHGTRPDLTDQPIPDADYTWYTDGSSFLQEGQRRAGAAVTTETEVIWARALPAGTSAQRAELIALTQALKMAEGKKLNVYTDSRYAFATAHVHGEIYRRRGWLTSEGREIKNKNEILALLKALFLPKRLSIIHCPGHQKGNSAEARGNRMADQAAREAAMKAVLETSTLLAGKRTADGSEFEKRTADGSEFESPKKKAKVE

SEQ ID NO: 1081 - protein, 2096 aa, synthetic construct
MPAAKRVKLDGGDKKYSIGLDIGTNSVGWAVITDEYKVPSKKFKVLGNTDRHSIKKNLIGALLFDSGETAEATRLKRTARRRYTRRKNRICYLQEIFSNEMAKVDDSFFHRLEESFLVEEDKKHERHPIFGNIVDEVAYHEKYPTIYHLRKKLVDSTDKADLRLIYLALAHMIKFRGHFLIEGDLNPDNSDVDKLFIQLVQTYNQLFEENPINASGVDAKAILSARLSKSRRLENLIAQLPGEKKNGLFGNLIALSLGLTPNFKSNFDLAEDAKLQLSKDTYDDDLDNLLAQIGDQYADLFLAAKNLSDAILLSDILRVNTEITKAPLSASMIKRYDEHHQDLTLLKALVRQQLPEKYKEIFFDQSKNGYAGYIDGGASQEEFYKFIKPILEKMDGTEELLVKLNREDLLRKQRTFDNGSIPHQIHLGELHAILRRQEDFYPFLKDNREKIEKILTFRIPYYVGPLARGNSRFAWMTRKSEETITPWNFEEVVDKGASAQSFIERMTNFDKNLPNEKVLPKHSLLYEYFTVYNELTKVKYVTEGMRKPAFLSGEQKKAIVDLLFKTNRKVTVKQLKEDYFKKIECFDSVEISGVEDRFNASLGTYHDLLKIIKDKDFLDNEENEDILEDIVLTLTLFEDREMIEERLKTYAHLFDDKVMKQLKRRRYTGWGRLSRKLINGIRDKQSGKTILDFLKSDGFANRNFMQLIHDDSLTFKEDIQKAQVSGQGDSLHEHIANLAGSPAIKKGILQTVKVVDELVKVMGRHKPENIVIEMARENQTTQKGQKNSRERMKRIEEGIKELGSQILKEHPVENTQLQNEKLYLYYLQNGRDMYVDQELDINRLSDYDVDHIVPQSFLKDDSIDNKVLTRSDKARGKSDNVPSEEVVKKMKNYWRQLLNAKLITQRKFDNLTKAERGGLSELDKAGFIKRQLVETRQITKHVAQILDSRMNTKYDENDKLIREVKVITLKSKLVSDFRKDFQFYKVREINNYHHAHDAYLNAVVGTALIKKYPKLESEFVYGDYKVYDVRKMIAKSEQEIGKATAKYFFYSNIMNFFKTEITLANGEIRKRPLIETNGETGEIVWDKGRDFATVRKVLSMPQVNIVKKTEVQTGGFSKESILPKRNSDKLIARKKDWDPKKYGGFDSPTVAYSVLVVAKVEKGKSKKLKSVKELLGITIMERSSFEKNPIDFLEAKGYKEVKKDLIIKLPKYSLFELENGRKRMLASAGELQKGNELALPSKYVNFLYLASHYEKLKGSPEDNEQKQLFVEQHKHYLDEIIEQISEFSKRVILADANLDKVLSAYNKHRDKPIREQAENIIHLFTLTNLGAPAAFKYFDTTIDRKRYTSTKEVLDATLIHQSITGLYETRIDLSQLGGDGGGGSEAAAKGGGGGTLNIEDEYRLHETSKEPDVPLGSTWLSDFPQAWAETGGMGLAVRQAPLIIPLKATSTPVSIKQYPMSQEARLGIKPHIQRLLDQGILVPCQSPWNTPLLPVKKPGTNDYRPVQDLREVNKRVEDIHPTVPNPYNLLSGLPPSHQWYTVLDLKDAFFCLRLHPTSQPLFAFEWRDPEMGISGQLTWTRLPQGFKNSPTLFNEALHRDLADFRIQHPDLILLQYVDDLLLAATSEQDCQRGTRALLQTLGNLGYRASAKKAQICQKQVKYLGYLLKEGQRWLTEARKETVMGQPTPKTPRQLREFLGKAGFCRLFIPGFAEMAAPLYPLTKPGTLFNWGPDQQKAYQEIKQALLTAPALGLPDLTKPFELFVDEKQGYAKGVLTQKLGPWRRPVAYLSKKLDPVAAGWPPCLRMVAAIAVLTKDAGKLTMGQPLVILAPHAVEALVKQPPDRWLSNARMTHYQAMLLDTDRVQFGPVVALNPATLLPLPEKEAPHDCLEILAETHGTRPDLTDQPIPDADYTWYTDGSSFLQEGQRRAGAAVTTETEVIWARALPAGTSAQRAELIALTQALKMAEGKKLNVYTDSRYAFATAHVHGEIYRRRGWLTSEGREIKNKNEILALLKALFLPKRLSIIHCPGHQKGNSAEARGNRMADQAAREAAMKAVLETSTLLAGKRTADGSEFEKRTADGSEFESPKKKAKVE

(The sequence listing continues in the following parts.)